(19) United States
(12) Patent Application Publication
(10) Pub. No.: US 2014/0038845 A1
(43) Pub. Date: Feb. 6, 2014

(54) Corn Polymorphisms and Methods of Genotyping

(71) Applicant: MONSANTO TECHNOLOGY LLC, ST. LOUIS, MO (US)

(72) Inventors: KUNSHENG WU, BALLWIN, MO (US); JOHN LEDEAUX, CREVE COEUR, MO (US); DAVID BUTRUILLE, DES MOINES, IA (US); ANJU GUPTA, Ladue, MO (US); RICHARD JOHNSON, URBANA, IL (US); SAM EATHINGTON, Chesterfield, MO (US); JASON BULL, WILDWOOD, MO (US); MARLIN EDWARDS, DAVIS, CA (US)

(73) Assignee: MONSANTO TECHNOLOGY LLC, ST. LOUIS, MO (US)

(21) Appl. No.: 14/048,543

(22) Filed: Oct. 8, 2013

Related U.S. Application Data
(63) Continuation of application No. 13/954,321, filed on Jul. 30, 2013.
Application No. 13/954,321 is a continuation of application No. 12/600,544, filed on Jun. 2, 2010, now abandoned.
(60) Provisional application No. 60/930,609, filed on May 17, 2007.

(51) Int. Cl. C12Q 1/68

(52) U.S. Cl. CPC C12Q 1/6895
USPC 506/9; 506/16; 536/24.3

(57) ABSTRACT

Polymorphic corn DNA loci useful for genotyping between at least two varieties of corn. Sequences of the loci are useful for providing the basis for designing primers and probe oligonucleotides for detecting polymorphisms in maize DNA. Polymorphisms are useful for genotyping applications in corn. The polymorphic markers are useful to establish marker/trait associations, e.g. in linkage disequilibrium mapping and association studies, positional cloning and transgenic applications, marker-aided breeding and marker-assisted selection, hybrid prediction and identity by descent studies. The polymorphic markers are also useful in mapping libraries of DNA clones, e.g. for corn QTLs and genes linked to polymorphisms.

### CROSS-REFERENCE TO RELATED APPLICATIONS

[0001] This application is a Continuation of U.S. application Ser. No. 13/954,321, filed Jul. 30, 2013, and incorporated by reference herein in its entirety, which is a Continuation of U.S. National Stage application Ser. No. 12/600,544, filed Nov. 17, 2009, and incorporated by reference herein in its entirety, which is a U.S. National Stage Application of International Patent Application No. PCT/US2008/006321, filed May 16, 2008, and incorporated by reference herein in its entirety, which claims the benefit of U.S. Patent Application No. 60/930,609, filed May 17, 2007, and incorporated by reference herein in its entirety.

### STATEMENT REGARDING FEDERALLY SPONSORED RESEARCH OR DEVELOPMENT

[0002] Not Applicable.

### INCORPORATION OF SEQUENCE LISTING AND TABLES

[0003] A sequence listing contained in the file named “46_{—}21_{—}54824 SEQLIST_revised_ST25.txt” which is 7,440,542 bytes (measured by MS-Windows) and comprising 7,268 nucleotide sequences, created on Sep. 14, 2012, is electronically filed herewith and is herein incorporated by reference. Table 1 and Table 3, filed in International Patent Application No. PCT/US2008/006321 and in U.S. National Stage application Ser. No. 12/600,544, are both herein expressly incorporated by reference.

### BACKGROUND OF THE INVENTION

[0004] 1. Field of the Invention

[0005] Disclosed herein are corn polymorphisms, nucleic acid molecules related to such polymorphisms and methods of using such polymorphisms and molecules as molecular markers, e.g. in genotyping.

[0006] 2. Related Art

[0007] Polymorphisms are useful as molecular markers, also termed genetic markers, for genotyping-related applications in the agriculture field, e.g. in plant genetic studies and commercial breeding. Such uses of polymorphisms are described in U.S. Pat. Nos. 5,385,835; 5,437,697; 5,385,835; 5,492,547; 5,746,023; 5,962,764; 5,981,832 and 6,100,030.

[0008] In particular, the use of molecular markers in breeding programs has accelerated the genetic accumulation of valuable traits into a germplasm compared to that achieved based on phenotypic data only. Herein, “germplasm” includes breeding germplasm, breeding populations, collection of elite inbred lines, populations of random mating individuals, and biparental crosses. Molecular marker alleles (an “allele” is an alternative sequence at a locus) are used to identify plants that contain a desired genotype at multiple loci, and that are expected to transfer the desired genotype, along with a desired phenotype to their progeny. Molecular marker alleles can be used to identify plants that contain the desired genotype at one marker locus, several loci, or a haplotype, and that would be expected to transfer the desired genotype, along with a desired phenotype to their progeny.

[0009] The highly conserved nature of DNA, combined with the rare occurrences of stable polymorphisms, provide molecular markers which can be both predictable and discerning of different genotypes. Among the classes of existing molecular markers are a variety of polymorphisms indicating genetic variation including restriction-fragment-length polymorphisms (RFLPs), amplified fragment-length polymorphisms (AFLPs), simple sequence repeats (SSRs), single feature polymorphisms (SFPs), single nucleotide polymorphisms (SNPs) and insertion/deletion polymorphisms (Indels).

[0010] Molecular markers vary in their stability and genomic abundance. SNPs are particularly useful as molecular markers because they are more stable than other polymorphisms and are abundant in plant genomes (Bi et al. Crop Sci. 46:12-21 (2006), Kornberg, DNA Replication, W.H. Freeman & Co., San Francisco (1980)). Because the number of molecular markers for a plant species is limited, the discovery of additional molecular markers is critical for genotyping applications including marker-trait association studies, gene mapping, gene discovery, marker-assisted selection and marker-assisted breeding. The discovery and identification of polymorphisms for use as molecular markers requires a substantial sequencing and bioinformatics effort, requiring large scale sequencing from two or more evolutionarily diverged lines or populations.

[0011] Evolving technologies make certain molecular markers more amenable for rapid, large scale use. In particular, technologies such as high-throughput screening for SNP detection indicate that SNPs may be preferred molecular markers.

### SUMMARY OF THE INVENTION

[0012] It is in view of the above problems that the present invention was developed. This invention provides a series of molecular markers for corn. These molecular markers comprise corn DNA loci which have been discovered by sequencing corn genomic DNA and identifying polymorphisms through computer analyses. These molecular markers are useful for a variety of genotyping applications. A polymorphic corn locus of this invention comprises at least 12 consecutive nucleotides which include or are adjacent to a polymorphism which is identified herein, e.g. in Table 1 or Table 3. As indicated in Table 1 the nucleic acid sequences of SEQ ID NO: 1 through SEQ ID NO: 6552 comprise one or more polymorphisms, e.g. single nucleotide polymorphisms (SNPs) and insertion/deletion polymorphisms (Indels). As indicated in Table 3, certain polymorphisms identified herein have also been mapped to certain maize chromosomes.

[0013] The invention first provides for libraries of nucleic acid molecules that comprise at least two distinct sets of nucleic acid molecules wherein each of said distinct sets of nucleic acid molecules permits typing of a corresponding corn genomic DNA polymorphism identified in Table 1 or Table 3. In certain embodiments of this aspect of the invention, the library comprises two or more distinct sets of nucleic acid molecules are arrayed on at least one solid support or on at least one microtiter plate. The distinct sets of nucleic acid molecules can be located in a separate and distinct well of a microtiter plate. The distinct sets of nucleic acids can also be located at a distinct interrogation position on the solid support.

[0014] Libraries where the nucleic acid molecules are combined in a single mixture are also contemplated. In still other embodiments of the invention, the libraries can comprise at least 8, at least 24, at least 96, or at least 384 distinct sets of nucleic acid molecules wherein each of the sets of nucleic acid molecules permit typing of a corresponding distinct corn genomic DNA polymorphism identified in Table 1 or Table 3. Libraries comprised of sets of nucleic acid molecules that permit typing of corn genomic DNA polymorphisms identified in Table 3 that are selected from the group consisting of SEQ ID NO: 2468, 5407, 287, 574, 3407, 5367, 4566, 2457, 5295, 4548, 5182, 5489, 2714, 2726, 375, 275, 1415, 885, 2067, 4773, 1708, 1479, 3507, 2765, and 1279 are also contemplated.

[0015] The distinct sets of nucleic acid molecules in the libraries can comprise a nucleic acid molecule of at least 12 consecutive nucleotides that include or are immediately adjacent to a corresponding polymorphism identified in Table 1 and wherein the sequence of at least 12 consecutive nucleotides is at least 90% identical to the sequence of the same number of nucleotides in either strand of a segment of corn DNA which includes or is immediately adjacent to said polymorphism. In other embodiments, the nucleic acid molecule is of at least 15 consecutive nucleotides or of at least 18 consecutive nucleotides. The nucleic acid molecules can further comprise a detectable label or provide for incorporation of a detectable label. This detectable label can be selected from the group consisting of an isotope, a fluorophore, an oxidant, a reductant, a nucleotide and a hapten. Detectable labels can be added to the nucleic acid by a chemical reaction or incorporated by an enzymatic reaction.

[0016] The distinct sets of nucleic acid molecules can also comprise: (a) a pair of oligonucleotide primers wherein each of said oligonucleotide primers comprises at least 15 nucleotide bases and permit PCR amplification of a segment of DNA containing one of said corresponding polymorphisms identified in Table 1 or Table 3, and (b). at least one detector nucleic acid molecule that permits detection of a polymorphism in said amplified segment in (a). In such distinct sets of nucleic acids, the detector nucleic acid comprises at least 12 nucleotide bases or comprises at least 12 nucleotide bases and a detectable label, and wherein the sequence of said detector nucleic acid molecule is at least 95 percent identical to a sequence of the same number of consecutive nucleotides in either strand of a segment of maize DNA in a locus of claim 1 comprising said polymorphism.

[0017] The invention also provides computer readable media having recorded thereon at least two corn genomic DNA polymorphisms identified in Table 1 or Table 3. In other embodiments, at least 8 of the corn genomic DNA polymorphisms identified in Table 1 or Table 3 are recorded on the computer readable media. Computer readable medium having recorded thereon at least two corn genomic DNA polymorphisms identified in Table 3 and a corresponding genetic map position for each of said corn genomic DNA polymorphisms are also provided. In other embodiments, at least 8 of the corn genomic DNA polymorphisms and corresponding genetic map positions are recorded on the computer readable media.

[0018] The invention also provides a computer based system for reading, sorting or analyzing corn genotypic data that comprises the following elements: (a) a data storage device comprising a computer readable medium wherein at least two corn genomic DNA polymorphisms identified in Table 1 or Table 3 are recorded thereon; b) a search device for comparing a corn genomic DNA sequence from at least one test corn plant to said polymorphism sequences of the data storage device of step (a) to identify homologous or non-homologous sequences; and, (c) a retrieval device for identifying said homologous or non-homologous sequences(s) of said test corn genomic sequences of step (b). In other embodiments, at least 96 corn genomic DNA polymorphisms identified in Table 1 or Table 3 are recorded on the computer readable medium in the computer based system. In still other embodiments, the data storage device can further comprise computer readable medium wherein phenotypic trait data from at least one of said test corn plants is recorded thereon. The data storage device can also further comprise computer readable medium wherein data associating an allelic state with a parent, progeny, or tester corn plant is recorded thereon. Computer based systems wherein a plurality of mapped corn genomic DNA polymorphisms identified in Table 3 are recorded on the computer readable medium and wherein the computer readable medium further comprises genetic map location data for each of said mapped polymorphisms are also contemplated.

[0019] Isolated nucleic acid molecules for detecting polymorphisms in corn genomic DNA identified in Table 1 and Table 3 are also provided. Isolated nucleic acid molecules for detecting a molecular marker representing a polymorphism in corn DNA identified in Table 1 or Table 3 that comprise at least 15 nucleotides that include or are immediately adjacent to the polymorphism and are at least 90 percent identical to a sequence of the same number of consecutive nucleotides in either strand of DNA that include or are immediately adjacent to said polymorphism are contemplated. Isolated nucleic acids of the invention can further comprise a detectable label or provides for incorporation of a detectable label. The detectable label can be selected from the group consisting of an isotope, a fluorophore, an oxidant, a reductant, a nucleotide and a hapten. The detectable label can be added to the nucleic acid by a chemical reaction or incorporated by an enzymatic reaction. The isolated nucleic acid can detect a polymorphism in Table 3 selected from the group consisting of SEQ ID NO: 2468, 5407, 287, 574, 3407, 5367, 4566, 2457, 5295, 4548, 5182, 5489, 2714, 2726, 375, 275, 1415, 885, 2067, 4773, 1708, 1479, 3507, 2765, and 1279.

[0020] Other isolated oligonucleotide compositions comprising more than one isolated nucleic acid that are useful for typing the corn polymorphisms of Table 1 or Table 3. Such isolated oligonucleotide compositions can be used to type the SNP polymorphisms by either Taqman® assay or Flap Endonuclease-mediated (Invader®) assays. In one embodiment the isolated nucleic acid composition is a set of oligonucleotides comprising: (a.) a pair of oligonucleotide primers wherein each of said primers comprises at least 12 contiguous nucleotides and wherein said pair of primers permit PCR amplification of a DNA segment comprising a corn genomic DNA polymorphism locus identified in Table 1 or Table 3; and (b) at least one detector oligonucleotide that permits detection of a polymorphism in said amplified segment, wherein the sequence of said detector oligonucleotide is at least 95 percent identical to a sequence of the same number of consecutive nucleotides in either strand of a segment of maize DNA that include or are immediately adjacent to said polymorphism of step (a). In the set of oligonucleotides, the detector oligonucleotide comprises at least 12 nucleotides and either provides for incorporation of a detectable label or further comprises a detectable label. The detectable label can be selected from the group consisting of an isotope, a fluorophore, an oxidant, a reductant, a nucleotide and a hapten. Isolated polynucleotide compositions for typing the disclosed polymorphisms with Flap Endonuclease-mediated (Invader®) assays are also provided. Such compositions for use in Flap Endonuclease-mediated assays comprise at least two isolated nucleic acid molecules for detecting a molecular marker representing a polymorphism in corn DNA, wherein a first nucleic acid molecule of the composition comprises an oligonucleotide that includes the polymorphic nucleotide residue and at least 8 nucleotides that are immediately adjacent to a 3′ end of said polymorphic nucleotide residue, wherein a second nucleic acid molecule of the composition comprises an oligonucleotide that includes the polymorphic nucleotide residue and at least 8 nucleotides that are immediately adjacent to a 5′ end of said polymorphic nucleotide residue, and wherein the polymorphism is identified in Table 1 or Table 3.

[0021] Various methods for genotyping corn plants to select a parent plant, a progeny plant or a tester plant for breeding are also provided. In one embodiment, the method of genotyping a corn plant to select a parent plant, a progeny plant or a tester plant for breeding comprises the steps of: a. obtaining a DNA or RNA sample from a tissue of at least one corn plant; b. determining an allelic state of at least one corn genomic DNA polymorphism identified in Table 1 or Table 3 for said sample from step (a), and c. using said allelic state determination of step (b) to select a parent plant, a progeny plant or a tester plant for breeding. This method of genotyping can be performed to type a mapped polymorphism identified in Table 3. The allelic state of polymorphisms can be determined by an assay permitting identification of a single nucleotide polymorphism in this genotyping method. Single nucleotide polymorphism assays used in this method can be selected from the group consisting of single base extension (SBE), allele-specific primer extension sequencing (ASPE), DNA sequencing, RNA sequencing, microarray-based analyses, universal PCR, allele specific extension, hybridization, mass spectrometry, ligation, extension-ligation, and Flap Endonuclease-mediated assays. In certain embodiments of this method, an allelic state of at least 8, at least 48, at least 96, or at least 384 distinct polymorphisms identified in Table 1 or Table 3 are determined.

[0022] The methods of genotyping can also further comprising the step of storing resultant genotype data for said one or more allelic state determinations on a computer readable medium and for further comprise the step of comparing genotype data from one corn plant to another corn plant. Genotype data can also be compared to phenotypic trait data or phenotypic trait index data for at least one of said corn plants in certain embodiments of the methods that comprise those additional steps. Genotype data can also be compared to phenotypic trait data or phenotypic trait index data for at least two of said corn plants and determining one or more associations between said genotype data and said phenotypic trait data in certain embodiments of the methods that comprise those additional steps. In still other embodiments of methods wherein associations are determined for said phenotype trait data or phenotypic trait index data to said genotypic trait data, the genotypic trait data comprises allelic state determinations for at least 10 mapped polymorphisms identified in Table 3.

[0023] Methods of breeding corn plants are also contemplated. The methods of breeding corn plants comprise the steps of: (a) identifying trait values for at least one trait associated with at least two haplotypes in at least two genomic windows of up to 10 centimorgans for a breeding population of at least two corn plants; (b) breeding two corn plants in said breeding population to produce a population of progeny seed; (c) identifying an allelic state of at least one polymorphism identified in Table 1 or Table 3 in each of said windows in said progeny seed to determine the presence of said haplotypes; and (d) selecting progeny seed having a higher trait value for at least one trait associated with the determined haplotypes in said progeny seed, thereby breeding a corn plant. In certain embodiments of these breeding methods, trait values are identified for at least one trait associated with at least two haplotypes in each adjacent genomic window over essentially the entirety of each chromosome. The trait value can identify a trait selected from the group consisting of herbicide tolerance, disease resistance, insect or pest resistance, altered fatty acid, protein or carbohydrate metabolism, increased grain yield, increased oil, increased nutritional content, increased growth rates, enhanced stress tolerance, preferred maturity, enhanced organoleptic properties, altered morphological characteristics, other agronomic traits, traits for industrial uses, or traits for improved consumer appeal, or a combination of traits as a multiple trait index. In other embodiments of these breeding methods, progeny seed is selected for a higher trait value for yield for a haplotype in a genomic window of up to 10 centimorgans in each chromosome. In methods where the trait value is for the yield trait and trait values are ranked for haplotypes in each window; a progeny seed can be selected which has a trait value for yield in a window that is higher than the mean trait value for yield in said window. In still other embodiments of the method, the polymorphisms in the haplotypes are in a set of DNA sequences that comprises all of the DNA sequences of SEQ ID NO: 1 through SEQ ID NO: 6552.

[0024] Methods for selecting a parent, progeny, or tester plant for breeding are also provided. These methods for selecting a parent, progeny, or tester plant for plant breeding comprise the steps of: a) determining associations between a plurality of polymorphisms identified in Table 1 or Table 3 and a plurality of traits in at least a first and a second inbred line of corn; b) determining an allelic state of one or a plurality of polymorphism in a parent, progeny or tester plant; c) selecting the parent, progeny or tester that has a more favorable combination of associated traits. In certain embodiments, the parent, progeny or tester plant is an inbred corn line. A favorable combination of associated traits selected in the parent, progeny or tester can be a parent, progeny or tester that provides for improved heterosis.

[0025] Methods for improving heterosis are also provided. The methods for improving heterosis comprise the steps of: (a) determining associations between a plurality of polymorphisms identified in Table 1 or Table 3 and a plurality of traits in more than two inbred lines of corn; (b) assigning two inbred lines selected from the inbred lines of step (a) to heterotic groups, (c) making at least one cross between at least two inbred lines from step (b), wherein each inbred line comes from a distinct and complementary heterotic group and wherein the complementary heterotic groups are optimized for genetic features that improve heterosis; and (d) obtaining a hybrid progeny plant from said cross in step (c), wherein said hybrid progeny plant displays increased heterosis relative to progeny derived from a cross with an unselected inbred line.

[0026] Methods of genotyping corn to select a parent plant, a progeny plant or a tester plant for breeding wherein a plurality of distinct sets of nucleic acids are used to type a plurality of distinct polymorphisms that map to a plurality of genomic loci are also provided. These methods of genotyping a corn plant to select a parent plant, a progeny plant or a tester plant for breeding comprise the steps of: (a) obtaining a DNA or RNA sample from a tissue of at least one corn plant; (b) determining an allelic state of a set of corn genomic DNA polymorphisms comprising at least two polymorphisms identified in Table 1 or Table 3 for said sample from step (a), wherein said allelic state is determined with a set of nucleic acid molecules that provide for typing of said corn genomic DNA polymorphisms; and c. using said allelic state determination of step (b) to select a parent plant, a progeny plant or a tester plant for breeding. However, other embodiments of the method provide for determining the allelic state of at least 5, at least 10, or at least 20 polymorphisms identified in Table 1 or Table 3. The set of corn genomic DNA polymorphisms can comprise at least 2 polymorphisms selected from the group consisting of SEQ ID NO: 5407, 287, 574, 3407, 5367, 4566, 2457, 5295, 4548, 5182, 5489, 2714, 2726, 375, 275, 1415, 885, 2067, 4773, 1708, 1479, 3507, 2765, and 1279, and SEQ ID NO: 2468. The set of corn genomic DNA polymorphisms can also comprise at least 2 polymorphisms selected from the group consisting of SEQ ID NO: 2468, 5407, 287, 574, 3407, 5367, 4566, 2457, 5295, and 4548. Alternatively, the corn genomic DNA polymorphisms can also comprise at least 2 polymorphisms selected from the group consisting of SEQ ID NO: 2468, 5407, 287, 574, and 3407. In one embodiment, the set of corn genomic polymorphisms comprise the polymorphisms SEQ ID NO: 2468 and 5407. In this method, the set of corn genomic DNA polymorphisms can be associated with a trait values identified for at least one of yield, lodging, maturity, plant height, drought tolerance and cold germination. Genotyping methods where the set of corn genomic DNA polymorphisms are associated with a trait value for yield are particularly contemplated. In one embodiment, the polymorphisms associated with a trait value are selected from the group consisting of SEQ ID NO: 5407, 287, 574, 3407, 5367, 4566, 2457, 5295, 4548, 5182, 5489, 2714, 2726, 375, 275, 1415, 885, 2067, 4773, 1708, 1479, 3507, 2765, and 1279, and SEQ ID NO: 2468. Polymorphisms selected from the group consisting of SEQ ID NO: 5407, 287, 574, 3407, 5367, 4566, 2457, 5295, 4548, 5182, 5489, 2714, 2726, 375, 275, 1415, 885, 2067, 4773, 1708, 1479, 3507, 2765, and 1279, and SEQ ID NO: 2468 are associated with a trait value for yield.

[0027] Methods of genotyping corn to select a parent plant, a progeny plant or a tester plant for breeding wherein a plurality of distinct sets of nucleic acids are used to type a plurality of distinct polymorphisms that map to a plurality of genomic loci distributed across the genome of corn are also provided. In these methods, a set of at least 20 corn genomic DNA polymorphisms identify polymorphisms that are distributed across the genome of corn are typed. In certain embodiments of this method, the set of at least 20 corn genomic DNA polymorphisms that are typed identify polymorphisms that are distributed across a single chromosome of corn or are distributed across at least two chromosomes of corn. In still other embodiments of this method, the set of at least 20 corn genomic DNA polymorphisms identify polymorphisms that are distributed across all chromosomes of corn. When the 20 corn genomic DNA polymorphisms are distributed across all chromosomes of corn, they can be distributed such that at least 1 of the polymorphisms in the set maps to each chromosome arm of each chromosome such that at least 1 of said polymorphisms in said set maps to each chromosome arm. However, this method can also employ more polymorphisms, such that at least 10 of the corn genomic DNA polymorphisms in the set map to each chromosome arm. In other embodiments, at least 20 or at least 50 of the corn genomic DNA polymorphisms in the set map to each chromosome arm. In certain embodiments of the methods, at least one polymorphism maps to chromosome arm 15 and can be selected from the group consisting of SEQ ID NO: 381, 2339, 4410, 239, 1311, 4683, 4071, 3141, 5061, 2972, 1246, 5114, 3716, 57, 58, 1114, 5495, 5476, 1323, 2451, 765, 845, 5339, 5363, 1141, 4137, 3332, 3775, 1776, 2213, 3954, 1389, 870, 5441, 161, 1791, 5455, 5296, 783, 3868, 5230, 5156, 4709, 5163, 66, 1766, 4779, 2672, 5262, 589, 925, 2909, 4450, 5118, 669, 4979, 1553, 3927, 198, 2593, 5364, 1261, 4006, 111, 5090, 4740, 2699, 2666, 4357, 4738, 5036, 697, 901, 230, 5267, 939, 1219, 5356, 2290, 4283, 3062, 5320, 655, 2261, 5374, 1559, 1174, 2300, 3308, 4176, 3694, 3035, 3030, 3990, 4080, 5526, 316, 3578, 900, 2384, 5050, 5344, 2768, 167, 4939, 2931, 5315, 1844, 1020, 5150, 1547, 707, 1156, 4993, 1742, 5158, 5251, 1441, 5071, 105, 3425, 3426, 3817, 5504, 3918, 5227, 5152, 2950, 3877, 4675, 5214, 15, 2951, 4517, 5213, 4241, 4172, 5413, 1235, 4482, 3489, 5311, 3363, 3562, 4145, 728, 3395, 5225, 4449, 4914, 1308, 4500, and 1543. In other embodiments of the method, at least one polymorphism maps to chromosome arm 1L is selected from the group consisting of SEQ ID NO: 2835, 1301, 1374, 3766, 2624, 4571, 927, 4559, 5420, 3328, 1702, 5219, 606, 4124, 3100, 5223, 4091, 3292, 3900, 4814, 5383, 4354, 4533, 5355, 2119, 3574, 5200, 1513, 732, 5026, 2326, 4478, 2099, 1229, 1443, 2944, 2325, 5326, 2669, 4973, 5142, 5078, 2645, 3112, 2194, 3021, 2986, 4936, 1577, 4004, 88, 3913, 610, 4248, 4895, 4891, 489, 747, 5134, 4879, 5235, 1659, 5187, 5263, 3127, 5055, 1556, 4316, 660, 5431, 1348, 2900, 133, 269, 3355, 2243, 2991, 4584, 3686, 5047, 1843, 5272, 592, 4501, 5002, 1505, 1066, 549, 236, 2731, 1973, 2831, 1539, 5177, 4522, 5508, 4951, 2086, 120, 1466, 10, 1238, 402, 263, 89, 2811, 4013, 4015, 3944, 2706, 430, 639, 4983, 211, 3919, 5, 5182, 146, 955, 3339, 2817, 3485, 3587, 4171, 5416, 1627, 2093, 4093, 2217, 1956, 5310, 3261, 4753, 317, 1110, 4014, 5489, 5254, 5154, 3407, 1980, 5290, 563, 1073, 3833, 3512, 5367, 4156, 3782, 5498, 4468, 929, 4676, 3468, 3754, 4077, 5333, 1903, 1771, 2043, 5490, 4168, 487, 2426, 4250, 4648, 2142, 3058, 3449, 595, 3107, 3794, 2844, 1018, 2140, 5083, 507, 2299, 5524, 1871, 1885, 933, 1455, and 3440.

[0028] In other embodiments of the method, at least one polymorphism maps to chromosome arm 2S is selected from the group consisting of SEQ ID NO: 185, 3347, 5302, 4102, 4852, 802, 821, 1668, 5206, 5402, 4908, 2432, 3491, 1568, 4603, 5049, 2432, 4585, 4702, 3068, 4789, 4398, 4853, 4890, 621, 1506, 5039, 5029, 5179, 4907, 1204, 4669, 5451, 3872, 3390, 2649, 3325, 3982, 5481, 1447, 1726, 5130, 4322, 4149, 5104, 4994, 2979, 4643 5328, 2870, 2861, 1084, 5115, 11, 2684, 4586, 5063, 417, 2320, 5092, 4492, 2164, 2725, 4900, 4997, 5314, 1058, 3121, 5112, 4976, 5405, 4026, 5492, 2537, 1491, 4791, 434, 4580, 1032, 1352, 2563, 4003, 1226, 3697, 1859, 2635, 3080, 3110, 420, 5013, 3026, 5175, 4659, 5239, 4020, 938, 1813, 2313, 1223, 314, 3258, 3981, 1090, 4721, 5018, 4136, 3084, 1415, 4417, 2983, 3695, 2849, 1393, 2279, 5427, 1634, 885, 1826, 4563, 4697, 5183, 2827, and 4822.

[0029] In other embodiments of the method, at least one polymorphism maps to chromosome arm 2L is selected from the group consisting of SEQ ID NO: 375, 4781, 4929, 3474, 3497, 4579, 5008, 1008, 3825, 4220, 913, 2708, 3698, 275, 4048, 596, 4002, 1431, 5377, 4875, 2942, 5207, 5064, 3527, 1339, 4292, 1690, 2806, 4115, 4602, 4746, 5258, 5418, 4838, 3789, 5173, 3783, 809, 3890, 4213, 4442, 4231, 2506, 283, 3349, 1194, 4703, 4647, 3631, 951, 4402, 3356, 3803, 5245, 3805, 4236, 28, 4565, 5493, 1914, 1317, 4355, 5037, 724, 1253, 1388, 5464, 4307, 5249, 123, 5048, 2210, 2434, 4062, 1796, 2054, 1384, 4671, 2801, 1595, 1865, 2691, 3589, 3624, 2178, 4568, 550, 2734, 2303, 4808, 594, 2046, 1588, 324, 668, 2977, 4086, 4173, 5308, 431, 1994, 2294, 4674, 3405, 3404, 3708, 491, 241, 2524, 4299, 1210, 3010, 1062, 2710, 5271, 4416, 4170, 4453, 4399, 2678, 4446, 4327, 3540, 4521, 952, 1089, 5164, 3965, 4487, 737, and 1121.

[0030] In other embodiments of the method, at least one polymorphism maps to chromosome arm 3S is selected from the group consisting of SEQ ID NO: 762, 3024, 1349, 5525, 4574, 3078, 2608, 4553, 4114, 1160, 3717, 1399, 1936, 2787, 5159, 4047, 3756, 5470, 3636, 2846, 4288, 5457, 2543, 4649, 668, 658, 1893, 4938, 1786, 5376, 3953, 4105, 5447, 3006, 4679, 5081, 4493, 1151, 1333, 1887, 3551, 4162, 1823, 2688, 1179, 2732, 2547, 4942, 2492, 5358, 1708, 5102, 3069, 1074, 1479, 2687, 5515, 3735, 1322, 4911, and 4615.

[0031] In other embodiments of the method, at least one polymorphism maps to chromosome arm 3L is selected from the group consisting of SEQ ID NO: 1153, 1497, 3616, 1022, 2324, 5006, 2715, 1712, 3721, 5269, 469, 2398, 5188, 5497, 5140, 1493, 1778, 1270, 3085, 4860, 2912, 3736, 1093, 3730, 201, 2370, 4260, 3655, 4405, 2065, 1805, 2215, 4481, 3504, 3102, 4259, 4827, 4067, 3306, 4667, 5277, 4269, 3327, 55, 702, 2404, 3264, 4555, 4849, 5506, 2642, 896, 4751, 4340, 3891, 1279, 505, 4017, 5040, 3461, 3495, 1993, 93, 5088, 4556, 285, 4367, 2959, 877, 1643, 1456, 5289, 5467, 4856, 5473, 5387, 116, 3849, 5099, 4949, 1071, 2226, 2964, 3510, 3758, 4154, 5502, 1511, 1063, 5132, 5111, 4689, 436, 4813, 4952, 1218, 3586, 5294, 990, 4655, 2409, 4651, 522, 4421, 4096, 2020, 2090, 2366, 3482, 1953, 3133, 4893, 5395, 3383, 1350, 210, 4892, 1459, 2489, 5138, 5292, 5362, 1485, 2038, 3492, 243, 4519, 1312, 2594, 4972, 3706, 773, 4918, 3647, 573, 991, 5323, 3970, 4452, 2823, 3930, 4869, 5319, 4281, 3848, 4965, 4959, 831, 2003, 2073, 4100, 5015, 63, 2781, 4654, 4962, 5434, 4024, 356, 4199, 357, 5161, 5285, 5166, 1499, 2343, 390, 4345, 5432, 2123, 3555, 5192, 5208, 2836, 3013, 3943, 3976, 580, 4297, and 1631.

[0032] In other embodiments of the method, at least one polymorphism maps to chromosome arm 4S is selected from the group consisting of SEQ ID NO: 4232, 1449, 2901, 3966, 4054, 3657, 4541, 752, 3419, 1621, 1086, 5221, 5384, 4085, 1923, 5453, 4434, 5077, 5298, 1571, 3669, 5283, 5360, 987, 1411, 4690, 3348, 722, 5014, 4244, 4371, 5369, 3921, 5281, 5357, 2394, 3277, 5256, 2032, 3577, 1945, 3256, 5153, 1839, 872, 4382, 2523, 1146, 422, 5462, 2151, 4960, 2932, 5203, 4009, 4490, 5244, 2838, 1997, 4948, 1728, 2830, 4228, 5260, 2601, 3270, 4750, 5216, 5475, 4021, 5385, 1130, 4108, 4582, and 4629.

[0033] In other embodiments of the method, at least one polymorphism maps to chromosome arm 4L is selected from the group consisting of SEQ ID NO: 1057, 2619, 1798, 2017, 3894, 4641, 3672, 5000, 1508, 2754, 908, 1259, 3928, 5170, 2176, 638, 1867, 426, 4273, 5426, 458, 4576, 306, 1598, 23, 5056, 5423, 2486, 2427, 346, 2630, 4775, 371, 2301, 4368, 4486, 2677, 4401, 4947, 2955, 4294, 2770, 1292, 2087, 177, 2771, 4984, 4437, 619, 4747, 2615, 4588, 5409, 439, 4225, 2805, 3793, 5415, 5429, 611, 635, 1446, 2341, 3082, 4219, 5181, 5195, 760, 4147, 4188, 4957, 5388, 142, 4030, 631, 4280, 1785, 4314, 5523, 2887, 4955, 803, 4937, 5021, 3066, 4923, 169, 3159, 148, 5512, 5024, 237, 4331, 5389, 3595, 4772, 1636, 1996, 3064, 1808, 3710, 2465, 5057, 2168, 2898, 5445, 1425, 2317, 3952, 3033, 5252, 5334, 4423, 4444, 409, 5122, 5341, 4261, 2796, 4339, 3858, 3807, 1329, 5149, 4135, 2591, 4980, 4558, 1131, 5273, 4611, 3768, 5155, 5379, 3779, 156, 399, 1592, and 1790.

[0034] In other embodiments of the method, at least one polymorphism maps to chromosome arm 5S is selected from the group consisting of SEQ ID NO: 141, 4609, 5309, 2637, 3146, 1365, 1207, 4242, 4455, 3529, 5378, 2154, 454, 2522, 3041, 5107, 2079, 5242, 1205, 1542, 4798, 4023, 3045, 5284, 2832, 4940, 5196, 1518, 1324, 4157, 5229, 318, 5332. 3995, 1132, 3487, 5004, 5471, 4818, 443, 1014, 5435, 4699, 4670, 4666, 2129, 3950, 5119, 2935, 2284, 3922, 2592, 5141, 5430, 5069, 4566, 2610, 3152, 4832, 1963, 1866, 2256, 2692, 2457, 2933, 4943, 1958, 2461, 941, 4289, 1535, 3511, 4431, 4691, 4207, 4218, 2829, 3749, 2952, 1574, 4079, 492, 1404, 1976, 5232, 179, 520, 3269, 5191, 3905, 298, 3544, 251, 2761, 3370, 2729, 4321, 2586, 1529, 853, 1126, 3759, 3831, 4502, 5279, 2424, 3346, 3569, 4877, 4360, 2014, 2820, 2891, 3342, 1461, 3763, 157, 2611, 4701, 5259, 29, 3118, 1258, 2767, 1360, 4295, 1689, 3627, 4473, 5190, 4634, 5321, 532, 4597, 815, 3910, 3446, 4140, and 4950.

[0035] In other embodiments of the method, at least one polymorphism maps to chromosome arm 5L is selected from the group consisting of SEQ ID NO: 2292, 2800, 3386, 4183, 4989, 5124, 2698, 4304, 463, 5500, 3354, 4462, 4046, 836, 4971, 4164, 2714, 2726, 4146, 3906, 4165, 1946, 2006, 1369, 3936, 3566, 945, 4025, 1762, 528, 1465, 5211, 4652, 2621, 2812, 5176, 581, 4109, 1846, 2528, 2295, 5436, 2075, 3451, 287, 3300, 3399, 3095, 5297, 597, 1330, 64, 574, 328, 1252, 2663, 4810, 667, 3734, 780, 1091, 2311, 1899, 1760, 2748, 4864, 2002, 106, 3483, 4660, 2675, 5307, 295, 3765, 3822, 2885, 4403, 4326, 4591, 2696, 4301, 2545, 4293, 2733, 5454, 1464, 4365, 2143, 413, 325, 3857, 2314, 389, 385, 4523, 3505, 2271, 3787, 4692, 5075, 98, 99, 1334, 1358, 3361, 4419, 2402, 3770, 4894, and 5299.

[0036] In other embodiments of the method, at least one polymorphism maps to chromosome arm 6S is selected from the group consisting of SEQ ID NO: 1639, 2378, 3516, 4479, 4771, 138, 1094, 1878, 2348, 180, 4378, and 3901.

[0037] In other embodiments of the method, at least one polymorphism maps to chromosome arm 6L is selected from the group consisting of SEQ ID NO: 406, 1755, 1026, 1985, 225, 1538, 1661, 2400, 3053, 4041, 4082, 4469, 5117, 5147, 5168, 5212, 3732, 5128, 1247, 22, 2851, 3275, 3046, 394, 2535, 2588, 2788, 3861, 3884, 3273, 2527, 3888, 2155, 3162, 5074, 2380, 4144, 5414, 4344, 2374, 2441, 2491, 3583, 5220, 3582, 3644, 2016, 3254, 4313, 4257, 215, 5275, 4990, 3387, 4118, 4512, 4857, 716, 5127, 4862, 3844, 488, 4361, 5288, 4333, 5265, 4825, 152, 3338, 694, 3777, 5340, 743, 4296, 415, 1149, 1584, 2742, 4389, 3851, 1955, 2585, 5139, 2381, 2456, 2456, 2519, 3816, 4511, 3039, 506, 1731, 1775, 5359, 2643, 4870, 4996, 4828, 4886, 2549, 348, 2804, 4968, 448, 1419, 1075, 1968, 5488, 1675, 3509, 3500, 4831, 656, 119, 87, 4364, 3876, 4777, 5007, 1117, 4491, 3018, 2616, 4608, 51, 2852, 4792, 2609, 3924, 2629, 570, 1510, 898, 3693, 4619, 5053, 5370, 4422, 3898, 1974, 4549, 3297, 5469, 4650, 1995, 4637, 5424, 1800, 3089, 5032, 514, 4087, 4841, 165, 482, 794, 1198, 2221, 3892, 835, 2550, 3288, 5113, 2175, 5145, 3170, 4441, and 2288.

[0038] In other embodiments of the method, at least one polymorphism maps to chromosome arm 7S is selected from the group consisting of SEQ ID NO: 1562, 4982, 590, 1245, 5466, 195, 2177, 4613, 4267, 2089, 127, 3417, 4604, 5482, 5518, 1609, 5417, 3654, 1314, 4735, 5365, 4022, 1401, 1784, 2004, 2364, 3098, 2705, 5460, 3079, 5146, 734, 2249, 5253, 5143, 1147, 1684, 5228, 534, 1306, 1544, 4987, 452, 557, 1037, 3815, 5336, 4628, 4031, 2333, 4373, 3637, 1977, 4854, 651, 1534, 1901, 4059, 2507, 2589, 4445, 5178, 591, 738, 1099, 2172, 2453, 5066, 4466, and 4958.

[0039] In other embodiments of the method, at least one polymorphism maps to chromosome arm 7L is selected from the group consisting of SEQ ID NO: 2995, 3122, 3524, 4848, 2798, 4569, 115, 2372, 2373, 3059, 1434, 5084, 1602, 1484, 351, 2252, 3801, 1580, 2008, 3311, 2084, 5022, 1267, 2413, 4184, 600, 3576, 429, 1081, 2794, 1024, 1608, 4266, 4672, 377, 820, 3984, 1536, 2436, 5076, 5327, 423, 424, 2997, 5380, 1819, 5499, 2660, 4415, 2841, 5247, 2357, 2228, 5343, 4465, 5301, 1420, 4846, 1137, 1152, 4884, 1124, 509, 1277, 3824, 2428, 4967, 1162, 2328, 726, 38, 499, 208, 3856, 1921, 4927, 5035, 4599, 2727, 5098, 1228, 2908, 483, 4723, 5391, 4485, 1065, 2721, 2135, 663, 3882, 163, 2819, 2147, 3542, 94, 1942, and 95.

[0040] In other embodiments of the method, at least one polymorphism maps to chromosome arm 8S is selected from the group consisting of SEQ ID NO: 4383, 4426, 5268, 4985, 4988, 4632, 2562, 3360, 5479, 3651, 3550, 1630, 1965, 3635, 5348, 4276, 1209, 2868, 3475, 4830, 693, 3379, 5446, 5210, 3473, 4881, 2653, 3557, 975, 865, 566, 5261, 584, 3570, 5106, 5456, 2105, 2280, and 2845.

[0041] In other embodiments of the method, at least one polymorphism maps to chromosome arm 8L is selected from the group consisting of SEQ ID NO: 3875, 4536, 4757, 5510, 18, 1276, 5238, 5496, 273, 2078, 3357, 4922, 868, 3429, 5017, 3563, 3842, 2468, 1874, 2160, 640, 4099, 2477, 2626, 5407, 2963, 3457, 4790, 1569, 5237, 2007, 3796, 5110, 3973, 4622, 5031, 1072, 1429, 3674, 5291, 1002, 4595, 4358, 344, 3685, 2724, 3004, 2778, 2469, 264, 3139, 4192, 1332, 3798, 1611, 4944, 5016, 3855, 985, 4113, 1302, 44, 1982, 2664, 5067, 5400, 1725, 2793, 4303, 1978, 2719, 4324, 3546, 4673, 4392, 4040, 3865, 2455, 2797, 2883, 5516, 3469, 935, 5062, 1483, 1184, 1428, 4334, 847, 4513, 775, 884, 540, 376, 2704, 755, 1981, 882, 5503, 338, 3818, 3960, 4057, 1591, 1896, 917, and 4084.

[0042] In other embodiments of the method, at least one polymorphism maps to chromosome arm 9S is selected from the group consisting of SEQ ID NO: 404, 4166, 3980, 3899, 2982, 1164, 1013, 3937, 2270, 4456, 5329, 2923, 4323, 5038, 4963, 3031, 5129, 3853, 4748, 2452, 3400, 4435, 818, 3478, 5373, 1991, 311, 3860, 4741, 4755, 5046, 5480, 4995, 5520, 1088, 2459, 4132, 2150, and 891.

[0043] In other embodiments of the method, at least one polymorphism maps to chromosome arm 9L is selected from the group consisting of SEQ ID NO: 187, 1824, 3507, 4684, 2408, 4705, 2765, 3280, 272, 340, 1774, 2361, 2605, 2636, 3014, 3077, 5108, 5428, 1934, 3285, 3994, 889, 4210, 4286, 2617, 4472, 5030, 2360, 3499, 4524, 4902, 5513, 5459, 2766, 1637, 2483, 3086, 3978, 4531, 4767, 1596, 2921, 4055, 4915, 1653, 4732, 4677, 5452, 2928, 5372, 4974, 5350, 3733, 4195, 2131, 2976, 3545, 5033, 2329, 91, 4768, 2039, 90, 257, 2371, 3431, 1587, 2777, 4552, 4706, 5366, 562, 468, 4347, 2614, 498, 3135, 4966, 4888, 4328, 3155, 1769, 1288, 2274, 4904, 4766, 4845, 65, 1128, 2067, 2049, 25, 3108, 4773, 5160, 200, 5085, 1737, 4341, 2940, 4909, 256, 1952, 5051, 531, 708, 2096, 5419, 5521, 4451, 326, 5338, 4526, 5100, 2053, 2869, 2848, 3757, 5121, 2867, 1326, 4506, 5483, 1275, 3568, 930, 373, 4494, 5487, 1021, and 3983.

[0044] In other embodiments of the method, at least one polymorphism maps to chromosome arm 10S is selected from the group consisting of SEQ ID NO: 2281, 3571, 3724, 3939, 3521, 4776, 2792, 4010, 5392, 1926, 1930, 4532, 2138, 4899, 4921, 5352, 5093, 4128, 4657, 696, 366, 493, 3136, and 5345.

[0045] In other embodiments of the method, at least one polymorphism maps to chromosome arm 10L is selected from the group consisting of SEQ ID NO: 13, 2145, 2234, 5478, 242, 5443, 2780, 3052, 5458, 3130, 839, 1069, 3374, 4724, 5060, 5303, 1412, 1331, 1583, 2895, 5368, 2113, 4429, 274, 2602, 4711, 5257, 4498, 5501, 1116, 1294, 4460, 2206, 2240, 2444, 4377, 2735, 2741, 3009, 3649, 3850, 2494, 4507, 4717, 5422, 852, 2122, 3337, 4211, 1614, 2557, 4001, 4043, 5082, 1809, 2516, 2475, 3946, 1452, 1201, 2214, 3795, 3813, 5194, 5318, 2471, 3496, 1701, 3776, 3895, 4262, 5280, 5522, 3573, 1371, 5241, 3786, 1779, 3302, 4408, 5337, 2873, 3925, 1573, 1200, 2356, 2520, 5295, 2209, 1157, 2554, 5137, 3063, 858, 3908, 4548, 4338, 2816, 4876, 4285, 4961, 478, 4306, 5151, 4642, 3902, 1575, 2919, 3885, 3870, 3762, 3164, 5065, 4161, 4572, 5226, 1933, 3025, 3812, 4999, 1607, 4005, 411, 3687, 2536, 5042, 3420, 5394, 2570, 2813, and 4903.

[0046] Further features and advantages of the present invention, as well as the structure and operation of various embodiments of the present invention, are described in detail below with reference to the accompanying drawings.

### BRIEF DESCRIPTION OF THE DRAWINGS

[0047] The accompanying drawings, which are incorporated in and form a part of the specification, illustrate the embodiments of the present invention and together with the description, serve to explain the principles of the invention. In the drawings:

[0048] FIG. 1 is a genetic map of corn showing the density of mapped polymorphisms of this invention.

[0049] FIG. 2 is an allelogram illustrating results of a genotyping assay.

### DEFINITIONS

[0050] As used herein certain terms and phrases are defined as follows.

[0051] An “allele” refers to an alternative sequence at a particular locus; the length of an allele can be as small as 1 nucleotide base, but is typically larger. Allelic sequence can be amino acid sequence or nucleic acid sequence. A “locus” is a short sequence that is usually unique and usually found at one particular location in the genome by a point of reference; e.g., a short DNA sequence that is a gene, or part of a gene or intergenic region. A locus of this invention can be a unique PCR product at a particular location in the genome. The loci of this invention comprise one or more polymorphisms; i.e., alternative alleles present in some individuals.

[0052] An “allelic state” refers to the nucleic acid sequence that is present in a nucleic acid molecule that contains a genomic polymorphism. For example, the nucleic acid sequence of a DNA molecule that contains a single nucleotide polymorphism may comprise an A, C, G, or T residue at the polymorphic position such that the allelic state is defined by which residue is present at the polymorphic position. For example, the nucleic acid sequence of an RNA molecule that contains a single nucleotide polymorphism may comprise an A, C, G, or U residue at the polymorphic position such that the allelic state is defined by which residue is present at the polymorphic position. Similarly, the nucleic acid sequence of a nucleic acid molecule that contains an Indel may comprise an insertion or deletion of nucleic acid sequences at the polymorphic position such that the allelic state is defined by the presence or absence of the insertion or deletion at the polymorphic position.

[0053] An “association”, when used in reference to a polymorphism and a phenotypic trait or trait index, refers to any statistically significant correlation between the presence of a given allele of a polymorphic locus and the phenotypic trait or trait index value, wherein the value may be qualitative or quantitative.

[0054] A “distinct set of nucleic acid molecules” refers to one or more nucleic acid molecules that hybridize to DNA sequences that are include, are immediately adjacent to, or are within about 1000 base pairs of either the 5′ or 3′ end of a given corn genomic polymorphism. In certain embodiments, the distinct set of nucleic acid molecules will comprise a single nucleic acid sequence that includes or is immediately adjacent to a given polymorphism. In other embodiments, the distinct set of nucleic acid molecules will comprise one or more nucleic acid sequences that include or are immediately adjacent to the polymorphism as well as other nucleic acid sequences that are within about 1000 base pairs of either the 5′ or 3′ end of the polymorphism.

[0055] “Genotype” refers to the specification of an allelic composition at one or more loci within an individual organism. In the case of diploid organisms, there are two alleles at each locus; a diploid genotype is said to be homozygous when the alleles are the same, and heterozygous when the alleles are different.

[0056] “Haplotype” refers to an allelic segment of genomic DNA that tends to be inherited as a unit; such haplotypes can be characterized by one or more polymorphic molecular markers and can be defined by a size of not greater than 10 centimorgans. With higher precision provided by a higher density of polymorphisms, haplotypes can be characterized by genomic windows, for example, in the range of 1-5 centimorgans.

[0057] The phrase “immediately adjacent”, when used to describe a nucleic acid molecule that hybridizes to DNA containing a polymorphism, refers to a nucleic acid that hybridizes to DNA sequences that directly abut the polymorphic nucleotide base position. For example, a nucleic acid molecule that can be used in a single base extension assay is “immediately adjacent” to the polymorphism.

[0058] “Interrogation position” refers to a physical position on a solid support that can be queried to obtain genotyping data for one or more predetermined genomic polymorphisms.

[0059] “Consensus sequence” refers to a constructed DNA sequence which identifies SNP and Indel polymorphisms in alleles at a locus. Consensus sequence can be based on either strand of DNA at the locus and states the nucleotide base of either one of each SNP in the locus and the nucleotide bases of all Indels in the locus. Thus, although a consensus sequence may not be a copy of an actual DNA sequence, a consensus sequence is useful for precisely designing primers and probes for actual polymorphisms in the locus.

[0060] “Phenotype” refers to the detectable characteristics of a cell or organism which are a manifestation of gene expression.

[0061] “Phenotypic trait index” refers to a composite value for at least two phenotypic traits, wherein each phenotypic trait may be assigned a weight to reflect relative importance for selection.

[0062] A “marker” or “molecular marker” as used herein is a DNA sequence (e.g. a gene or part of a gene) exhibiting polymorphism between two or more plants of the same species, which can be identified or typed by a simple assay. Useful polymorphisms include a single nucleotide polymorphisms (SNPs), insertions or deletions in DNA sequence (Indels), single feature polymorphisms (SFPs), and simple sequence repeats of DNA sequence (SSRs).

[0063] “Marker Assay” refers to a method for detecting a polymorphism at a particular locus using a particular method. Methods for detecting polymorphisms include, but are not limited to, restriction fragment length polymorphism (RFLP), single base extension, electrophoresis, sequence alignment, allelic specific oligonucleotide hybridization (ASO), RAPD, allele-specific primer extension sequencing (ASPE), DNA sequencing, RNA sequencing, microarray-based analyses, universal PCR, allele specific extension, hybridization, mass spectrometry, ligation, extension-ligation, endonuclease-mediated dye release assays and Flap Endonuclease-mediated assays. Exemplary single base extension assays are disclosed in U.S. Pat. No. 6,013,431. Exemplary endonuclease-mediated dye release assays for allelic state determination of SNPs where an endonuclease activity releases a reporter dye from a hybridization probe are disclosed in U.S. Pat. No. 5,538,848.

[0064] “Linkage” refers to relative frequency at which types of gametes are produced in a cross. For example, if locus A has genes “A” or “a” and locus B has genes “B” or “b” and a cross between parent I with AABB and parent B with aabb will produce four possible gametes where the genes are segregated into AB, Ab, aB and ab. The null expectation is that there will be independent equal segregation into each of the four possible genotypes, i.e. with no linkage ¼ of the gametes will of each genotype. Segregation of gametes into a genotypes differing from ¼ are attributed to linkage.

[0065] “Linkage disequilibrium” is defined in the context of the relative frequency of gamete types in a population of many individuals in a single generation. If the frequency of allele A is p, a is p′, B is q and b is q′, then the expected frequency (with no linkage disequilibrium) of genotype AB is pq, Ab is pq′, aB is p′ q and ab is p′ q′. Any deviation from the expected frequency is called linkage disequilibrium. Two loci are said to be “genetically linked” when they are in linkage disequilibrium.

[0066] “Quantitative Trait Locus (QTL)” refers to a locus that controls to some degree traits that are usually continuously distributed and which can be represented quantitatively.

[0067] As used herein “sequence identity” refers to the extent to which two optimally aligned polynucleotide or peptide sequences are invariant throughout a window of alignment of components, e.g. nucleotides or amino acids. An “identity fraction” for aligned segments of a test sequence and a reference sequence is the number of identical components which are shared by the two aligned sequences divided by the total number of components in reference sequence segment, i.e. the entire reference sequence or a smaller defined part of the reference sequence. “Percent identity” is the identity fraction times 100.

[0068] As used herein, “typing” refers to any method whereby the specific allelic form of a given corn genomic polymorphism is determined. For example, a single nucleotide polymorphism (SNP) is typed by determining which nucleotide is present (i.e. an A, G, T, or C). Insertion/deletions (Indels) are determined by determining if the Indel is present. Indels can be typed by a variety of assays including, but not limited to, marker assays.

### DETAILED DESCRIPTION OF THE PREFERRED EMBODIMENTS

[0069] The following detailed description relates to the isolated nucleic acid compositions and related methods for genotyping corn plants. In general, these compositions and methods can be used to genotype corn plants from the genus Zea. More specifically, corn plants from the species Zea mays and the subspecies Zea mays L. ssp. Mays can be genotyped using these compositions and methods. In an additional aspect, the corn plant is from the group Zea mays L. subsp. mays Indentata, otherwise known as dent corn. In another aspect, the corn plant is from the group Zea mays L. subsp. mays Indurata, otherwise known as flint corn. In another aspect, the corn plant is from the group Zea mays L. subsp. mays Saccharata, otherwise known as sweet corn. In another aspect, the corn plant is from the group Zea mays L. subsp. mays Amylacea, otherwise known as flour corn. In a further aspect, the corn plant is from the group Zea mays L. subsp. mays Everta, otherwise known as pop corn. Zea or corn plants that can be genotyped with the compositions and methods described herein include hybrids, inbreds, partial inbreds, or members of defined or undefined populations.

[0070] Isolated Nucleic Acid Molecules—Loci, Primers and Probes

[0071] The corn loci of this invention comprise a series of molecular markers which comprises at least 20 consecutive nucleotides and includes or is adjacent to one or more polymorphisms identified in Table 1 or Table 3. Such corn loci have a nucleic acid sequence having at least 90% sequence identity, more preferably at least 95% or even more preferably for some alleles at least 98% and in many cases at least 99% sequence identity, to the sequence of the same number of nucleotides in either strand of a segment of corn DNA which includes or is adjacent to the polymorphism. The nucleotide sequence of one strand of such a segment of corn DNA may be found in a sequence in the group consisting of SEQ ID NO: 1 through SEQ ID NO: 6552. It is understood by the very nature of polymorphisms that for at least some alleles there will be no identity to the disclosed polymorphism, per se. Thus, sequence identity can be determined for sequence that is exclusive of the disclosed polymorphism sequence. In other words, it is anticipated that additional alleles for the polymorphisms disclosed herein may exist, can be easily characterized by sequencing methods, and can be used for genotyping. For example, one skilled in the art will appreciate that for a single nucleotide polymorphism where just two polymorphic residues are disclosed (e.g. an “A” or a “G”) can also comprise other polymorphic residues (e.g. a “T” and/or a “G”).

[0072] The polymorphisms in each locus are identified more particularly in Table 1 or Table 3. SNPs are particularly useful as genetic markers because they are more stable than other classes of polymorphisms and are abundant in the corn genome. SNPs can result from insertions, deletions, and point mutations. In the present invention a SNP can represent a single indel event, which may consist of one or more base pairs, or a single nucleotide polymorphism. Polymorphisms shared by two or more individuals can result from the individuals descending from a common ancestor. This “Identity by descent” (IBD) characterizes two loci/segments of DNA that are carried by two or more individuals and were all derived from the same ancestor. “Identity by state” (IBS) characterizes two loci/segments of DNA that are carried by two or more individuals and have the same observable alleles at those loci. When a large set of crop lines is considered, and multiple lines have the same allele at a marker locus, it is necessary to ascertain whether IBS at the marker locus is a reliable predictor of IBD at the chromosomal region surrounding the marker locus. A good indication that a number of marker loci in a segment are enough to characterize IBD for the segment is that they can predict the allele present at other marker loci within the segment. The stability and abundance of SNPs in addition to the fact that they rarely arise independently makes them useful in determining IBD.

[0073] For many genotyping applications it is useful to employ as markers polymorphisms from more than one locus. Thus, one aspect of the invention provides a collection of nucleic acid molecules that permit typing of polymorphisms of different loci. The number of loci in such a collection can vary but will be a finite number, e.g. as few as 2 or 5 or 10 or 25 loci or more, for instance up to 40 or 75 or 100 or more loci.

[0074] Another aspect of the invention provides isolated nucleic acid molecules which are capable of hybridizing to the polymorphic maize loci of this invention. In certain embodiments of the invention, e.g. which provide PCR primers, such molecules comprise at least 15 nucleotide bases. Molecules useful as primers can hybridize under high stringency conditions to a one of the strands of a segment of DNA in a polymorphic locus of this invention. Primers for amplifying DNA are provided in pairs, i.e. a forward primer and a reverse primer. One primer will be complementary to one strand of DNA in the locus and the other primer will be complementary to the other strand of DNA in the locus, i.e. the sequence of a primer is preferably at least 90%, more preferably at least 95%, identical to a sequence of the same number of nucleotides in one of the strands. It is understood that such primers can hybridize to sequence in the locus which is distant from the polymorphism, e.g. at least 5, 10, 20, 50, 100, 200, 500 or up to about 1000 nucleotide bases away from the polymorphism. Design of a primer of this invention will depend on factors well known in the art, e.g. avoidance or repetitive sequence.

[0075] Another aspect of the isolated nucleic acid molecules of this invention are hybridization probes for polymorphism assays. In one aspect of the invention such probes are oligonucleotides comprising at least 12 nucleotide bases and a detectable label. The purpose of such a molecule is to hybridize, e.g. under high stringency conditions, to one strand of DNA in a segment of nucleotide bases which includes or is adjacent to the polymorphism of interest in an amplified part of a polymorphic locus. Such oligonucleotides are preferably at least 90%, more preferably at least 95%, identical to the sequence of a segment of the same number of nucleotides in one strand of maize DNA in a polymorphic locus. The detectable label can be a radioactive element or a dye. In preferred aspects of the invention, the hybridization probe further comprises a fluorescent label and a quencher, e.g. for use hybridization probe assays of the type known as Taqman® assays, available from AB Biosystems.

[0076] Isolated nucleic acid molecules of the present invention are capable of hybridizing to other nucleic acid molecules including, but not limited, to corn genomic DNA, cloned corn genomic DNA, and amplified corn genomic DNA under certain conditions. As used herein, two nucleic acid molecules are said to be capable of hybridizing to one another if the two molecules are capable of forming an anti-parallel, double-stranded nucleic acid structure. A nucleic acid molecule is said to be the “complement” of another nucleic acid molecule if they exhibit “complete complementarity” i.e. each nucleotide in one sequence is complementary to its base pairing partner nucleotide in another sequence. Two molecules are said to be “minimally complementary” if they can hybridize to one another with sufficient stability to permit them to remain annealed to one another under at least conventional “low-stringency” conditions. Similarly, the molecules are said to be “complementary” if they can hybridize to one another with sufficient stability to permit them to remain annealed to one another under conventional “high-stringency” conditions. Nucleic acid molecules which hybridize to other nucleic acid molecules, e.g. at least under low stringency conditions are said to be “hybridizable cognates” of the other nucleic acid molecules. Conventional stringency conditions are described by Sambrook et al., Molecular Cloning, A Laboratory Manual, 2nd Ed., Cold Spring Harbor Press, Cold Spring Harbor, N.Y. (1989) and by Haymes et al., Nucleic Acid Hybridization, A Practical Approach, IRL Press, Washington, D.C. (1985), each of which is incorporated herein by reference. Departures from complete complementarity are therefore permissible, as long as such departures do not completely preclude the capacity of the molecules to form a double-stranded structure. Thus, in order for a nucleic acid molecule to serve as a primer or probe it need only be sufficiently complementary in sequence to be able to form a stable double-stranded structure under the particular solvent and salt concentrations employed.

[0077] Appropriate stringency conditions which promote DNA hybridization, for example, 6.0 X sodium chloride/sodium citrate (SSC) at about 45° C., followed by a wash of 2.0×SSC at 50° C., are known to those skilled in the art or can be found in Current Protocols in Molecular Biology, John Wiley & Sons, N.Y. (1989), 6.3.1-6.3.6, incorporated herein by reference. For example, the salt concentration in the wash step can be selected from a low stringency of about 2.0×SSC at 50° C. to a high stringency of about 0.2×SSC at 50° C. In addition, the temperature in the wash step can be increased from low stringency conditions at room temperature, about 22° C., to high stringency conditions at about 65° C. Both temperature and salt may be varied, or either the temperature or the salt concentration may be held constant while the other variable is changed.

[0078] In a preferred embodiment, a nucleic acid molecule of the present invention will specifically hybridize to one strand of a segment of corn DNA having a nucleic acid sequence as set forth in SEQ ID NO: 1 through SEQ ID NO: 6552 under moderately stringent conditions, for example at about 2.0×SSC and about 65° C., more preferably under high stringency conditions such as 0.2×SSC and about 65° C.

[0079] For assays where the molecule is designed to hybridize adjacent to a polymorphism which is detected by single base extension, e.g. of a labeled dideoxynucleotide, such molecules can comprise at least 15, more preferably at least 16 or 17, nucleotide bases in a sequence which is at least 90 percent, preferably at least 95%, identical to a sequence of the same number of consecutive nucleotides in either strand of a segment of polymorphic maize DNA. Oligonucleotides for single base extension assays are available from Orchid Biosystems.

[0080] Isolated nucleic acid molecules useful as hybridization probes for detecting a polymorphism in corn DNA can be designed for a variety of assays. For assays, where the probe is intended to hybridize to a segment including the polymorphism, such molecules can comprise at least 12 nucleotide bases and a detectable label. The sequence of the nucleotide bases is preferably at least 90 percent, more preferably at least 95%, identical to a sequence of the same number of consecutive nucleotides in either strand of a segment of corn DNA in a polymorphic locus of this invention. The detectable label is a dye at one end of the molecule. In preferred aspects the isolated nucleic acid molecule comprises a dye and dye quencher at the ends thereof. For SNP detection assays it is useful to provide such dye and dye quencher molecules in pairs, e.g. where each molecule has a distinct fluorescent dye at the 5′ end and has identical nucleotide sequence except for a single nucleotide polymorphism. It is well known in the art how to design oligonucleotide PCR probe pairs for annealing to a target segment of DNA for the purpose of reporting, wherein the sequence of the target is known such as the polymorphic marker sequences provided in the present invention.

[0081] For assays where the isolated nucleic molecule is designed to hybridize adjacent to a polymorphism which is detected by single base extension, such molecules can comprise at least 15, more preferably at least 16 or 17, nucleotide bases in a sequence which is at least 90 percent, preferably at least 95%, identical to a sequence of the same number of consecutive nucleotides in either strand of a segment of polymorphic corn DNA. In this case, the isolated nucleotide provides for incorporation of a detectable label. This detectable label can be an isotope, a fluorophore, an oxidant, a reductant, a nucleotide or a hapten.

[0082] For assays involving use of Flap endonucleases (i.e. Invader® assays). In certain embodiments, the compositions would comprise at least two isolated nucleic acid molecules for detecting a molecular marker representing a polymorphism in corn DNA, wherein a first nucleic acid molecule of the composition comprises an oligonucleotide that includes the polymorphic nucleotide residue and at least 8 nucleotides that are immediately adjacent to a 3′ end of said polymorphic nucleotide residue, wherein a second nucleic acid molecule of the composition comprises an oligonucleotide that includes the polymorphic nucleotide residue and at least 8 nucleotides that are immediately adjacent to a 5′ end of said polymorphic nucleotide residue, and wherein the polymorphism is identified in Table 1 or Table 3. In certain embodiments, isolated nucleic acid molecule compositions suitable for typing the polymorphisms of Table 1 or Table 3 with the Flap endonuclease would comprise at least one primary probe with a “universal” 5′ Flap sequence, at least one secondary or “Invader®” probe, and at least one “FRET” cassettes containing the labelled base and quencher base that contains sequences complementary to the “universal Flap sequence” that is released from the primary probe upon cleavage.

[0083] Identifying Polymorphisms

[0084] SNPs are the result of sequence variation and new polymorphisms can be detected by sequencing random genomic or cDNA molecules. In one aspect, polymorphisms in a genome can be determined by comparing cDNA sequence from different lines. While the detection of polymorphisms by comparing cDNA sequence is relatively convenient, evaluation of cDNA sequence allows no information about the position of introns in the corresponding genomic DNA. Moreover, polymorphisms in non-coding sequence cannot be identified from cDNA. This can be a disadvantage, e.g. when using cDNA-derived polymorphisms as markers for genotyping of genomic DNA. More efficient genotyping assays can be designed if the scope of polymorphisms includes those present in non-coding unique sequence.

[0085] Genomic DNA sequence is more useful than cDNA for identifying and detecting polymorphisms. Polymorphisms in a genome can be determined by comparing genomic DNA sequence from different lines. However, the genomic DNA of higher eukaryotes typically contain a large fraction of repetitive sequence and transposons. Genomic DNA can be more efficiently sequenced if the coding/unique fraction is enriched by subtracting or eliminating the repetitive sequence.

[0086] There are a number of strategies well known in the art that can be employed to enrich for coding/unique sequence. Examples of these include the use of enzymes which are sensitive to cytosine methylation, the use of the McrBC endonuclease to cleave repetitive sequence, and the printing of microarrays of genomic libraries which are then hybridized with repetitive sequence probes.

[0087] In a preferred embodiment, coding DNA is enriched by exploiting differences in methylation pattern; the DNA of higher eukaryotes tends to be very heavily methylated, however it is not uniformly methylated. In fact, repetitive sequence is much more highly methylated than coding sequence. See U.S. Pat. No. 6,017,704 for methods of mapping and assessment of DNA methylation patterns in CG islands. Briefly, some restriction endonucleases are sensitive to the presence of methylated cytosine residues in their recognition site. Such methylation sensitive restriction endonucleases may not cleave at their recognition site if the cytosine residue in either an overlapping 5′-CG-3′ or an overlapping 5′-CNG-3′ is methylated. In order to enrich for coding/unique sequence corn libraries can be constructed from genomic DNA digested with Pst I (or other methylation sensitive enzymes), and size fractionated by agarose gel electrophoresis.

[0088] One method for reducing repetitive DNA comprises the construction of reduced representation libraries by separating repetitive sequence from fragments of genomic DNA of at least two varieties of a species, fractionating the separated genomic DNA fragments based on size of nucleotide sequence and comparing the sequence of fragments in a fraction to determine polymorphisms. More particularly, these methods of identifying polymorphisms in genomic DNA comprises digesting total genomic DNA from at least two variants of a eukaryotic species with a methylation sensitive endonuclease to provide a pool of digested DNA fragments. The average nucleotide length of fragments is smaller for DNA regions characterized by a lower percent of 5-methylated cytosine. Such fragments are separable, e.g. by gel electrophoresis, based on nucleotide length. A fraction of DNA with less than average nucleotide length is separated from the pool of digested DNA. Sequences of the DNA in a fraction are compared to identify polymorphisms. As compared to coding sequence, repetitive sequence is more likely to comprise 5-methylated cytosine, e.g. in -CG- and -CNG- sequence segments. In one embodiment of the method, genomic DNA from at least two different inbred varieties of a crop plant is digested with a with a methylation sensitive endonuclease selected from the group consisting of Aci I, Apa I, Age I, Bsr F I, BssH II, Eag I, Eae I, Hha I, HinP1 I, Hpa II, Msp I, MspM II, Nar I, Not I, Pst I, Pvu I, Sac II, Sma I, Stu I and Xho I to provide a pool of digested DNA which is physically separated, e.g. by gel electrophoresis. Comparable size fractions of DNA are obtained from digested DNA of each of said varieties. DNA molecules from the comparable fractions are inserted into vectors to construct reduced representation libraries of genomic DNA clones which are sequenced and compared to identify polymorphisms.

[0089] An alternative method for enriching coding region DNA sequence enrichment uses McrBC endonuclease restriction, which cleaves methylated cytosine-containing DNA. Reduced representation libraries can be constructed using genomic DNA fragments which are cleaved by physical shearing or digestion with any restriction enzyme.

[0090] A further method to enrich for coding/unique sequence consists of construction of reduced representation libraries (using methylation sensitive or non-methylation sensitive enzymes), printing microarrays of the library on nylon membrane, followed by hybridization with probes made from repetitive elements known to be present in the library. The repetitive sequence elements are identified, and the library is re-arrayed by picking only the negative clones. Such methods provide segments of reduced representation genomic DNA from a plant which has genomic DNA comprising regions of DNA with relatively higher levels of methylated cytosine and regions of DNA with relatively lower levels of methylated cytosine. The reduced representation segments of this invention comprise genomic DNA from a region of DNA with relatively lower levels of methylated cytosine and are provided in fractions characterized by nucleotide size of said segments, e.g. in the range of 500 to 3000 bp.

[0091] Typing Polymorphisms in Corn Genomic DNA Samples

[0092] Polymorphisms in DNA sequences can be detected or typed by a variety of effective methods well known in the art including, but not limited to, those disclosed in U.S. Pat. Nos. 5,468,613 and 5,217,863; 5,210,015; 5,876,930; 6,030,787; 6,004,744; 6,013,431; 5,595,890; 5,762,876; 5,945,283; 5,468,613; 6,090,558; 5,800,944; and 5,616,464, all of which are incorporated herein by reference in their entireties. However, the compositions and methods of this invention can be used in conjunction with any polymorphism typing method to type polymorphisms in corn genomic DNA samples. These corn genomic DNA samples used include but are not limited to corn genomic DNA isolated directly from a corn plant, cloned corn genomic DNA, or amplified corn genomic DNA.

[0093] For instance, polymorphisms in DNA sequences can be detected by hybridization to allele-specific oligonucleotide (ASO) probes as disclosed in U.S. Pat. Nos. 5,468,613 and 5,217,863. U.S. Pat. No. 5,468,613 discloses allele specific oligonucleotide hybridizations where single or multiple nucleotide variations in nucleic acid sequence can be detected in nucleic acids by a process in which the sequence containing the nucleotide variation is amplified, spotted on a membrane and treated with a labeled sequence-specific oligonucleotide probe.

[0094] Target nucleic acid sequence can also be detected by probe ligation methods as disclosed in U.S. Pat. No. 5,800,944 where sequence of interest is amplified and hybridized to probes followed by ligation to detect a labeled part of the probe.

[0095] Microarrays can also be used for polymorphism detection, wherein oligonucleotide probe sets are assembled in an overlapping fashion to represent a single sequence such that a difference in the target sequence at one point would result in partial probe hybridization (Borevitz et al., Genome Res. 13:513-523 (2003); Cui et al., Bioinformatics 21:3852-3858 (2005). On any one microarray, it is expected there will be a plurality of target sequences, which may represent genes and/or noncoding regions wherein each target sequence is represented by a series of overlapping oligonucleotides, rather than by a single probe. This platform provides for high throughput screening a plurality of polymorphisms. A single-feature polymorphism (SFP) is a polymorphism detected by a single probe in an oligonucleotide array, wherein a feature is a probe in the array. Typing of target sequences by microarray-based methods is disclosed in U.S. Pat. Nos. 6,799,122; 6,913,879; and 6,996,476.

[0096] Target nucleic acid sequence can also be detected by probe linking methods as disclosed in U.S. Pat. No. 5,616,464 employing at least one pair of probes having sequences homologous to adjacent portions of the target nucleic acid sequence and having side chains which non-covalently bind to form a stem upon base pairing of said probes to said target nucleic acid sequence. At least one of the side chains has a photoactivatable group which can form a covalent cross-link with the other side chain member of the stem.

[0097] Other methods for detecting SNPs and Indels include single base extension (SBE) methods. Examples of SBE methods include, but are not limited, to those disclosed in U.S. Pat. Nos. 6,004,744; 6,013,431; 5,595,890; 5,762,876; and 5,945,283. SBE methods are based on extension of a nucleotide primer that is immediately adjacent to a polymorphism to incorporate a detectable nucleotide residue upon extension of the primer. In certain embodiments, the SBE method uses three synthetic oligonucleotides. Two of the oligonucleotides serve as PCR primers and are complementary to sequence of the locus of corn genomic DNA which flanks a region containing the polymorphism to be assayed. Following amplification of the region of the corn genome containing the polymorphism, the PCR product is mixed with the third oligonucleotide (called an extension primer) which is designed to hybridize to the amplified DNA immediately adjacent to the polymorphism in the presence of DNA polymerase and two differentially labeled dideoxynucleosidetriphosphates. If the polymorphism is present on the template, one of the labeled dideoxynucleosidetriphosphates can be added to the primer in a single base chain extension. The allele present is then inferred by determining which of the two differential labels was added to the extension primer. Homozygous samples will result in only one of the two labeled bases being incorporated and thus only one of the two labels will be detected. Heterozygous samples have both alleles present, and will thus direct incorporation of both labels (into different molecules of the extension primer) and thus both labels will be detected.

[0098] In a preferred method for detecting polymorphisms, SNPs and Indels can be detected by methods disclosed in U.S. Pat. Nos. 5,210,015; 5,876,930; and 6,030,787 in which an oligonucleotide probe having a 5′ fluorescent reporter dye and a 3′ quencher dye covalently linked to the 5′ and 3′ ends of the probe. When the probe is intact, the proximity of the reporter dye to the quencher dye results in the suppression of the reporter dye fluorescence, e.g. by Forster-type energy transfer. During PCR forward and reverse primers hybridize to a specific sequence of the target DNA flanking a polymorphism while the hybridization probe hybridizes to polymorphism-containing sequence within the amplified PCR product. In the subsequent PCR cycle DNA polymerase with 5′→3′ exonuclease activity cleaves the probe and separates the reporter dye from the quencher dye resulting in increased fluorescence of the reporter.

[0099] A useful assay is available from AB Biosystems as the Taqman® assay which employs four synthetic oligonucleotides in a single reaction that concurrently amplifies the corn genomic DNA, discriminates between the alleles present, and directly provides a signal for discrimination and detection. Two of the four oligonucleotides serve as PCR primers and generate a PCR product encompassing the polymorphism to be detected. Two others are allele-specific fluorescence-resonance-energy-transfer (FRET) probes. In the assay, two FRET probes bearing different fluorescent reporter dyes are used, where a unique dye is incorporated into an oligonucleotide that can anneal with high specificity to only one of the two alleles. Useful reporter dyes include, but are not limited to, 6-carboxy-4,7,2′,7′-tetrachlorofluorecein (TET), 2′-chloro-7′-phenyl-1,4-dichloro-6-carboxyfluorescein (VIC) and 6-carboxyfluorescein phosphoramidite (FAM). A useful quencher is 6-carboxy-N,N,N′,N′-tetramethylrhodamine (TAMRA). Additionally, the 3′ end of each FRET probe is chemically blocked so that it can not act as a PCR primer. Also present is a third fluorophore used as a passive reference, e.g., rhodamine X (ROX) to aid in later normalization of the relevant fluorescence values (correcting for volumetric errors in reaction assembly). Amplification of the genomic DNA is initiated. During each cycle of the PCR, the FRET probes anneal in an allele-specific manner to the template DNA molecules. Annealed (but not non-annealed) FRET probes are degraded by TAQ DNA polymerase as the enzyme encounters the 5′ end of the annealed probe, thus releasing the fluorophore from proximity to its quencher. Following the PCR, the fluorescence of each of the two fluorescers, as well as that of the passive reference, is determined fluorometrically. The normalized intensity of fluorescence for each of the two dyes will be proportional to the amounts of each allele initially present in the sample, and thus the genotype of the sample can be inferred.

[0100] To design primers and probes for the assay the locus sequence is first masked to prevent design of any of the three primers to sites that match known corn repetitive elements (e.g., transposons) or are of very low sequence complexity (di- or tri-nucleotide repeat sequences). Design of primers to such repetitive elements will result in assays of low specificity, through amplification of multiple loci or annealing of the FRET probes to multiple sites.

[0101] PCR primers are designed (a) to have a length in the size range of 15 to 25 bases and matching sequences in the polymorphic locus, (b) to have a calculated melting temperature in the range of 57 to 60° C., e.g. corresponding to an optimal PCR annealing temperature of 52 to 55° C., (c) to produce a product which includes the polymorphic site and typically has a length in the size range of 75 to 250 base pairs. However, PCR techniques that permit amplification of fragments of up to 1000 base pairs or more in length have also been disclosed in U.S. Pat. No. 6,410,277. The PCR primers are preferably located on the locus so that the polymorphic site is at least one base away from the 3′ end of each PCR primer. However, it is understood that the PCR primers can be up to 1000 base pairs or more away from the polymorphism and still provide for amplification of a corresponding DNA fragment of 1000 base pairs or more that contains the polymorphism and can be used in typing assays. The PCR primers must not contain regions that are extensively self- or inter-complementary.

[0102] FRET probes are designed to span the sequence of the polymorphic site, preferably with the polymorphism located in the 3′ most 2/3 of the oligonucleotide. In the preferred embodiment, the FRET probes will have incorporated at their 3′ end a chemical moiety which, when the probe is annealed to the template DNA, binds to the minor groove of the DNA, thus enhancing the stability of the probe-template complex. The probes should have a length in the range of 12 to 17 bases, and with the 3′MGB, have a calculated melting temperature of 5 to 7° C. above that of the PCR primers. Probe design is disclosed in U.S. Pat. Nos. 5,538,848, 6,084,102, and 6,127,121.

[0103] Oligonucleotide probes for typing single nucleotide polymorphisms through use of Flap Endonuclease-mediated (Invader®, Third Wave Technologies, Madison Wis.) assays are also contemplated. In these assays, a flap endonuclease (cleavase) cuts a triple-helix created by hybridization of two overlapping oligonucleotides to the sequence that is typed (Lyamichev et al., Nat. Biotechnol., 17, 292-296, 1999). The sequence that is typed can be either corn genomic DNA, cloned corn genomic DNA or amplified corn genomic DNA. Cleavage of one of the oligonucleotides that hybridizes to the sequence to be typed releases a flap that in turn forms a triple helix with a “FRET Cassette” oligonucleotide, resulting in a secondary cleavage reaction that releases a fluorescence resonance energy transfer (FRET) label. Embodiments where a single allele of a polymorphism is typed using a single FRET label have been described (Mein C. A., et al. Genome Res., 10, 330-343, 2000). In other embodiments of this method, two alleles of a polymorphism can be simultaneously typed by using different FRET labels. (Lyamichev et al., Ibid). High-throughput Flap Endonuclease-mediated assays have also been described that are suitable for creating sets of nucleotides for typing multiple polymorphisms (Olivier, et al., Nucleic Acids Res. 30(12): e53, 2002).

[0104] Isolated nucleic acid molecule compositions suitable for typing the polymorphisms of Table 1 or Table 3 with the cleavase can comprise at least one primary probe with a “universal” 5′ flap sequence, at least one secondary or “Invader®” probe, and at least one “FRET” cassettes containing the labelled base and quencher base that contains sequences complementary to the “universal flap sequence” that is released from the primary probe upon cleavage. When the typed sequence is amplified corn genomic DNA, flanking PCR primers similar to those described in the preceding paragraphs can also be used. The design of such probes requires only the provision of about 40 to 50 nucleotides on either side of the polymorphic base noted in Table 1 or Table 3. General aspects of designing probes for Flap endonuclease assays are described in “Single Nucleotide Polymorphisms” (Methods and Protocols) Volume 212, Chapter 16, V. Lyamichev and B. Neri pp. 229-240 Humana Press. 2002).

[0105] Use of Polymorphisms to Establish Marker/Trait Associations

[0106] The polymorphisms in the loci of this invention can be used in the identification of marker/trait associations which are inferred from statistical analysis of genotypes and phenotypes of the members of a population. These members may be individual organisms, e.g. corn, families of closely related individuals, inbred lines, doubled haploids or other groups of closely related individuals. Such corn groups are referred to as “lines”, indicating line of descent. The population may be descended from a single cross between two individuals or two lines (e.g. a mapping population) or it may consist of individuals with many lines of descent. Each individual or line is characterized by a single or average trait phenotype and by the genotypes at one or more marker loci.

[0107] Several types of statistical analysis can be used to infer marker/trait association from the phenotype/genotype data, but a basic idea is to detect molecular markers, i.e. polymorphisms, for which alternative genotypes have significantly different average phenotypes. For example, if a given marker locus A has three alternative genotypes (AA, Aa and aa), and if those three classes of individuals have significantly different phenotypes, then one infers that locus A is associated with the trait. The significance of differences in phenotype may be tested by several types of standard statistical tests such as linear regression of molecular marker genotypes on phenotype or analysis of variance (ANOVA). Commercially available, statistical software packages commonly used to do this type of analysis include SAS Enterprise Miner (SAS Institute Inc., Cary, N.C.) and Splus (Insightful Corporation. Cambridge, Mass.). When many molecular markers are tested simultaneously, an adjustment such as Bonferonni correction is made in the level of significance required to declare an association.

[0108] For the purpose of QTL mapping, the markers included should be diagnostic of origin in order for inferences to be made about subsequent populations. Molecular markers based on SNPs are ideal for mapping because the likelihood that a particular SNP allele is derived from independent origins in the extant populations of a particular species is very low. As such, SNP molecular markers are useful for tracking and assisting introgression of QTLs, particularly in the case of haplotypes.

[0109] Often the goal of an association study is not simply to detect marker/trait associations, but to estimate the location of genes affecting the trait directly (i.e. QTLs) relative to the marker locations. In a simple approach to this goal, one makes a comparison among marker loci of the magnitude of difference among alternative genotypes or the level of significance of that difference. Trait genes are inferred to be located nearest the marker(s) that have the greatest associated genotypic difference. The genetic linkage of additional marker molecules can be established by a gene mapping model such as, without limitation, the flanking marker model reported by Lander et al. (Lander et al. 1989 Genetics, 121:185-199), and the interval mapping, based on maximum likelihood methods described therein, and implemented in the software package MAPMAKER/QTL (Lincoln and Lander, Mapping Genes Controlling Quantitative Traits Using MAPMAKER/QTL, Whitehead Institute for Biomedical Research, Massachusetts, (1990). Additional software includes Qgene, Version 2.23 (1996), Department of Plant Breeding and Biometry, 266 Emerson Hall, Cornell University, Ithaca, N.Y.). Use of Qgene software is a particularly preferred approach.

[0110] A maximum likelihood estimate (MLE) for the presence of a marker is calculated, together with an MLE assuming no QTL effect, to avoid false positives. A log₁₀ of an odds ratio (LOD) is then calculated as: LOD=log₁₀ (MLE for the presence of a QTL/MLE given no linked QTL). The LOD score essentially indicates how much more likely the data are to have arisen assuming the presence of a QTL versus in its absence. The LOD threshold value for avoiding a false positive with a given confidence, say 95%, depends on the number of markers and the length of the genome. Graphs indicating LOD thresholds are set forth in Lander et al. (1989), and further described by Arils and Moreno-González, Plant Breeding, Hayward, Bosemark, Romagosa (eds.) Chapman & Hall, London, pp. 314-331 (1993).

[0111] Additional models can be used. Many modifications and alternative approaches to interval mapping have been reported, including the use of non-parametric methods (Kruglyak et al. 1995 Genetics, 139:1421-1428). Multiple regression methods or models can be also be used, in which the trait is regressed on a large number of markers (Jansen, Biometrics in Plant Breed, van Oijen, Jansen (eds.) Proceedings of the Ninth Meeting of the Eucarpia Section Biometrics in Plant Breeding, The Netherlands, pp. 116-124 (1994); Weber and Wricke, Advances in Plant Breeding, Blackwell, Berlin, 16 (1994)). Procedures combining interval mapping with regression analysis, whereby the phenotype is regressed onto a single putative QTL at a given marker interval, and at the same time onto a number of markers that serve as ‘cofactors,’ have been reported by Jansen et al. (Jansen et al. 1994 Genetics, 136:1447-1455) and Zeng (Zeng 1994 Genetics 136:1457-1468). Generally, the use of cofactors reduces the bias and sampling error of the estimated QTL positions (Utz and Melchinger, Biometrics in Plant Breeding, van Oijen, Jansen (eds.) Proceedings of the Ninth Meeting of the Eucarpia Section Biometrics in Plant Breeding, The Netherlands, pp. 195-204 (1994), thereby improving the precision and efficiency of QTL mapping (Zeng 1994). These models can be extended to multi-environment experiments to analyze genotype-environment interactions (Jansen et al. 1995 Theor. Appl. Genet. 91:33-3).

[0112] An alternative to traditional QTL mapping involves achieving higher resolution by mapping haplotypes, versus individual markers (Fan et al. 2006 Genetics 172:663-686) as one of the limitations of traditional QTL mapping research has been the fact that inferences are restricted to the particular parents of the mapping population and the genes or gene combinations of these parental varieties. This approach tracks blocks of DNA known as haplotypes, as defined by polymorphic markers, which are assumed to be identical by descent in the mapping population. It has long been recognized that genes and genomic sequences may be identical by state (i.e., identical by independent origins) or identical by descent (i.e., through historical inheritance from a common progenitor) which has tremendous bearing on studies of linkage disequilibrium and, ultimately, mapping studies (Nordberg et al. 2002 Trends Gen.). Historically, genetic markers were not appropriate for distinguishing identical in state or by descent. However, newer classes of markers, such as SNPs (single nucleotide polymorphisms), are more diagnostic of origin. The likelihood that a particular SNP allele is derived from independent origins in the extant populations of a particular species is very low. Polymorphisms occurring in linked genes are randomly assorted at a slow, but predictable rate, described by the decay of linkage disequilibrium or, alternatively, the approach of linkage equilibrium. Consequences of this well-established scientific discovery are that long stretches of coding DNA, defined by a specific combination of polymorphisms, are very unique and extremely improbable of existing in duplication except through linkage disequilibrium, which is indicative of recent co-ancestry from a common progenitor. The probability that a particular genomic region, as defined by some combination of alleles, indicates absolute identity of the entire intervening genetic sequence is dependent on the number of linked polymorphisms in this genomic region, barring the occurrence of recent mutations in the interval. Herein, such genomic regions are referred to as haplotype windows. Each haplotype within that window is defined by specific combinations of alleles; the greater the number of alleles, the greater the number of potential haplotypes, and the greater the certainty that identity by state is a result of identity by descent at that region. During the development of new lines, ancestral haplotypes are maintained through the process and are typically thought of as ‘linkage blocks’ that are inherited as a unit through a pedigree. Further, if a specific haplotype has a known effect, or phenotype, it is possible to extrapolate its effect in other lines with the same haplotype, as determined using one or more diagnostic markers for that haplotype window.

[0113] This assumption results in a larger effective sample size, offering greater resolution of QTL. Methods for determining the statistical significance of a correlation between a phenotype and a genotype, in this case a haplotype, may be determined by any statistical test known in the art and with any accepted threshold of statistical significance being required. The application of particular methods and thresholds of significance are well with in the skill of the ordinary practitioner of the art.

[0114] Construction of Genetic Maps

[0115] In another aspect of the invention the polymorphism in the loci of the invention are mapped onto the corn genome, e.g. as a genetic map of the corn genome comprising map positions of two or more polymorphisms, as indicated in Table 1, more preferably as indicated in Table 3. Such a genetic map is illustrated in FIG. 1. The genetic map data can also be recorded on computer readable medium. Preferred embodiments of the invention provide genetic maps of polymorphisms at high densities, e.g. at least 150 or more, say at least 500 or 1000, polymorphisms across a map of the corn genome. Especially useful genetic maps comprise polymorphisms at an average distance of not more than 10 centiMorgans (cM) on a linkage group.

[0116] Linkage Disequilibrium Mapping and Association Studies

[0117] Another approach to determining trait gene location is to analyze marker/trait associations in a population within which individuals differ at both trait and marker loci. Certain marker alleles may be associated with certain trait locus alleles in this population due to population genetic process such as the unique origin of mutations, founder events, random drift and population structure. This association is referred to as linkage disequilibrium.

[0118] In plant breeding populations, linkage disequilibrium (LD) is the level of departure from random association between two or more loci in a population and LD often persists over large chromosomal segments. Although it is possible for one to be concerned with the individual effect of each gene in the segment, for a practical plant breeding purpose the emphasis is typically on the average impact the region has for the trait(s) of interest when present in a line, hybrid or variety. In linkage disequilibrium mapping, one compares the trait values of individuals with different genotypes at a marker locus. Typically, a significant trait difference indicates close proximity between marker locus and one or more trait loci. If the marker density is appropriately high and the linkage disequilibrium occurs only between very closely linked sites on a chromosome, the location of trait loci can be very precise.

[0119] Marker-Assisted Breeding and Marker-Assisted Selection

[0120] When a quantitative trait locus (QTL) has been localized in the vicinity of molecular markers, those markers can be used to select for improved values of the trait without the need for phenotypic analysis at each cycle of selection. In marker-assisted breeding and marker-assisted selection, associations between QTL and markers are established initially through genetic mapping analysis (as in A.1 or A.2). In the same process, one determines which molecular marker alleles are linked to favorable QTL alleles. Subsequently, marker alleles associated with favorable QTL alleles are selected in the population. This procedure will improve the value of the trait provided that there is sufficiently close linkage between markers and QTLs. The degree of linkage required depends upon the number of generations of selection because, at each generation, there is opportunity for breakdown of the association through recombination.

[0121] The associations between specific marker alleles and favorable QTL alleles also can be used to predict what types of progeny may segregate from a given cross. This prediction may allow selection of appropriate parents to generation populations from which new combinations of favorable QTL alleles are assembled to produce a new inbred line. For example, if line A has marker alleles previously known to be associated with favorable QTL alleles at loci 1, 20 and 31, while line B has marker alleles associated with favorable effects at loci 15, 27 and 29, then a new line could be developed by crossing A×B and selecting progeny that have favorable alleles at all 6 QTL.

[0122] Molecular markers are used to accelerate introgression of transgenes into new genetic backgrounds (i.e. into a diverse range of germplasm). Simple introgression involves crossing a transgenic line to an elite inbred line and then backcrossing the hybrid repeatedly to the elite (recurrent) parent, while selecting for maintenance of the transgene. Over multiple backcross generations, the genetic background of the original transgenic line is replaced gradually by the genetic background of the elite inbred through recombination and segregation. This process can be accelerated by selection on molecular marker alleles that derive from the recurrent parent.

[0123] Further, a fingerprint of an inbred line is the combination of alleles at a set of two or more marker loci. High density fingerprints can be used to establish and trace the identity of germplasm, which has utility in establishing a database of marker-trait associations to benefit an overall crop breeding program, as well as germplasm ownership protection.

[0124] Methods for Selecting Parent, Progeny, or Tester Plants for Plant Breeding

[0125] It is also contemplated that the polymorphism provided herein can be used to select a parent, progeny, or tester plants for plant breeding. The ability to select such plants from populations of plants that are otherwise phenotypically indistinguishable can accelerate plant breeding and reduce costs incurred by performing phenotypic trait analyses. The methods of selecting plants for breeding comprise the steps of a) determining associations between a plurality of polymorphisms identified in Table 1 or Table 3 and a plurality of traits in at least a first and a second inbred line of corn; b) determining an allelic state of one or a plurality of polymorphism in a parent, progeny or tester plant; and c) selecting the parent, progeny or tester that has a more favorable combination of associated traits. In certain applications, the parent, progeny or tester plant selected by this method is an inbred corn line. In other embodiments, the favorable combination of associated traits provides for improved heterosis.

[0126] In one embodiment, determining the genotype of at least two polymorphisms will assist in the selection of parents for use in breeding crosses. This determination confers an advantage to the breeder for the creation of crosses wherein at least two preferred genomic regions are targeted in order to generate progeny with the at least two preferred genomic regions. In another aspect, the determination of the genotype for at least two polymorphisms can provide the basis for selection decisions among progeny wherein those progeny comprising preferred genomic regions are advanced in a breeding program. In yet another aspect, tester lines, which are used to evaluate the combining ability of inbreds in hybrid combinations, can be chosen for inclusion in an inbred testing scheme based on the presence, or absence, of at least two genomic regions in order to ensure crosses are made between distinct germplasm pools, i.e., different heterotic groups.

[0127] Hybrid Prediction

[0128] Commercial corn seed is produced by making hybrids between two elite inbred lines that belong to different “heterotic groups”. These groups are sufficiently distinct genetically that hybrids between them show high levels of heterosis or hybrid vigor (i.e. increased performance relative to the parental lines). By analyzing the marker constitution of good hybrids, one can identify sets of alleles at different loci in both male and female lines that combine well to produce heterosis. Understanding these patterns, and knowing the marker constitution of different inbred lines, can allow prediction of the level of heterosis between different pairs of lines. These predictions can narrow down the possibilities of which line(s) of opposite heterotic group should be used to test the performance of a new inbred line.

[0129] This invention provides methods for improving heterosis in hybrid corn. In such methods associations are developed between a plurality of polymorphisms which are linked to polymorphic loci of the invention and traits in more than two inbred lines of corn. Two of such inbred lines having complementary heterotic groups which are predicted to improve heterosis are selected for breeding. The methods for improving heterosis comprise the steps of: (a) determining associations between a plurality of polymorphisms identified in Table 1 or Table 3′ and a plurality of traits in more than two inbred lines of corn; (b) assigning two inbred lines selected from the inbred lines of step (a) to heterotic groups, (c) making at least one cross between at least two inbred lines from step (b), wherein each inbred line comes from a distinct and complementary heterotic group and wherein the complementary heterotic groups are optimized for genetic features that improve heterosis; and (d) obtaining a hybrid progeny plant from said cross in step (c), wherein said hybrid progeny plant displays increased heterosis relative to progeny derived from a cross with an unselected inbred line. These methods can also comprise traditional single crosses (i.e., between a two inbred lines, ideally from different heterotic groups), three-way crosses (a single cross is followed by a cross to a third inbred line), and double crosses (also known as a four-way cross, this is crossing the progeny of two single crosses) in step (c). Crosses can be effected by making manual crosses between selected male-fertile parents or by using male sterility systems. Development and selection of elite inbred lines, the crossing of these lines and selection of superior hybrid crosses of identify new elite corn hybrids is described in Bernardo, Breeding for Quantitative Traits in Plants, Stemma Press, Woodbury, Minn., 2002.

[0130] Identity by Descent

[0131] One theory of heterosis predicts that regions of identity by descent (IBD) between the male and female lines used to produce a hybrid will reduce hybrid performance. Identity by descent can be inferred from patterns of marker alleles in different lines. An identical string of markers at a series of adjacent loci may be considered identical by descent if it is unlikely to occur independently by chance. Analysis of marker fingerprints in male and female lines can identify regions of IBD. Knowledge of these regions can inform the choice of hybrid parents, since avoiding. IBD in hybrids is likely to improve performance. This knowledge may also inform breeding programs in that crosses could be designed to produce pairs of inbred lines (one male and one female) that show little or no IBD.

[0132] Libraries of Nucleic Acid Molecules for Use in Genotyping

[0133] Libraries of nucleic acids provided by this invention can be used in activities related to corn germplasm improvement, including but not limited to using the plant for making breeding crosses, further genetic or phenotypic testing of the plant, advancement of the plant through self fertilization, use of the plant or parts thereof for transformation, and use of the plant or parts thereof for mutagenesis. The distinct sets of nucleic acids in the libraries can be sampled, accessed, or individually queried for any set or subset or combination thereof to type any of the corn genomic DNA provided herein in Tables 1 or 3. In general, the libraries comprising at least two distinct sets of nucleic acid molecules wherein each of said distinct sets of nucleic acid molecules permits typing of a corresponding corn genomic DNA polymorphism identified in Table 1 or Table 3.

[0134] In one embodiment, the distinct sets of nucleic acid molecules that permits typing of a corresponding corn genomic DNA polymorphism identified in Table 1 or Table 3 are distributed in individual wells of a microtiter plate. In certain embodiments, each well of the microtiter plate will contain one or more nucleic acid molecules that permit typing of just one corn polymorphism identified in Table 1 or Table 3. However, other embodiments where each well of the microtiter plate contains one or more nucleic acid molecules that permit typing of more than one corn polymorphism identified in Table 1 or Table 3 are also contemplated. The microtiter plates can have as few as 8 wells, or as many as 24, 96, 384, 1536 or 3456 wells. The microtiter plates can be constructed from materials including, but not limited, to polystyrene, polypropylene, or cyclo-olefin plastics. The nucleic acid molecules in each well can be either in solution or in a dry (i.e. lyophilized form). In general, the nucleic acids will be distributed to the wells of the microtiter plate such that the nucleic acids in each well of the microtiter plate are known. However, in other embodiments where the nucleic cid molecules are associated with a unique identifier (such as a unique dye or other unique identifying label), the nucleic acids can be randomly distributed into the wells of the microtiter plate. As is clear from this description, libraries comprising nucleic acids immobilized on solid supports (such as beads) that are distributed in wells of microtiter plates are also contemplated.

[0135] In other embodiments, the nucleic acids that permit typing of a corn genomic polymorphism identified in Table 1 or Table 3 are immobilized (i.e. covalently linked) to a solid support. Solid supports include, but are not limited to, beads, chips, arrays, or filters.

[0136] The beads used as a solid support can be magnetic beads to facilitate purification of hybridization complexes. Alternatively, the beads can contain a unique identifying label. In particular, beads dyed with fluorochromes that can be distinguished by their spectrophotometric or fluorometric properties can be coupled to the nucleic acid molecules for typing polymorphisms. Such bead based systems for typing polymorphisms have been described (U.S. Pat. No. 5,736,330). Dye labelled beads, analysis reagents and apparati for typing polymorphisms have also been described (U.S. Pat. Nos. 6,649,414, 6,599,331, and 6,592,822) and are available from Luminex Corporation (Austin, Tex., USA). As noted above, the bead-linked nucleic acid molecules of the library can also be

[0137] The chips, arrays, or filters can also be used to immobilize the nucleic acid molecules for typing of the polymorphisms of Tables 1 or Table 3. In certain embodiments, the nucleic acid markers for typing a given polymorphism will be immobilized at a defined physical location on the array such that typing data from that location that corresponds to a given polymorphism can be generated and recorded for subsequent analysis. Methods of making and using arrays for typing of polymorphisms include, but are not limited to, those described in U.S. Pat. No. 5,858,659 (for hybridization based methods) and U.S. Pat. No. 6,294,336 (for single base extension methods).

[0138] Use of Polymorphism Assays for Mapping a Library of DNA Clones

[0139] The polymorphisms and loci represented by the molecular markers of this invention are useful for identifying and mapping DNA sequence of QTLs and genes linked to the molecular markers. For instance, BAC or YAC clone libraries can be queried using molecular markers linked to a trait to find a clone containing specific QTLs and genes associated with the trait. For instance, QTLs and genes in a plurality, e.g. hundreds or thousands, of large, multi-gene sequences can be identified by hybridization with an oligonucleotide probe which hybridizes to a mapped and/or linked molecular marker, wherein one or more molecular markers can be assayed. Such hybridization screening can be improved by providing clone sequence in a high density array. The screening method is more preferably enhanced by employing a pooling strategy to significantly reduce the number of hybridizations required to identify a clone containing the molecular marker. When the molecular markers are mapped, the screening effectively maps the clones.

[0140] For instance, in a case where thousands of clones are arranged in a defined array, e.g. in 96 well plates, the plates can be arbitrarily arranged in three-dimensionally, arrayed stacks of wells each comprising a unique DNA clone. The wells in each stack can be represented as discrete elements in a three dimensional array of rows, columns and plates. In one aspect of the invention the number of stacks and plates in a stack are about equal to minimize the number of assays. The stacks of plates allow the construction of pools of cloned DNA.

[0141] For a three-dimensionally arrayed stack pools of cloned DNA can be created for (a) all of the elements in each row, (b) all of the elements of each column, and (c) all of the elements of each plate. Hybridization screening of the pools with an oligonucleotide probe which hybridizes to a molecular marker unique to one of the clones will provide a positive indication for one column pool, one row pool and one plate pool, thereby indicating the well element containing the target clone.

[0142] In the case of multiple stacks, additional pools of all of the clone DNA in each stack allows indication of the stack having the row-column-plate coordinates of the target clone. For instance, a 4608 clone set can be disposed in 48 96-well plates. The 48 plates can be arranged in 8 sets of 6 plate stacks providing 6×12×8 three-dimensional arrays of elements, i.e. each stack comprises 6 stacks of 8 rows and 12 columns. For the entire clone set there are 36 pools, i.e. 6 stack pools, 8 row pools, 12 column pools and 8 stack pools. Thus, a maximum of 36 hybridization reactions is required to find the clone harboring QTLs or genes associated or linked to each mapped molecular marker.

[0143] Once a clone is identified, oligonucleotide primers designed from the locus of the molecular marker can be used for positional cloning of the linked QTL and/or genes.

[0144] Computer Readable Media and Databases

[0145] The sequences of nucleic acid molecules of this invention can be “provided” in a variety of mediums to facilitate use, e.g. a database or computer readable medium, which can also contain descriptive annotations in a form that allows a skilled artisan to examine or query the sequences and obtain useful information. In one embodiment of the invention computer readable media may be prepared that comprise nucleic acid sequences where at least 10% or more, e.g. at least 25%, or even at least 50% or more of the sequences of the loci and nucleic acid molecules representing the molecular markers of this invention. For instance, such database or computer readable medium may comprise sets of the loci of this invention or sets of primers and probes useful for assaying the molecular markers of this invention. In addition such database or computer readable medium may comprise a figure or table of the mapped or unmapped molecular markers or this invention and genetic maps.

[0146] As used herein “database” refers to any representation of retrievable collected data including computer files such as text files, database files, spreadsheet files and image files, printed tabulations and graphical representations and combinations of digital and image data collections. In a preferred aspect of the invention, “database” refers to a memory system that can store computer searchable information. Currently, preferred database applications include those provided by DB2, Sybase and Oracle.

[0147] As used herein, “computer readable media” refers to any medium that can be read and accessed directly by a computer. Such media include, but are not limited to: magnetic storage media, such as floppy discs, hard disc, storage medium and magnetic tape; optical storage media such as CD-ROM; electrical storage media such as RAM, DRAM, SRAM, SDRAM, ROM; and PROMs (EPROM, EEPROM, Flash EPROM), and hybrids of these categories such as magnetic/optical storage media. A skilled artisan can readily appreciate how any of the presently known computer readable mediums can be used to create a manufacture comprising computer readable medium having recorded thereon a nucleotide sequence of the present invention.

[0148] As used herein, “recorded” refers to the result of a process for storing information in a retrievable database or computer readable medium. For instance, a skilled artisan can readily adopt any of the presently known methods for recording information on computer readable medium to generate media comprising the mapped polymorphisms and other nucleotide sequence information of the present invention. A variety of data storage structures are available to a skilled artisan for creating a computer readable medium where the choice of the data storage structure will generally be based on the means chosen to access the stored information. In addition, a variety of data processor programs and formats can be used to store the polymorphisms and nucleotide sequence information of the present invention on computer readable medium.

[0149] Computer software is publicly available which allows a skilled artisan to access sequence information provided in a computer readable medium. The examples which follow demonstrate how software which implements a search algorithm such as the BLAST algorithm (Altschul et al., J. Mol. Biol. 215:403-410 (1990), incorporated herein by reference) and the BLAZE algorithm (Brutlag et al., Comp. Chem. 17:203-207 (1993), incorporated herein by reference) on a Sybase system can be used to identify DNA sequence which is homologous to the sequence of loci of this invention with a high level of identity. Sequence of high identity can be compared to find polymorphic markers useful with corn varieties.

[0150] The present invention further provides systems, particularly computer-based systems, which contain the sequence information described herein. Such systems are designed to identify commercially important sequence segments of the nucleic acid molecules of this invention. As used herein, “a computer-based system” refers to the hardware, software and memory used to analyze the nucleotide sequence information. A skilled artisan can readily appreciate that any one of the currently available computer-based system are suitable for use in the present invention.

[0151] As indicated above, the computer-based systems of the present invention comprise a database having stored therein polymorphic markers, genetic maps, and/or the sequence of nucleic acid molecules of the present invention and the necessary hardware and software for supporting and implementing genotyping applications. Such computer-based systems can be used to read, sort or analyze corn genotypic data. Key components of the computer-based system include: a) a data storage device comprising a computer readable medium wherein at least two corn genomic DNA polymorphisms identified in Table 1 or Table 3 are recorded thereon; b) a search device for comparing a corn genomic DNA sequence from at least one test corn plant to the polymorphism sequences of the data storage device of step (a) to identify homologous or non-homologous sequences; and, c) a retrieval device for identifying the homologous or non-homologous sequences(s) of the test corn genomic sequences of step (b). Computer based methods and systems (e.g. apparati) for conducting DNA database queries are described in U.S. Pat. No. 6,691,109

[0152] In a useful aspect of the invention a data set of polymorphic corn loci from Table 1 or Table 3 is recorded on a computer readable medium. In one aspect of the invention the corn genomic polymorphisms are provided in one or more data sets of DNA sequences, i.e. data sets comprising up to a finite number of distinct sequences of polymorphic loci that are recorded on the computer readable media. The finite number of polymorphic loci in a recorded data set can be as few as 2 or up to 1000 or more, e.g. 5, 8, 10, 25, 40, 75, 96, 100, 384 or 500 of the corn genomic polymorphisms of Table 1 or Table 3. Such data sets are useful for genotyping applications where 1) multiple polymorphisms that identify polymorphisms that are distributed across the genome of corn are queried; 2) multiple polymorphisms that cluster within an interval are queried; and/or when multiple polymorphisms are queried in large numbers of plants. The data sets recorded on the computer readable media can also comprise corresponding genetic map positions for each of the corn genomic DNA polymorphisms recorded thereon. In other embodiments, phenotypic trait or phenotypic trait index data is recorded on the computer readable media. In still other embodiments, data associating an allelic state with a parent, progeny, or tester corn plant is recorded on the computer readable media.

[0153] Methods of Breeding

[0154] Methods of breeding corn plants are also contemplated. The methods of breeding corn plants comprise the steps of (a) identifying trait values for at least two haplotypes in at least two genomic windows of up to 10 centimorgans for a breeding population of at least two corn plants; (b) breeding two corn plants in said breeding population to produce a population of progeny seed; (c) identifying an allelic state of at least one polymorphism identified in Table 1 or Table 3 in each of said windows in said progeny seed to determine the presence of said haplotypes; and (d) selecting progeny seed having a higher trait values identified for determined haplotypes in said progeny seed, thereby breeding a corn plant. In certain embodiments of these breeding methods, trait values are identified for at least two haplotypes in each adjacent genomic window over essentially the entirety of each chromosome. It is understood that haplotype regions are chromosome segments that persist over multiple generations of breeding and are carried by one or more breeding lines. These segments can be identified with multiple linked marker loci contained in the segments, and the common haplotype identity at these loci in two lines gives a high degree of confidence of the identity by descent of the entire subjacent chromosome segment carried by these lines. Such breeding methods require the use of multiple corn genomic polymorphisms that are distributed across the corn genome.

[0155] In aspects of this breeding method, trait values are identified for at least two haplotypes in each adjacent genomic window over essentially the entirety of each chromosome. In another useful aspect of the method progeny seed is selected for a higher trait value for yield for a haplotype in a genomic window of up to 10 centimorgans in each chromosome. In another aspect of the invention, the breeding method is directed to increased yield, where the trait value is for the yield trait, where trait values are ranked for haplotypes in each window, and where a progeny seed is selected which has a trait value for yield in a window that is higher than the mean trait value for yield in said window. In certain aspects of the breeding methods the haplotypes are defined using the polymorphisms identified in Table 1 or are defined as being in the set of molecular markers that comprises all of the DNA sequences of SEQ ID NO: 1 through SEQ ID NO:6552, or as being in linkage disequilibrium with one of those polymorphisms.

[0156] To facilitate breeding by this method it is useful to compute a value for each trait or a value for a combination of traits, e.g. a multiple trait index. The weight allocated to various traits in a multiple trait index can vary depending on the objectives of breeding. For instance, if yield is a key objective, the yield value may be weighted at 50 to 80%, maturity, lodging, plant height or disease resistance may be weighted at lower percentages in a multiple trait index.

[0157] Selected, non-limiting approaches for breeding the plants of the present invention are set forth below. A breeding program can be enhanced using marker assisted selection (MAS) on the progeny of any cross. It is understood that nucleic acid markers of the present invention can be used in a MAS (breeding) program. It is further understood that any commercial and non-commercial cultivars can be utilized in a breeding program. Factors such as, for example, emergence vigor, vegetative vigor, stress tolerance, disease resistance, branching, flowering, seed set, seed size, seed density, standability, and threshability etc. will generally dictate the choice.

[0158] For highly heritable traits, a choice of superior individual plants evaluated at a single location will be effective, whereas for traits with low heritability, selection should be based on mean values obtained from replicated evaluations of families of related plants. Popular selection methods commonly include pedigree selection, modified pedigree selection, mass selection, and recurrent selection. In a preferred aspect, a backcross or recurrent breeding program is undertaken.

[0159] The complexity of inheritance influences choice of the breeding method. Backcross breeding can be used to transfer one or a few favorable genes for a highly heritable trait into a desirable cultivar. This approach has been used extensively for breeding disease-resistant cultivars. Various recurrent selection techniques are used to improve quantitatively inherited traits controlled by numerous genes.

[0160] Breeding lines can be tested and compared to appropriate standards in environments representative of the commercial target area(s) for two or more generations. The best lines are candidates for new commercial cultivars; those still deficient in traits may be used as parents to produce new populations for further selection.

[0161] For hybrid crops, the development of new elite hybrids requires the development and selection of elite inbred lines, the crossing of these lines and selection of superior hybrid crosses. The hybrid seed can be produced by manual crosses between selected male-fertile parents or by using male sterility systems. Additional data on parental lines, as well as the phenotype of the hybrid, influence the breeder's decision whether to continue with the specific hybrid cross.

[0162] Pedigree breeding and recurrent selection breeding methods can be used to develop cultivars from breeding populations. Breeding programs combine desirable traits from two or more cultivars or various broad-based sources into breeding pools from which cultivars are developed by selfing and selection of desired phenotypes. New cultivars can be evaluated to determine which have commercial potential.

[0163] Backcross breeding has been used to transfer genes for a simply inherited, highly heritable trait into a desirable homozygous cultivar or inbred line, which is the recurrent parent. The source of the trait to be transferred is called the donor parent. After the initial cross, individuals possessing the phenotype of the donor parent are selected and repeatedly crossed (backcrossed) to the recurrent parent. The resulting plant is expected to have most attributes of the recurrent parent (e.g., cultivar) and, in addition, the desirable trait transferred from the donor parent.

[0164] The single-seed descent procedure in the strict sense refers to planting a segregating population, harvesting a sample of one seed per plant, and using the one-seed sample to plant the next generation. When the population has been advanced from the F₂ to the desired level of inbreeding, the plants from which lines are derived will each trace to different F₂ individuals. The number of plants in a population declines each generation due to failure of some seeds to germinate or some plants to produce at least one seed. As a result, not all of the F₂ plants originally sampled in the population will be represented by a progeny when generation advance is completed.

[0165] The doubled haploid (DH) approach achieves isogenic plants in a shorter time frame. DH plants provide an invaluable tool to plant breeders, particularly for generating inbred lines and quantitative genetics studies. For breeders, DH populations have been particularly useful in QTL mapping, cytoplasmic conversions, and trait introgression. Moreover, there is value in testing and evaluating homozygous lines for plant breeding programs. All of the genetic variance is among progeny in a breeding cross, which improves selection gain.

[0166] Most research and breeding applications rely on artificial methods of DH production. The initial step involves the haploidization of the plant which results in the production of a population comprising haploid seed. Non-homozygous lines are crossed with an inducer parent, resulting in the production of haploid seed. Seed that has a haploid embryo, but normal triploid endosperm, advances to the second stage. That is, haploid seed and plants are any plant with a haploid embryo, independent of the ploidy level of the endosperm.

[0167] After selecting haploid seeds from the population, the selected seeds undergo chromosome doubling to produce doubled haploid seeds. A spontaneous chromosome doubling in a cell lineage will lead to normal gamete production or the production of unreduced gametes from haploid cell lineages. Application of a chemical compound, such as colchicine, can be used to increase the rate of diploidization. Colchicine binds to tubulin and prevents its polymerization into microtubules, thus arresting mitosis at metaphase, can be used to increase the rate of diploidization, i.e. doubling of the chromosome number These chimeric plants are self-pollinated to produce diploid (doubled haploid) seed. This DH seed is cultivated and subsequently evaluated and used in hybrid testcross production. Descriptions of other breeding methods that are commonly used for different traits and crops can be found in one of several reference books (Allard, “Principles of Plant Breeding,” John Wiley & Sons, NY, U. of CA, Davis, Calif., 50-98, 1960; Simmonds, “Principles of crop improvement,” Longman, Inc., NY, 369-399, 1979; Sneep and Hendriksen, “Plant breeding perspectives,” Wageningen (ed), Center for Agricultural Publishing and Documentation, 1979; Fehr, In: Soybeans: Improvement, Production and Uses, 2nd Edition, Monograph., 16:249, 1987; Fehr, “Principles of variety development,” Theory and Technique, (Vol. 1) and Crop Species Soybean (Vol. 2), Iowa State Univ., Macmillan Pub. Co., NY, 360-376, 1987)

[0168] Methods of Genotyping with a Single Molecular Marker

[0169] Methods of genotyping with single molecular markers (e.g. corn genomic polymorphism) can also be used to associate a phenotypic trait to a genotype in corn plants. DNA or mRNA in tissue from at least two corn plants having allelic DNA is assayed to identify the presence or absence of the polymorphisms provided as a molecular markers by the present invention. Associations between the molecular markers and the phenotypic traits are identified where the marker is identified in Table 1 or Table 3. In another aspect traits are associated to genotypes in a segregating population of corn plants having allelic DNA in a specific locus of a chromosome which confers a phenotypic effect on a trait of interest and where the molecular marker is located either within or near this locus.

[0170] The methods of genotyping with single molecular markers (e.g. corn genomic polymorphism) can also be used to select a parent plant, a progeny plant or a tester plant for breeding. In this case, the polymorphism is genetically linked to a chromosomal region that confers one or more desirable phenotypic trait(s). Selection of parent, progeny or tester corn plants that contain the particular allelic state associated with the phenotypic trait(s) provides for accelerated and less costly breeding.

[0171] It is contemplated that certain corn genomic polymorphisms disclosed herein in Table 1 or Table 3 can be directly linked to a given phenotypic trait in that they include certain allelic states that alter a regulatory or coding sequence of a gene that confers the trait or contributes to expression of the trait. Such traits include yield, lodging, maturity, plant height, disease resistance, e.g. resistance to diplodia, gray leaf spot, gibberella, anthracnose, fusarium, and other ear and stalk rots, blights, rusts, bacterial diseases, insect diseases, and the like, abiotic stress tolerance, e.g., drought tolerance, cold tolerance, heat tolerance, storm tolerance, nutrient deficiency, and the like, and quality traits, e.g., enhanced starch content, enhanced oil content, decreased saturated fatty acid content, enhanced protein content, increased lysine content, and the like. When the corn genomic polymorphism is directly linked to the trait in this manner, it is extremely useful in corn breeding programs aimed at introducing that trait into many distinct corn genetic backgrounds.

[0172] Introgression of the genomic region associated with this single marker can be accelerated by using multiple markers to minimize linkage drag associated with genomic regions that may not confer agronomically elite properties. Introgression of the genomic region that is closely associated with this single marker can be accelerated by using multiple markers that immediately flank the single marker to minimize any linkage drag that is potentially associated with the closely associated genomic regions. Thus the use of a clustered set of 2, 5, 10 or 20 markers located with 10, 5, 2, or 1 cm of both the proximal and distal ends of a single marker can provide for introgression of the desired genomic region associated with the single marker while minimizing introgression of undesired immediate flanking regions. Introgression of the genomic region that is closely associated with this single marker can also be accelerated by using multiple markers that are distributed across the genome to minimize any linkage drag that is potentially associated with genomic regions located on distant regions of the same chromosome and on other chromosomes. This set of multiple markers may comprise 10 additional markers with at least one marker per chromosome arm. However, in preferred embodiments, the marker density is at least about 10 markers per chromosome arm, and more preferably at least about 100 markers per chromosome arm in order to efficiently discriminate between genomic regions from the donor and recipient parents. Use of multiple flanking markers that are either immediately linked to the single marker or are distributed across the genome can thus provide for maximum recovery of the recipient parent in selected progeny of a cross.

[0173] Methods of Genotyping with Sets of Corn Genomic DNA Polymorphisms

[0174] Genotyping methods that employ sets of nucleic acid molecules that can type multiple distinct polymorphisms are specifically contemplated herein. In such methods, a finite number of at least two corn genomic polymorphisms are typed. This finite number of corn genomic polymorphisms queried can comprise at least 2, 5, 10 or 20 distinct polymorphisms that are represented as 2, 5, 10, or 20 distinct SEQ ID NO in Tables 1 or 3. Such methods of genotyping necessarily require the use of sets of nucleic acid molecules that can type sets of corn genomic polymorphisms.

[0175] In certain applications, these methods of genotyping use a concentration of multiple molecular markers (i.e. corn genomic polymorphisms) in a given chromosomal interval. High density fingerprints used to establish and trace the identity of germplasm can be obtained by performing the genotyping methods that use multiple molecular markers that are concentrated or clustered in certain chromosomal intervals and/or around certain genetic loci that confer certain traits. High density fingerprint information is useful for assessing germplasm diversity, performing genetic quality assurance functions, mining rare alleles, assessing exotic germplasm pools, and evaluating genetic purity. These high density finger prints can be used to establish a database of marker-trait associations to benefit an overall crop breeding program. High density fingerprints can also be used to establish and protect germplasm ownership. Sets of markers that are clustered around a desired chromosome interval or genetic trait can be selected from the mapped corn polymorphisms provided in Table 3.

[0176] These methods of genotyping with multiple molecular markers can also be used to associate a phenotypic trait to a genotype in corn plants. DNA or mRNA in tissue from at least two corn plants having allelic DNA is assayed to identify the presence or absence of a set of finite series of polymorphisms provided as molecular markers by the present invention. Associations between the set of molecular markers and set of phenotypic traits are identified where the set of molecular markers comprises at least 2, at least 5, or at least 10, molecular markers linked to a polymorphic locus of the invention, e.g. at least 10 molecular markers linked to mapped polymorphisms, e.g. as identified in Table 3. In a more preferred aspect traits are associated to genotypes in a segregating population of corn plants having allelic DNA in loci of a chromosome which confers a phenotypic effect on a trait of interest and where a molecular marker is located in such loci and where the degree of association among the molecular markers and between the polymorphisms and the traits permits determination of a linear order of the polymorphism and the trait loci. In such methods at least 5 molecular markers are linked to loci permitting disequilibrium mapping of the loci.

[0177] Still other applications, these methods of genotyping use molecular markers that are distributed across the genome of corn. In these methods, the molecular marker can either be spread across a single chromosome, located on multiple chromosomes, located on all chromosomes or be located on each arm of each chromosome. In one specific embodiment, at least 1 of the molecular markers that is used in the genotyping method using a plurality of markers maps to each chromosome arm of all of the 10 corn chromosomes, thus necessitating the typing of at least 20 corn genomic DNA polymorphisms. However, other embodiments of this method where at least 10 corn genomic DNA polymorphisms map to each chromosome arm, thus necessitating the typing of at least 200 corn genomic DNA polymorphisms, are also contemplated. Similarly, still other embodiments that entail typing of at least 20 corn genomic DNA polymorphisms on each chromosomal arm (necessitating the typing of at least 400 polymorphisms) or typing of at least 50 corn genomic DNA polymorphisms on each chromosomal arm (necessitating the typing of at least 1,000 polymorphisms) are also contemplated. Sets of markers that are distributed across the genome of corn can be selected from the mapped corn polymorphisms provided in Table 3 for use in these methods.

[0178] Methods of genotyping that use molecular markers that are distributed across the genome of corn can be used in a variety of applications. In one application, the methods of genotyping are used to select a parent plant, a progeny plant or a tester plant for breeding. A variety of applications of these genotyping methods to corn breeding programs are contemplated. These genotyping methods can be used to facilitate introgression of one or more traits, genomic loci, and/or transgene insertions from one genetic background to a distinct genetic background. In general, the set of selected markers in progeny plants from out-crossed populations is queried to identify and select individual progeny that contain the desired traits, genomic loci, and/or transgene insertions yet comprises as many alleles from the distinct genetic background from the outcross as possible. Such methods can accelerate introgression of the desired traits, genomic loci, and/or transgene insertions into a new genetic background by several generations.

[0179] These methods also provide for screening of traits by interrogating a collection of molecular markers, such as SNPs, at an average density of less than about 10 cM on a genetic map of corn. The presence or absence of a molecular marker linked to a polymorphic locus of Table 1 or Table 3 can be analyzed in the context of one or more phenotypic traits in order to identify one or more specific molecular marker alleles at one or more genomic regions that are associated with one or more of said traits. In another aspect of the invention the molecular markers are used to identify haplotypes which are allelic segments of genomic DNA characterized by at least two polymorphisms in linkage disequilibrium and wherein said polymorphisms are in a genomic windows of not more than 10 centimorgans in length, e.g. not more than about 8 centimorgans or smaller windows, e.g. in the range of say 1 to 5 centimorgans. In certain embodiments of these methods, set of such molecular markers to identify a plurality of haplotypes in a series of adjacent genomic windows in each corn chromosome, e.g. providing essentially full genome coverage with such windows. With a sufficiently large and diverse breeding population of corn, it is possible to identify a high quantity of haplotypes in each window, thus providing allelic DNA that can be associated with one or more traits to allow focused marker assisted breeding. Thus, an aspect of the corn analysis of this invention further comprises the steps of characterizing one or more traits for said population of corn plants and associating said traits with said allelic SNP or Indel polymorphisms, preferably organized to define haplotypes. Such traits include yield, lodging, maturity, plant height, disease resistance, e.g. resistance to diplodia, gray leaf spot, gibberella, anthracnose, fusarium, and other ear and stalk rots, blights, rusts, bacterial diseases, insect diseases, and the like, abiotic stress tolerance, e.g., drought tolerance, cold tolerance, heat tolerance, storm tolerance, nutrient deficiency, and the like, and quality traits, e.g., enhanced starch content, enhanced oil content, decreased saturated fatty acid content, enhanced protein content, increased lysine content, and the like.

### EXAMPLES

[0180] The following examples are included to demonstrate preferred embodiments of the invention. It should be appreciated by those of skill in the art that the techniques disclosed in the examples which follow represent techniques discovered by the inventor to function well in the practice of the invention, and thus can be considered to constitute preferred modes for its practice. However, those of skill in the art should, in light of the present disclosure, appreciate that many changes can be made in the specific embodiments which are disclosed and still obtain a like or similar result without departing from the concept, spirit and scope of the invention. More specifically, it will be apparent that certain agents which are both chemically and physiologically related may be substituted for the agents described herein while the same or similar results would be achieved. All such similar substitutes and modifications apparent to those skilled in the art are deemed to be within the spirit, scope and concept of the invention as defined by the appended claims.

### Example 1

[0181] This example illustrates the preparation of reduced representation libraries using enzymes which are sensitive to methylated cytosine residues in order to enrich for unique/coding-sequence genomic DNA.

[0182] Genomic DNA extraction methods are well known in the art. A preferred method which maximizes both yield and convenience is to extract DNA using “Plant DNAzol Reagent” from Life Technologies (Grand Island, N.Y.). Briefly, frozen leaf tissue is ground in liquid nitrogen in a mortar and pestle. The ground tissue is then extracted with DNAzol reagent. This removes cellular proteins, cell wall material and other debris. Following extraction with this reagent, the DNA is precipitated, washed, resuspended, and treated with RNAse to remove RNA. The DNA is precipitated again, and resuspended in a suitable volume of TE (so that concentration is 1 μg/μl). The genomic DNA is ready to use in library construction.

[0183] Genomic DNA from two corn lines which are to be compared for polymorphism detection are digested separately with Pst I restriction endonuclease which provides the ends of the DNA fragments with sticky ends which can ligate into a plasmid with the same restriction site. For instance, 100 units of Pst I is added to 20 μg of DNA and incubated at 37° C. for 8 hours. The digested DNA product is separated by electrophoresis on a 1% low-melting-temperature-agarose gel to separate the DNA fragments by size. The digested DNA from the two corn lines is loaded side by side on the gel (with one lane in between as a spacer). Both a 1-KB DNA ladder marker and a 100-bp DNA ladder marker are loaded on each side of the two corn DNA lanes. These markers act as a guide for size fractionation of the digested corn DNA. Fragments in the range of 500 to 3000 bp are excised incrementally from the gel in size fractions of 500-600 bp, 600-700 bp, 700-800 bp, 800-900 bp, 900-1100 bp, 1100-1500 bp, 1500-2000 bp, 2000-2500 bp and 2500-3000 bp. DNA in each fraction is purified using β-agarase and ligated into the Pst I cloning site of pUC 18. The plasmid ligation products are transformed by electroporation into DH10B E. coli bacterial hosts to produce reduced representation libraries. For instance, about 500 ng of the size-selected DNA is ligated to 50 ng dephosphorylated pUC18 vector.

[0184] Transformation is carried out by electroporation and the transformation efficiency for reduced representation Pst I libraries is approximately 50,000-300,000 transformants from one microliter of ligation product or 1000 to 6000 transformants/ng DNA.

[0185] Basic tests to evaluate the quality include the average insert size, chloroplast/mitochondrial DNA content, and the fraction of repetitive sequence.

[0186] The determination of the average insert size of the library is assessed during library construction. Every ligation is tested to determine the average insert size by assaying 10-20 clones per ligation. DNA is isolated from recombinant clones using a standard mini preparation protocol, digested with Pst I to free the insert from the vector and then sized using 1% agarose gel electrophoresis (Maule, Molecular Biotechnology 9:107-126 (1998), the entirety of which is herein incorporated by reference).

[0187] The chloroplast/mitochondrial DNA content, and the percentage of repetitive sequence in the library is estimated by sequencing a small sample of clones (400), and cross checking the sequence obtained against various sequence databases. Some repetitive elements are not present in the databases, but can nevertheless often be identified by the large number of copies of the same sequence. For instance, after sequencing a set of 400 clones any sequence that is not filtered by the repetitive element database, but yet is present more than 10 times in the sample is considered a repetitive element.

[0188] Corn reduced representation libraries of the present invention are constructed by inserting coding region enriched DNA obtained from the following corn lines: 011NL1, 7051, 5750, 171NI20, LH185, 7797, WDHQ11, LH172, 5CM1, LH82, B73, and MO17.

### Example 2

[0189] This example illustrates the determination of corn genomic DNA sequence from clones in reduced representation libraries prepared in Example 1. Two basic methods can be used for DNA sequencing, the chain termination method of Sanger et al., Proc. Natl. Acad. Sci. USA 74:5463-5467 (1977) and the chemical degradation method of Maxam and Gilbert, Proc. Natl. Acad. Sci. USA 74:560-564 (1977). Automation and advances in technology such as the replacement of radioisotopes with fluorescence-based sequencing have reduced the effort required to sequence DNA (Craxton, Methods, 2:20-26 (1991), Ju et al., Proc. Natl. Acad. Sci. USA 92:4347-4351 (1995) and Tabor and Richardson, Proc. Natl. Acad. Sci. USA 92:6339-6343 (1995). Automated sequencers are available from, for example, Applied Biosystems, Foster City, Calif. (ABI Prism® systems); Pharmacia Biotech, Inc., Piscataway, N.J. (Pharmacia ALF), LI-COR, Inc., Lincoln, Nebr. (LI-COR 4,000) and Millipore, Bedford, Mass. (Millipore Base Station).

[0190] Sequence base calling from trace files and quality scores are assigned by PHRED which is available from CodonCode Corporation, Dedham, Mass. and is described by Brent Ewing, et al. “Base-calling of automated sequencer traces using phred”, 1998, Genome Research, Vol. 8, pages 175-185 and 186-194, incorporated herein by reference.

[0191] After the base calling is completed, sequence quality is improved by cutting poor quality end sequence. If the resulting sequence is less than 50 bp, it is deleted. Sequence with an overall quality of less than 12.5 is deleted. And, contaminating sequence, e.g. E. coli BAC and vector sequences and sub-cloning vector, are removed. Contigs are assembled using Pangea Clustering and Alignment Tools which is available from DoubleTwist Inc., Oakland, Calif. by comparing pairs of sequences for overlapping bases. The overlap is determined using the following high stringency parameters: word size=8; window size=60; and identity is 93%. The clusters are reassembled using PHRAP fragment assembly program which is available from CodonCode Corporation using a “repeat stringency” parameter of 0.5 or lower. The final assembly output contains a collection of sequences including contig sequences which represent the consensus sequence of overlapping clustered sequences (contigs) and singleton sequences which are not present in any cluster of related sequences (singletons). Collectively, the contigs and singletons resulting from a DNA assembly are referred to as islands.

### Example 3

[0192] This example illustrates identification of SNP and Indel polymorphisms by comparing alignments of the sequences of contigs and singletons from at least two separate corn lines as prepared as in example 2. Sequence from multiple corn lines is assembled to into loci having one or more polymorphisms, i.e. SNPs and/or Indels. Candidate polymorphisms are qualified by the following parameters:

[0193] The minimum length of a contig or singleton for a consensus alignment is 200 bases.

[0194] The percentage identity of observed bases in a region of 15 bases on each side of a candidate SNP, is 75%.

[0195] The minimum BLAST quality in each contig at a polymorphism site is 35.

[0196] The minimum BLAST quality in a region of 15 bases on each side of the polymorphism site is 20.

[0197] A plurality of loci having qualified polymorphisms are identified as having consensus sequence as reported as SEQ ID NO: 1 through SEQ ID NO: 6552. The qualified SNP and Indel polymorphisms in each locus are identified in Table 1. More particularly, Table 1 identifies the type and location of the polymorphisms as follows:

[0198] SEQ_NUM refers to the SEQ ID NO. (sequence ID number) of the polymorphic corn DNA locus.

[0199] CONSEQ_ID refers to an arbitrary identifying name for the polymorphic corn DNA locus.

[0200] MUTATION_ID refers to an arbitrary identifying name for each polymorphism.

[0201] START_POS refers to the position in the nucleotide sequence of the polymorphic corn DNA locus where the polymorphism begins.

[0202] END_POS refers to the position in the nucleotide sequence of the polymorphic corn DNA locus where the polymorphism ends; for SNPs the START_POS and END_POS are common.

[0203] TYPE refers to the identification of the polymorphism as an SNP or IND (Indel).

[0204] ALLELE and STRAIN refers to the nucleotide sequence of a polymorphism in a specific allelic corn variety.

### Example 4

[0205] This example illustrates the use of primer base extension for detecting a SNP polymorphism.

[0206] A small quantity of corn genomic DNA (e.g. about 10 ng) is amplified using the forward and reverse PCR primers which are designed to have an annealing temperature of 55° C. to the template, i.e., around a polymorphism of a particular molecular marker. The PCR product is added to a new plate in which the extension primer is covalently bound to the surface of the reaction wells in a GBA plate. Extension mix containing DNA polymerase, the two differentially labeled ddNTPs, and extension buffer is added. The GBA plate is incubated at 42° C. for 15 min to allow extension. The reaction mix is removed from the wells by washing with a suitable buffer. The two labels are detected by sequential incubation with primary and secondary detection reagents for each of the labels. Incorporation of a specific ddNTP-FITC is measured by incubation with HRP-anti-FITC, followed by washing the wells, followed by incubation in a buffer containing a chromogenic substrate for HRP. The extent of the reaction is determined spectrophotometrically for each well at the wavelength appropriate for the product of the HRP reaction. The wells are washed again, and the procedure is repeated with AP-streptavidin, followed by a chromogenic substrate for AP, and spectrophotometry at the wavelength appropriate for the AP reaction product.

[0207] Analysis of Results

[0208] The extent of incorporation of each labeled ddNTP is inferred from the absorbance measured for the reaction products of the detection steps specific label, and the genotype of the sample is inferred from the ratios of these absorbances as compared to a standard of known genotype and a no-template control reactions. In the most common practice, the absorbances observed for each data point are plotted against each other in a scatter plot, producing an “allelogram”. A successful genotyping assay using the single base extension assay of this example provides an allelogram as illustrated in FIG. 2 where the data points are grouped into four clusters: Homozygote 1 (e.g., the A allele), homozygote 2 (e.g., the G allele), heterozygotes (each sample containing both alleles), and a “no signal” cluster resulting from no-template controls, or failed amplification or detection.

### Example 5

[0209] This example illustrates the use of a labeled probe degradation assay for detecting a SNP polymorphism. A quantity of corn genomic template DNA (e.g. about 2-20 ng) is mixed in 5 ul total volume with four oligonucleotides, as described in Table 2, i.e. forward primer, reverse primer, hybridization probe having a VIC reporter attached to the 5′ end and hybridization probe having a FAM reporter attached to the 5′ end as well as PCR reaction buffer containing the passive reference dye ROX. The PCR reaction is conducted for 35 cycles using a 60° C. annealing-extension temperature. Following the reaction, the fluorescence of each fluorophore as well as that of the passive reference is determined in a fluorimeter. The fluorescence value for each fluorophore is normalized to the fluorescence value of the passive reference. The normalized values are plotted against each other for each sample to produce an allelogram. A successful genotyping assay using the primers and hybridization probes of this example provides an allelogram with data points in clearly separable clusters as illustrated in FIG. 2.

TABLE 2
Examples of molecular marker assays using labeled probe degradation
detection of SNP polymorphisms. Each assay provides two oligonucleotides primers, to amplify
the region spanning the polymorphism, and two oligonucleotides probes, which have fluorogenic
reporter molecules attached for SNP allele detection. Useful reporter dyes include, but are not
limited to, 6-carboxy-4,7,2′,7′-tetrachlorofluorecein (TET), 2′-chloro-7′-phenyl-1,4-dichloro-6-
carboxyfluorescein (VIC) and 6-carboxyfluorescein phosphoramidite (FAM). A useful quencher
is 6-carboxy-N,N,N′,N′-tetramethylrhodamine (TAMRA).

| | | PRIMER | | | |
|---|---|---|---|---|---|
| Marker | CONSEQ_ | SEQ ID | Sequence | | |
| SEQ ID | ID | NO: | type | Sequence | Allele |
| 381 | 20030484- | SEQ ID | Forward | CGTCGCAAGAGTCAAGGATATTA | |
| | CON.1 | NO: 6553 | Primer | CA | |
| 381 | 20030484- | SEQ ID | Probe 1 | AAAAGGTGTCAATATCGTCT | A |
| | CON.1 | NO: 6554 | | | |
| 381 | 20030484- | SEQ ID | Probe 2 | AAGGTGTCAATGTCGTCT | G |
| | CON.1 | NO: 6555 | | | |
| 381 | 20030484- | SEQ ID | Reverse | CGAGCAGTGGACGACAACA | |
| | CON.1 | NO: 6556 | Primer | | |
| 346 | 20030439- | SEQ ID | Forward | CGGAGTCGTCGTTGGCAAATA | |
| | CON.1 | NO: 6557 | Primer | | |
| 346 | 20030439- | SEQ ID | Probe 1 | AAATCATCAGATCGTTTTT | A |
| | CON.1 | NO: 6558 | | | |
| 346 | 20030439- | SEQ ID | Probe 2 | CATCAGCTCGTTTTT | C |
| | CON.1 | NO: 6559 | | | |
| 346 | 20030439- | SEQ ID | Reverse | ACTAGGCGTCCAGTTCAGATTTT | |
| | CON.1 | NO: 6560 | Primer | G | |
| 708 | 20031563- | SEQ ID | Forward | TGGCTTTATTTTTCGATACTGAAG | |
| | CON.1 | NO: 6561 | Primer | ATCCT | |
| 708 | 20031563- | SEQ ID | Probe 1 | CAATGTTCTTCAATCCATAC | A |
| | CON.1 | NO: 6562 | | | |
| 708 | 20031563- | SEQ ID | Probe 2 | CAATGTTCTTCAGTCCATAC | G |
| | CON.1 | NO: 6563 | | | |
| 708 | 20031563- | SEQ ID | Reverse | GGGTGATGAGAGGAATTAGAGCA | |
| | CON.1 | NO: 6564 | Primer | AA | |
| 134 | 20030159- | SEQ ID | Forward | CTTCATGGCAACATTAGCTGTGT | |
| | CON.1 | NO: 6565 | Primer | TT | |
| 134 | 20030159- | SEQ ID | Probe 1 | CAAGATGTTTATGAAAGCG | A |
| | CON.1 | NO: 6566 | | | |
| 134 | 20030159- | SEQ ID | Probe 2 | CAAGATGTTTATGAGAGCG | G |
| | CON.1 | NO: 6567 | | | |
| 134 | 20030159- | SEQ ID | Reverse | GCCTGCCCATTAGGCTGAAA | |
| | CON.1 | NO: 6568 | Primer | | |

[0210] To confirm that an assay produces accurate results, each new assay is performed on a number of replicates of samples of known genotypic identity representing each of the three possible genotypes, i.e. two homozygous alleles and a heterozygous sample. To be a valid and useful assay, it must produce clearly separable clusters of data points, such that one of the three genotypes can be assigned for at least 90% of the data points, and the assignment is observed to be correct for at least 98% of the data points. Subsequent to this validation step, the assay is applied to progeny of a cross between two highly inbred individuals to obtain segregation data, which are then used to calculate a genetic map position for the polymorphic locus.

### Example 6

[0211] This example illustrates the genetic mapping of molecular markers in loci of this invention based on the genotypes of over 6000 SNPs for 274 intermated recombinant inbred lines (IRIS) originating from the cross of corn lines B73 and Mo17. The genotypes are combined with genotypes for 1320 public core SSR and RFLP markers scored on the IRIs. Before mapping, any loci showing distorted segregation (P<1e-5 for a Chi-square test of a 1:1 segregation ratio) are removed. A low alpha-level is used to account for the multiple-testing problem.

[0212] In one aspect, a map can be constructed using the JoinMap version 2.0 software which is described by Stam, P. “Construction of integrated genetic linkage maps by means of a new computer package: JoinMap, The Plant Journal, 3: 739-744 (1993); Stam, P. and van Ooijen, J. W. “JoinMap version 2.0: Software for the calculation of genetic linkage maps (1995) CPRO-DLO, Wageningen. JoinMap implements a weighted-least squares approach to multipoint mapping in which information from all pairs of linked loci (adjacent or not) is incorporated. Linkage groups are formed using a LOD threshold of 5.0. The SSR and RFLP public markers are used to assign linkage groups to chromosomes. Linkage groups are merged within chromosomes before map construction.

[0213] Other approaches to mapping high density markers are known in the art; see, for example, Winkler et al. (Genetics 164:741-745 (2003)), for the utility of IRIs for higher resolution mapping. See also, Jansen et al. (Theor Appl Genet. 102:1113-1122 (2001)). In many conditions, the approach of Jansen et al. yields a close approximation to a maximum-likelihood map. Further, a map estimated by this approach agrees quite closely with the map obtained using JoinMap 2.0. In addition, combinations of methods described above and incorporated herein by reference may be used to best leverage marker data under a range of population structure as well as computational constraints.

[0214] In another aspect of the present invention, Kosambi's mapping function is used to convert recombination fractions to map distances. Mapped SNP molecular markers are identified in Table 3 where “Chromosome” and “Position” identify the distance measured in cM from the 5′ end of a corn chromosome for the SNP identified by “Conseq_ID”. “Public Name” provides the published name of reference public markers which are not part of this invention. For certain of the mapped polymorphic markers listed in Table 3, the Mutation ID is listed more than once which indicates that the mapping was conducted based on multiple genotyping assays. The map locations for multiple genotyping assays generally serve to confirm map location except in the case where map locations are divergent, e.g. due to error in the design or practice of an assay. The density and distribution of the mapped molecular markers is shown in FIG. 1.

### Example 7

[0215] This example illustrates methods of the invention using molecular markers disclosed in Table 1 and in the DNA sequences of SEQ ID NO:1-6552.

[0216] A breeding population of corn with diverse heritage is analyzed using primer pairs and probe pairs prepared as indicated in Example 5 for each of the molecular markers identified in Table 1 based on sequences of SEQ ID NO:1-6552. Closely linked molecular markers are identified as characterizing haplotypes within adjacent genomic windows of about 10 centimorgans across the corn genome. Haplotypes representing at least 4% of the population are associated with trait values identified for each member of the corn population including the trait values for yield, maturity, lodging, plant height, rust resistance, drought tolerance and cold germination. The trait values for each haplotype are ranked in each 10 centimorgan window. Progeny seed from randomly-mated members of the population are analyzed for the identity of haplotypes in each window. Progeny seed are selected for planting based on high trait values for haplotypes identified in said seeds.

### Example 8

[0217] This example illustrates the identification of polymorphisms that are useful for obtaining a parent plant, a progeny plant or a tester plant for breeding with a preferred trait. In this particular example, polymorphisms have been selected for usefulness in identifying plants with a preferred yield trait for illustrative purposes. However, it is also anticipated that other markers useful for identifying other preferred traits can be identified in a similar manner (i.e. by noting the location of a polymorphism's genetic map position within a haplotype window). It is further anticipated that the specific markers disclosed in this Example may also find other uses in addition to serving as markers for yield traits.

[0218] First, haplotype windows associated with yield were identified as disclosed in U.S. Patent Application Ser. No. 60/837,864. The map positions disclosed in Table 3 were used to identify markers of the present invention that are located in the haplotype window(s) comprising the preferred haplotypes for yield and that can be used as markers for these regions. 25 polymorphisms coinciding with 13 haplotype windows that comprise the top 13 haplotypes in Monsanto corn germplasm for yield were selected. Two (2) markers are thus provided for most of these yield haplotype windows. The specific markers that can be used to identify plants for breeding with the preferred yield trait can be selected from the group consisting of SEQ ID NO: 5407, 287, 574, 3407, 5367, 4566, 2457, 5295, 4548, 5182, 5489, 2714, 2726, 375, 275, 1415, 885, 2067, 4773, 1708, 1479, 3507, 2765, and 1279, and SEQ ID NO: 2468.

[0219] In view of the foregoing, it will be seen that the several advantages of the invention are achieved and attained.

[0220] The embodiments were chosen and described in order to best explain the principles of the invention and its practical application to thereby enable others skilled in the art to best utilize the invention in various embodiments and with various modifications as are suited to the particular use contemplated.

[0221] Various patent and non-patent publications are cited herein, the disclosures of each of which are incorporated herein by reference in their entireties.

[0222] As various modifications could be made in the constructions and methods herein described and illustrated without departing from the scope of the invention, it is intended that all matter contained in the foregoing description or shown in the accompanying drawings shall be interpreted as illustrative rather than limiting. The breadth and scope of the present invention should not be limited by any of the above-described exemplary embodiments, but should be defined only in accordance with the following claims appended hereto and their equivalents.

The application's sequence listing, which the Patent Office published only in electronic form, follows.

SEQUENCE LISTING (7268 sequences)

SEQ ID NO: 1 - DNA, 593 bp, Zea mays
tgggcctccatctctgcccgcacttccaaagtcttcgatttgttcctggtgttgctgctgctgtcccaagaaaaaggttgaaagaagtgagagggaaatcaacagagactctcggcgagaagacctcgagtctgccatttttaaccttcgcgaaattgacagtaagtgcacggatgtggtctgtcaaaagttctaacctgaaagaataatagcgtgttcattacactatggttgtttttcagactacgatgagtacgagaggtccatgctcatctctcagatgagcttcgagaagtcttttgggctgtcctcggtctttattgaatcgacccttatggagaatgggggcgtccctgaatctgcaaacccatctaccctaattaaagaagccattcatgtcattagctgtggatatgaagagaaaactgaatggggaaaagaggtgtccattcttgaccttcattatctttgtataacaccagatacatgccttgatgataccagatacttttcccctgttcatggggcctgacttcttgtttcgttttttcttaaattcccttcagattggctggatctatggttcagttaca

SEQ ID NO: 2 - DNA, 344 bp, Zea mays
gcagctctcccggctcggtcgcttcgccacctccgtcctccccccgcgctcggtcgctcgccacctgctctcccctccctccacgttgctcgcgcccgcgcttatataaggtacgccgcctcgactctccaaacccctccgcgtgggcctaaggtccggcgcgccgagatggagctgatggatctagggtttcggttgcggcggcggtcctgtagtgcaggaggagctcatggcggacgctccggcgagccctgggggcggaggcgggagccacgagagcgggagccccaggggcggcggaggtggaggcggtggcagcgtcagggagcaggacaggttcctga

SEQ ID NO: 3 - DNA, 735 bp, Zea mays
cgaggagtacgtcgagcctctcaagatttacctacaaaagtacaaagaggtcattgatggcttaccctcactgtgttgtagatgtggatcttctctgtttatattataatgtttcgtacatctctctcatggtgtttctttatgccctttgcatgttctcttctgatgacgggctggttattacagatggaggtatgcaatctacatgcttttatttattttttctgtcagaacaacacttatttgactttgctttggctgaaccgtagaagtttacagtgtacacaacctaatcagtttattgacctatagtaccttagtcagaaaacatagagcacttgacaggaaatacacacaatcagctttggaagctgcaaactagtatgtattaaataacctgaacaagactgctagttctaagaaacattgcatacatgatctcgttttttcttccataattgactgttgttgtttggctgcacaacctaccaatcatagcaagctcctgggtaactaatgtggtagctgtgaacaagttaatactgtcatgtactgtttgcacagccaggcccaggatgcaactgaatactgatcacaatttttttttggaaaattttcgtagggtgatagcaagctgtctacaaaggctggcgagggctctgtaaagaaggatgcaattagtccccatggtggcaccagtagctcaagtaatcaggttagttttttttcatatgt

SEQ ID NO: 4 - DNA, 946 bp, Zea mays
  misc_feature (890)..(894): n is a, c, g, or t
gactgagactcgaattacgtactacactagcatcatttcatggcatttaatcaggtgtccgaattgctctttttctaggtggattcgacacggcgcaggccgctgcgaggttcatagatttcttcttcctcgcgcgcatctgttccattatcttctcgtcttatcttatatatctatctatctatgaatctatctgcagggcctacgaccaagccgcgatcaagttccgcggcctgaacgcggacatcaacttcaccctggacgactacaaggacgagatgaagaaggtgattccccccctgttgcaattgcgaatcgaacgaccaacaccggtagaagaaggagcccacacacaccgccatgaatggagtgtgaatagaacaaattaagaacactgcagctgctctgttcatcgactaataataacgtctctctcttagtctctttcactgtttgatgcctggattcttgtcttcctgccgtgtgccgcgtcaaatccctcagatgaaggacttgagcaaggaggagttcgtgctggtgctccggcggcagggcgccggcttcgtcaggggcagctccaggttccggggagtcacccagcacaagtgcggcaagtgggaggccaggatcggccagctcatgggcaagaagtaattaattagtcaatgctgaatcggaaaaaaacaaaacaacgattagtgccgatttttttgttttatttttatttttggcttgatggttgatctcctttgttcttgtcgctgctgcaggtatgtgtacctgggcctgtatgacacagagacggaggctgcccagtaagtgacgcgtcctctgtgcttctgttacgcgccattgaacaacatgtgacaactttgtggtttcgtgccatnnnnncatgctaatcagggcatatgacaaggctgccatcaagtgctacggcaaggag

SEQ ID NO: 5 - DNA, 1035 bp, Zea mays
  misc_feature (516)..(516): n is a, c, g, or t
  misc_feature (1007)..(1009): n is a, c, g, or t
tagatagagtagcaacggcaacagaataattaagcatggcctccttacagctcatgcgtgcggcacaaacattagatagctagcccccctgtcttcagtacttcagacacctggaaccattagtctttatagctaggccgtggggtgtgaaatggaagcgagataccggtggctagccgagccggtacagcccgccgtcgttgatgaagtggccgtccatgtagaaggcattggtggtgtggtacccatccatcatcaggtggtgcatctcctcggatggcttccagtgccgcttccgctggttgatgaaccagttgttgatctgcttcaggtcaagcccggtagactcagccagtgccaccttctgagtctcctgctcaccgatgggaagagttggttaattcatatccagtagggaagcacaggctatatgccgtatacaaaacatccaacaaaatgaagatatgataaaaaaaaagttcagtgtatgctcctggactcaatgtttttttttcncttagaaccctaaacttgaaaattacaaatttgaatctgcgcttatgagtatcaacacacaattcagggcactatgattttctgtttcagccatgtaagtgaaaccattgtagactcttcaatttgtatatcagaaaaggcttcatttttcaccagataaatatatagttgcttaaattaaaatcaatggtatttagtaagaacgctacagaagtttcaaaataccttaaataaggttaaattaataccaataatcacctgccactccctgatcaatattattagactctgacatattttggctcactttttatatgccgatatgcaaatcagagatcaacagaccgtcatggaagatcaaagacccatatgtagcttagatttgccaaatgtgatttatgtatatatatacttacccttgaattacaatgtgcagtcagtactaacattgggtagctggctatgaaaagttcatgaagaattggcatcgnnnaaatcatgtgtcaccaacaatagtta

SEQ ID NO: 6 - DNA, 621 bp, Zea mays
  misc_feature (408)..(408): n is a, c, g, or t
gaagaatgctccatctatcattttcattgatgaaattgattccattgcacccaagagagaaaagaccaatggagaagtagaacgtcgtattgtttcacagctactgactcttatggatggactcaaatctcgttcccatgttattgttatgggtgctacaaaccggccaaacagcatcgatcctgctcttagaagatttggaaggtttgaccgggaaattgacattggagttcctgatgaagttggccggcttgaggttctccgtattcacactaagaacatgaagctagctgaagatgtaagtgtctataatttattcttgatgcattgcacttcacactgattagaatatggtttctgtcttctcttctagcgtctcgtgatgtccattctctgaaatttccaggntaatttggaactcatttcaaaggatacccatggatacgttggtgctgatcttgctgctctttgtactgaggctgctcttcagtgcattcgtgagaagatggacatcatagatcttgaggatgagacaatagatgcagagatattgaactcgatggctgttacaaatgaccatttcaagactgcgcttggaacaagcaacccatctgctctccg

SEQ ID NO: 7 - DNA, 603 bp, Zea mays
gaatgctccgggcaacatcttggcggcaggcgggctgggtcccttgtggctcgtcgacattgccaacatgtgcctcatcctccacctgatcggtgcataccaggtcagcagcagcacgtctcagatcgatcagctggtgagctcagatcagctccgtatagcttaagctaaagctaataattaatacctgaacggcagcaggtatacgctcagcctgtcttcgcttcggttgagaggtgggccgcctcacggtggccagaagccaagttcatgagcagcgcatacaccgtgagcatccccctcttgcagagaggatcggtcaccgtcgcgccgcacaagctcgtcctgaggaccgtcatagtcggcgcgacgactgcggtggcgctggcgatacccttcttcaacgccgtgctggggctcctcggcgcgttcagcttctggccgctcacggtctacttccccatcagcatgcacatcgcccagggcaagatcgccagggggaccaagtggtggtgccttctgcaggctctgagcatggtttgcttggtgatctcggtggccgtgggtgtaggctctgtcactgacattgtcgatagcctcaag

SEQ ID NO: 8 - DNA, 584 bp, Zea mays
tgggacagccaggcctgaaaaggtctgtacgggttggtgagacaggcttcagagaagttgctgcttacctcctcgactacggtcactttgcaaacgttcctcccaccatgctggtcaagataacacacaccatcttcaacgtgaacgactgtgttggctgcaaaagtaaagtgttctgcaacaaatcagaggctgtgagcaagattgcatcgctgcaggagttcattcctcatgatttcgacgccagtgaccatgggacctcaagcttccctgtatctgcagtgcataggattggcatccttgacattagaatcttcaacactgacaggcatgctggaaatcttctggtcaagaagcttggtcctggcgccgacaattttggagagcagacagaactcattcctattgaccatggtctctgtcttccagaatgcctagaagacccatacttcgagtggatccactggccgcaggcatctgtccccttctccgaggaggagcttgagtacattgcaagacttgatcctgtaaaagatgcagaaatgctacgcatggagctacccatgatacgagacgcatgtctc

SEQ ID NO: 9 - DNA, 364 bp, Zea mays
ggcgtcgtcagcgttgcaggagcaagcagagacaaggttagccagctggaagcgacctgggcgacgatgttccgcgactcttcgacgggcggcccattgggggaggttctggccaagaacagcagcaacgcggaagcaagaagttgcccgtcggcggcgccacctctaaccgactactactgctgggattcaggccacggcatgcagtcgtcccccgtgggagttctgcagaggacgaccgccttcggatcggtctccagcagcgcgggcagcagccctagggtcgagagccacggcgcctgctgcgatggtaccagcaacctgatggatgatgatctcggctcagttgtagtgagacatccca

SEQ ID NO: 10 - DNA, 753 bp, Zea mays
  misc_feature (76)..(76): n is a, c, g, or t
  misc_feature (215)..(217): n is a, c, g, or t
  misc_feature (736)..(740): n is a, c, g, or t
atccttgtctaccagaatgatcccatttctaaattttgtgcgccctttactttttgtttcctaggatgttcatcanatctgcccaagaagacaacaagaaggtgagaaagatttgttgcatttcaacaatgaaatctgttcttgttccaaatgcctgctgcttgtttatgatgttgtctgatttgttatgttgtgatgcatattgcagtatcctnnnctccagttggagttcctggggagctacctttctgagctgagcttgctggattatggcttgattcgctccttgccgtcacttgttgcagcctcagccgtctttgttgcaaggctgaccctggatccacacacccatccctgggtataatctcgatctgtttgatctctatacattcctgtctcatcaaatacaaaccaccaactcattttgttatgaacgggttgcagagcaagaagatgcaaacgctaacaggctataagccatctgagttgaaggactgtgttgctgccatacataatttgcagctcaaccggacatgtcaatccatggtggcgatccgggagaaatacaggcaacaccgagtaagcttgggctttgacagctgtacatggttgttagattgtttgcataactctagtgtactaactgtggaaaaatctttgaacagttcaagggtgtatcagctttgctacctcctgttgagatccctgcatcatacttcaatacactgaaggagtnnnnnttccttgataatc

SEQ ID NO: 11 - DNA, 782 bp, Zea mays
gctgctcgcttgtaatatgaggaggtatctgttccagttgttgaggaccttgtgctgatatctgaccgtgcctacacaaaagggcaaattttagaaatggtaatcccactaaatgcaatttgcactcatactgaatgcatgcctggttctttaatactgcattatctaaacgtacaatgatcatagattaggatccatgtatgctacatcagcatacagcagatatggatcttttgctgaaaaattgcaattatgtcctttatacataagtggaacgtgtcaattgtaatctttcggatgatttctccctgttttgctgtcttcttgcatgctatctttttttatacccttgcatgctgtcttctccttgttctgcaattgtatccttgcatggtgtctttttactttacagtgattttttggctaagcgttaaatcttctgattgagcaggaaaagttgattctgaacacgctgcagttcaacatgtctgttccaacaccttatgtcttcatgaagaggtttctgaaagctgcagatgcagataaacaggtgaaatatcactacactagctcaagctcaagatgcagatgatccgtgttttgtctacttggataaacaaaacacctgtagcagtgatcttttggttttatgattgacactgccccactgttgtatctcgcagcttgagctagcgtcatttttcatgctggagctctgcttggtagaataccaaatgctgaattatcggccttcgcatctggctgctgctgcggtttatact

SEQ ID NO: 12 - DNA, 405 bp, Zea mays
gctgtgtgctgtgagcgcgggcgcgcgcgagtgtggagagaagggagggaattcccccctttctgttcggcgccgtgctcgcgcgcacgcacccgcacgccccacgctgcacgcggccttttcctccgccttgctgctgcaagtccgcaaccactggaggaaaaatcttttccttcacttttcttccctttccccccgcgcatgcacgggctctgattgacgccatgggggacgccgccgccgccgcagcctccacgtccgctcccaccacgcccacctccattctcatctgcctggaagacggcagcgaccttctcgccgatgccgacgatggcgccggcactgacctagttgtcgcccgcgacgagcgtctgcttgtcgtggaccaggacgaggagtatgtag

SEQ ID NO: 13 - DNA, 804 bp, Zea mays
tccaaactttgaccaatgcaaagttcacagctacaatcttgttattctattctgtaaaggcctgggagggtgctggtgttgttgcatcagctcgcaaattaataggagctactaacccccttcaagctgaaccagggactataaggggtgatcttgcagttcaaactggaaggttggcagccaccctcttccatgtgtttatattgtaatgtttaatcatgtaactcacctgttaaactttagttggaatgtgcttacattttacctgcatatcaataaacttatgatggaatgggacgtttcaggaacgttgtccatggaagtgatagtcctgataatggcaagcgtgaaattggtgagttctgcaataattcagtatgattctatgtcgcttttaggtgatttcttgagtcaatgatcattttaaacaatcggcaaggcactggagtggcaagctatagtaatgttttgttcaaactttgggaactgttggttgacatgacaatcaggagcaggattaattaataagacgaaactgatggtgtcatgtactttagtgatacggcttgcagattaactcgaacctaaatttgttttggcctgccagttattattcttaacgatatgaggtgacgactcaaactactttcctacttgcagaactgtggttcaaagaaggcgaggtctgccaaaatgggaatcagttcaagcaccgtggcttatagaataactcttgctaatcatttccagagttgtattcaatgtttttttttgtgttcgtcttgattcaaggagccatgcaag

SEQ ID NO: 14 - DNA, 473 bp, Zea mays
cagaaatctgaaccaggaaccatcaggggtgatcttgccattgttgttggaaggtatgctttcattttcttttcatcctacactttagttttgcgtttcttcgatagcatcatgcaagcttattgcaagttagaattcctttgtactcacatgccaccgcttgaacaccagaaacatcattcatggaagtgatggcccagagacagcgaaggatgagatcgctttatggtttgaacccaaggagctggtctcttacaccagcaatgcggagaagtggatctatggggtgaattaacgagagagtcaatctgttttttttcccttcttttgatctcggttttcacataattgccgacagacctaggcacaaggatgtaataaagtcgctaccgtcacttctgagttggattgtgaccttcaggtgtagtaaggcacaaggaaggatggaaaggaaaggaatataccgtgaaata

SEQ ID NO: 15 - DNA, 1128 bp, Zea mays
cgtggactacatcatctctggccctgtggtggccatggtctgggagggcaagagcgtcgtcacaactggccgcaagatcattggcgccaccaaccccctggcttctgagcccggcaccatccgtggcgactttgctgtcgacattggcaggttagatctcagtccgatttttgtatcttatggttttcagtcaccgttattcatgcattggttatgcttagatgcttaatgtgttaaagctgctcaatccaattgggactgccatacatccaatgtaaaaaatgttcacactcctgagttcggcgtagttatatatcctaaaatttgctcttttccatagtgatgctaaaattcttgactgactagcattggatttatgtagagctacggttatttattttgtgtagtcaaattagatgttaagagacaatgcatgtagatgattatgaccaaatgttggctctcagttcattagtttgtttgtatcttggggtaatgaacatttgtggtcatctcatgattgcagccatgctgcagatcaactgttttaatgttggcattatgacctgttacatccaactcgtgggtccagtaggtacatcctctggcatgtgtttaccagatctgagcttatacttgttctgaatctgatgtggagtccacaaaacatttagacatcagtggatgtaagtgatgtactttcctggtgttgtggggactggttgctctggttgctgtttaatcatccatttaactcgtctttagccatgaatagttggggtgtactgtatcttattctgcgtagttgtccatgagggttttgctgtattgtacttctgatttaatctagaaaacccattttttaaatgtagtgttaaagcctctcggattatgtctgtggtatcagattctactatgatgccaagttctcatgaccttgttttgtgctataggaatgtcattcatggaagtgacagcattgagagtgctaataaggagattgccctgtggttccccgagggccctgctgattggcagagcagccagcacccctggatctacgagaagtaaacatggaaagtttcacatcaaaccttgagagccagaggaagcatgtcaccatttgtg

SEQ ID NO: 16 - DNA, 594 bp, Zea mays
  misc_feature (535)..(540): n is a, c, g, or t
  misc_feature (557)..(560): n is a, c, g, or t
  misc_feature (570)..(579): n is a, c, g, or t
ttgattgaaaaccattatctttctgtcactagcccatggttggtcccttttatagtctgggtggctgatggccatagtaatctggaattaagtgcagctgctgttgcgttgtaaagtctaatcgcgaagtggacaagaaccacagatcagcactgctgttagaaaagaaaaaaagaggatcctaggatatggattccaaaagcagatattcctgcccaccgtttgtgcctttcaccaggtttcgaacattccctttccatttcagcgtcaaggtaacttttacagcgcaacaacataacagaaggcaatcaatccttggccagttgttatatttgatattatggatatcacacagaaagaaactatgttattgatttcagattccttcagtatgaatgaaaaaaaactaaaacaaaaccgtacgggagagactgtttagttgaactatcctcgtgtctaacacgggcacacacacacttaactgttcaggaatggttgtgttaacgagttagtacttttcactcgctgtatgatnnnnnnatgaagttcatgaacgnnnngaggtccttnnnnnnnnnncactacgctgacctt

SEQ ID NO: 17 - DNA, 593 bp, Zea mays
tctggatttcatatcgtcaaagaaaccgaggtccagcttgatgctgagagggcatctgtcttctatgcggagcattcccagagaagcttctttgacagcctagtcaagtacataacaaggtattattgttgttggaaaggctcgtgtctcttaagtttcttgcataatgcttctagtctatgcagcagccttcagacgctaacattgacactaacagtttgtaacatgactccttttatctttgtgttgatctttagtggtccagttcttgctatggttctggaaagacctgacgccgttgcgcaatggcgcactttgattggaccaactgatgcaaaaaaggccaaaacctctcatccaaacaggttaaaaactacatttgttttcctttaacatgttatgtgtttggatacatttttttattgcattactgtattcatttctctttgttttgtggtcgccaacagtactctttgtcatttcagcattagagcaatgtgtgggctggactctgagaaaaattgcgtgcatggttcggattcaccagaatctgcagacagagagatctcatttttcttcggagaagctgaatc

SEQ ID NO: 18 - DNA, 491 bp, Zea mays
ttctttgtggggctggacatagtggactgcctcctggtcaacaagaacgggcgcttcaccggcgaggctttcgtggtcttcccaacagccatgcaggcagagtttgcgctgcatcgcgacaggcagaacatggggcggaggtatgtcgaggtgttcaggtgcaagaagcacgagtactactgtgcaatagccaatgaggtgaaccagggcggttattttgagccggagtaccgccgctccccgcctcctccgaggcctaggaagccgtctgaagataagggcagcatggagtacacagaggttctgaagctccgcgggcttccctactctgccaccactgaggacatcatcaagttcttcctggagtacgagctggcagaggagaacgtgcatatcgcctaccgctccgatgggaaggccacgggtgaagccttcgttgagtttccgacagctgaagtcgcgaagacggccatgtgcaaggataagatgac

SEQ ID NO: 19 - DNA, 698 bp, Zea mays
  misc_feature (605)..(606): n is a, c, g, or t
  misc_feature (625)..(633): n is a, c, g, or t
  misc_feature (660)..(661): n is a, c, g, or t
cgctggggtggcgcatgggcggtgtcacgccgctggattacctcccctgcctctccttcaggctacgccgaggcggcggcggcgggctcgttgccgccaaggccgccgcgcttatcttctccgccgcggaaggttagccaaccacatgcattgtcgcccatctcccgcccatccatgcctgggattctgggaacctgaatgcatccgtgttcgtgctctgttctcgcagctgccagcgtgctcgactacaggccgtccaccgtggccgtcgccgccgtcctggcggcggcccacggcgccatgacaaaggaagcgctggagtgcaatatgagcagcctcactccgtcctgcctgctcgacaaggtccgtgcttgctcggttgctccttgtacacgcactctgttcgactgttcccgacacatctcgagaatgaactcatgaaaacctcacatcgtctgtgcacgcggttcctcccggtgatcaatcaggacgacgtgcacgcctgctacagcacgatgctgagcgagagctcctcgcctacgccgagcaagctggcggacaagagaccgccgccatccagctccggctcgacgacgtacgagtcnntcgacgcggcctcctcgtnnnnnnnnncggcgggccggagcaagagggcgcggnnggagatgccgagcattggcccatgagaagcaccgccg

SEQ ID NO: 20 - DNA, 645 bp, Zea mays
gacctctactgaccaaagaagcactcgattccaagatgagctacctttctccatcttgtcttattgagaaggtgagtcacttgcttacatttccatcttgtagtacttgtgtagcattttgaccatatgaatgttcagtcccgatgaaccttggattaggaaaacttcactataccatttttttatataaatgaatgtgtcggtttctttgaccaggaacatgtacatgcctgctacagtatgatggttggggacaataacaggagaggtagcaagagatcattgccatgttcaggctccaacgagattgccactagtacatatcattctgttcttgttgatgatgttacggacaccgccgccgcctttgccacggcggtatcggccaggaataagcggatcaggctggagctgacgggcatcagttgagaaagctagcaccaccggggacacagtttttagccagatgtctaggggggcttggtttgatcttccctttcattttcttcccttctttttgaacttatatgtttgcgaaaaagaagatatttttttaggttctttgagccattgccatgggttggcattggctgttgtcagatttgattggtttggtttgtgagaggtggaagagatgaacaaagc

SEQ ID NO: 21 - DNA, 472 bp, Zea mays
  misc_feature (59)..(59): n is a, c, g, or t
  misc_feature (364)..(365): n is a, c, g, or t
  misc_feature (372)..(373): n is a, c, g, or t
  misc_feature (384)..(392): n is a, c, g, or t
  misc_feature (425)..(427): n is a, c, g, or t
  misc_feature (436)..(449): n is a, c, g, or t
  misc_feature (454)..(464): n is a, c, g, or t
ctggttgatggtcgactacaacaacaattgttgcataaggaaaggaaatttaaattcanaaatcctaggcttggttaagttgagaagtcattttgcattcatttttctgttggaagtggtgtatcctgtaaaagttggattggtttggttgcatgttcaaactactgtcaagcacccaaacaccttttttatttgttcattttcctattttcatcctgtcttttcaaatgcagtggaagcttgtttcgcttacttcaaaggagcgctaccaagttggatgtgagacggcgtgtccacatggctttagatattgtaagtgcatttttttggttggtaatatgactccactattcacatgattcanntaaaagnntggggccagcnnnnnnnnntttcatatttgagcaaaaactgccaactctgtnnnaaatttttnnnnnnnnnnnnnntggannnnnnnnnnnaacccctt

SEQ ID NO: 22 - DNA, 687 bp, Zea mays
tttatgcaagcaggaggtgtacttgagatcatggaaggcaattgagcagggacttcttgtgaaaggattagagatttttggaaggaacaggttgggtctttctcctaatatccaactctagatagctcatagtgatcagattggtgttccttgcacaaggaacttaggaaatttgtttcccttgatctccaaatttcttgaaattaacctttgtactgtaaatttgtttcccttgatctctttaccttgtgacaccacataaacgtatccgagatctttgtactgtaattgtaaaaaaacaatttaatcttggtttacctaatcttaatagttacaatgaacccatggtttgtctttcacacagttgtttaattgctcggaaccttcttggtggaatgaagacgtgcaaagatgtttttcaatatatgaattatattgaaaacaacagtgcctctggagctcttagtggtgttgattctcttgtcaaaggatatattaaggttggatgcactgtgacccttatttgttgatacttacattcaagccggtaacttaatttggtgttgtccgtgttgatgtcccagggtactgagttgcgcacaagatcaagatattttagaaggcgaggtaaagtccgtcgtttgaagtacacctggaaatctgcaggttacaatttcaaaaggatta

SEQ ID NO: 23 - DNA, 445 bp, Zea mays
atgatggtgctcatgaaccataaaatatgaatgaaggaattttacagagagaattctcgcctacgaacagagcagcctgaatcagtttcatttcaggctgcttctaacaaataatcagttaaacatgatggtaccatgactaaaatcgacactatgttattgcctaatgcttgcctgagtcctatatcacaatcactatttgtagcattaacaatgagatcctagccctgcactcaagctgtaggaaaattgcaatgctaaatcgctcagcaagcctacacaactgttgaaatctctggagttctgcaaccgagcattgaacagttagtgtattcctgcaaaatcaatagacacggcctcggcaattggtagttccacaatggcatgggcagccatcgcctgctacaagcttttgtcggtaatcataggcgagttcttctcctac

SEQ ID NO: 24 - DNA, 720 bp, Zea mays
  misc_feature (672)..(676): n is a, c, g, or t
tccggaaccacaaccaccagggcggcgccgcgccattccacggtcagcggctcctgctcctcagctcctcgcttgctcccctctcgtccggtcccttccgttccgtctggccactccattcctcccctctgctggtctcgacgacccttctcggcggcccgtgtactctgatccgggattatggctatgcataggaattgcatggcatgatcaagcttcatccattcgtcgtctgtcagttgcttatcagtactgttgaagaaaaaacgaaattaaatttccgcagcatgaactaattaaggcccgggtttcgttcctttcctcgtttggttcagttaccgccgtcgacagcggcaagaaggcaatggagcatctccggctgatggagcaaggcggccagctggattcatgtgccgctgatgctaatgtgagtactaccagtaccacacctatacccagtctcatgtactcgccgcccaatcgtaggccaccgtacatgtctgcagatgccgagctgtctcttagaaatggagaaaggtttcctttagtgtactgatttagttctagtgcgttagtattaccaaggaaaaaaaacatagaccgtgttctcatgacgtgatgagatctttgactgcaagtgcaagtgcaagcagaaatgaaactgagataagnnnnntttttgcagcggataaccattgacatcgtgctcacggactactg

SEQ ID NO: 25 - DNA, 1020 bp, Zea mays
  misc_feature (1010)..(1015): n is a, c, g, or t
aatacgcttcctccgcgaatgatggaggtgatggcagctggaaatctcagagaaagaaaagagagaaagaagatgatgaaactgacctcgaaaatggtgatccttcttctacatcaaagaaaccaagagttgtttggtcagttgagcttcatcaacaatttgtgaatgcagtcaatcacctcgggatagacagtaagattttgctacttgtatttgtagttcttacttttattgacaagaatttgctgtaaattcatattgccagttatgtgccttcttgattgaatttgagtattgttgattactgtaaaaaaacctgaaccttaaacgaactcaactcttctccatcatgcttatttgtttttattttctgcagaagctgtcccaaagaaaattttggaattgatgaatgtcccaggcttaaccagggaaaatgttgccagccatttgcaggtttggtttccagcgttctgaccatattacctgttttagtacctatatctttattgcacgtgatgttgccgcttatgcacctgtacattttataccatattattctacctaaatttaatctggatttgttagtgagataaatagaataatagatggcttcctgcaagagtgaactcagttgagcggcctgtgcttttattgttacagcacttgtctattctttcattgcagaatgcaatttaattgcaccagaccatcatactattcattgtttgactgaaagcattgtgaaaacgtgttactaaaaaatgacttcccttgatctccatggtacatatcacaaaaacgaacatcttttgattagatgaggatcaactatcctctttttattaagcatttttgaatgtaccctatcaccctatgtaataccattaagtttgctagtttctattggctgttggtgagctccaagtccagccattatttaataatctcatagcttaagacatcaatggtgataagatgcattttttctatgtgcagaaattcagactctnnnnnnagaga

SEQ ID NO: 26 - DNA, 637 bp, Zea mays
ttgatccacctgatagtacatgtgcacaagtaattcaccctagatcagagatatgcagtaacaagtggttaccgacagcaaacaaaaggaatgtcaagaaacagaaggagaataaaggtatatgctccacactccacagcattcatcatatagaagtgaagcatttcacagttcttccactattgtctcattcaaccaaattccatgtttttacagatgaatctatgggaagatacttagaaataggtgctcctaggaactcaagtgcagaatatcaatcatctctcaatgatgtatctgttaatccaatagaaaaaggacatgagaatcacatgtccaaatgcaaatctaaaaaggaaacaatggcagaagatgattgtacaaacatgcctagtgcaacaaatgctgaaactgctgatttgattagctcaatagccagaaacacagaaggccaacaagcagtacaagccgttgacgcaccagatggcccttccaaaatggctaatggaaatgataagaatcatgattctcatatcgaagtgacaccccatgagttgggtttgaagagatcgagaacaaatggagctacagcggaaatccatgatgagcgaaatattctgaaaagatcagatcagtc

SEQ ID NO: 27 - DNA, 637 bp, Zea mays
  misc_feature (241)..(241): n is a, c, g, or t
ttgatccacctgatagtacatgtgcacaagtaattcaccctagatcagagatatgcagtaacaagtggttaccgacagcaaacaaaaggaatgtcaagaaacagaaggagaataaaggtatatgctccacactccacagcattcatcatatagaagtgaagcatttcacagttcttccactattgtctcattcaaccaaattccatgtttttacagatgaatctatgggaagatacttagnaataggtgctcctaggaactcaagtgcagaatatcaatcatctctcaatgatgtatctgttaatccaatagaaaaaggacatgagaatcacatgtccaaatgcaaatctaaaaaggaaacaatggcagaagatgattgtacaaacatgcctagtgcaacaaatgctgaaactgctgatttgattagctcaatagccagaaacacagaaggccaacaagcagtacaagccgttgacgcaccagatggcccttccaaaatggctaatggaaatgataagaatcatgattctcatatcgaagtgacaccccatgagttgggtttgaagagatcgagaacaaatggagctacagcggaaatccatgatgagcgaaatattctgaaaagatcagatcagtc

SEQ ID NO: 28 - DNA, 804 bp, Zea mays
cttgtgatgtacgatttgcctgccagaaaattttactaatgtaacctgcttgtgatgtgtcagcagctaagggtaataacttgattccaacaagagaagacgatttatcgccaaagaaaagaacatgtttgaatgacaataattctgagagaacttccagagatatggagctagtccacattatggacaatcagcagaagcatgacacacagagggatgtggatactatgagaacaacatccaggggaaatgatgagaagaactccatcccagcacaccagttggaactttctcttagaagaactgactatggaaaattagagaaccacgagaaaaatgatagaagaacactgaaccattcaacttcatctgcattttacttgtaagtgctcctttctttggcttttcataatagcgatactttcgtcatcctaaaaacttatgtgaagtagataagtctagttacagatctggttgttatttttatgtcaggtttttttttgttcctagtgtaggtacagggtaacagaatttttttcaaataatttttgacatttatcttttcttttccaagcatagttaagagacttcttttaatagtgaattaccatgagatgaatagataatctcgaagcataaaatatctaactattgtagacacaccataaactttgagatggaatttcaagtgcccattgctgtatcttactggacaatttgcttcttttcgaagttccacaagtgcccattactgtatcttactgtggaagtatcttgtcgacaggtataattgcaggactgcgt

SEQ ID NO: 29 - DNA, 521 bp, Zea mays
cgtctgcgcggtcctgcattgaaaaaaataaacgcatggttcacataaaaatacgggaccgtaatgctgactactgtcgaatataaaaaaaaagatgtataggaccataccggcctaaacatgtccacgacaatgtcatccagaccaccactaagtcccctttgcagcctacctgtccccatgagttcgttgttgtagtttagatgactgctgacagcttggtgatcaatcctgccatcttgcagaggggggacaacacaaccacctgaattgctaccacccagtgtctgccctggaacaacagaaccgtctatgcgaaggttcggcaatgtagagttgacgcctgaattactaagcgcaaggttgttattcagcatctctctcgagtttgtgctgcttccataagcgaagggcactgcttcctgagtgaacggcatcggaagaccgttgctggctagtgatgctacttggtggctctgcatttcatttcccagcaaagggatctgactggatgcttctgt

SEQ ID NO: 30 - DNA, 348 bp, Zea mays
aagattgtgactttgatcaggaaaggaacggagctattttgtttacttcagaagaggcaagtatattatgcggcactgattttacttgtctacctgaagacctgtccggctatcaacttcaaggtgtctccttcgggaataaaggattgaacagcatcgatttatatcagtgcaatgatacaatgttaatacctggactgcacaataattggtatgatgatgatgtagagtttagcagtgaaaccgtggagttcccattgctagacggaggcctgtttgcataaatacctcatctggccctatctttcaaccatgcccttatgtcagcagggatgatgttcattggta

SEQ ID NO: 31 - DNA, 575 bp, Zea mays
  misc_feature (498)..(499): n is a, c, g, or t
  misc_feature (545)..(551): n is a, c, g, or t
ttgctttcccggggggcgatcgaggccacgccgctgctgccgcggtgccctccctctgcctctgggctctggcctctgcgtgtgacgtgccgtgccatggcgctcgccctcgcctatatcccccgcctccctcgccccgccgctggccgccgcattcagtaaaaagccacctaccctaccctcctgcgctggtactacttactacctagccaggccaaggagcccaacgagggggaacgctgcggtaggcgcgcgctgctcgtcccaccccacgccgccatgacggtgccggatgccgagtcgcgcttccatgtcctcgcggtggacgacagcctcgtcgacaggaaactcatcgagatgctgctcaagacctcgtcctaccaaggtgaaattccgtccgtgtttctgggtgttttttcttctctccccttctttccctgcggcgaaattccgtctcatcatcatccgcctcgccctcgttctccagtgaccacggtnnattccgggagcaaggcgctggagctgctggggctgagggacgcgtnnnnnnngtctccgtcctcgcctgaccacca

SEQ ID NO: 32 - DNA, 683 bp, Zea mays
  misc_feature (646)..(646): n is a, c, g, or t
  misc_feature (673)..(678): n is a, c, g, or t
acgacagcctcccggacaggaagctcatcgagaggctcctcaagacctcttccttccaaggcaaactcagccaccggatgattattcccgtctcctttgcctctgctctgagtctcacgaaaggtggccggcccctttggcttttgtttctgaatgtatgcagtgaccactgtcgactccgggagcaaggcgctgcagttcctgggcctccatgaccaggacagcacggttcctcctgtccacacgcaccagctggtaagaagaagatggcttcctcttcctagctcctacgagttggttggtcaaccgtgttgtgcactgcttgtattgtcttctcctagcgtcactagctagtcctcaagaagaggtttctgatgtaatcaggatgtggctgccaatcaggatgtggctgtgaacctgatcatcacagactactgcatgcctggcatgacaggatatgacctgctcaagaagatcaaggtgactactgaactactccggcatgatcactgaacattctgtatagtgcttactttctggcatgatcactgaacattctgtatagtgcttgctttctggcatgatcactgaagataacaaggcctaaagatgcatgtttggttttggtttggtttgttctgccagnagtcgtcgtctctcagagatatcccgnnnnnnatcat

SEQ ID NO: 33 - DNA, 625 bp, Zea mays
  misc_feature (554)..(557): n is a, c, g, or t
  misc_feature (574)..(583): n is a, c, g, or t
  misc_feature (589)..(607): n is a, c, g, or t
  misc_feature (618)..(622): n is a, c, g, or t
agcggtgccttggcaggctgtccgcgcagcagcatcatctcgtttcatttgaaccatgcggccatgcggggggaggacaggacatatagctaaccttggattttacgtgtgtgcagtgacgaccgtggactcggcgacgcgcgcgctggagctgctggcgctggggctggtccccgacgtgaacatgatcatcacggactactggatgcccgggatgaccgggtacgagctgctgaagcacgtgaaggagtcgtcggcgctgcgggccatcccggtggtgatcatgtcgtcggagaacgtgcccacccgcatcagccggtgcctggaggagggcgccgaggacttcctcctcaagcccgtccgccccgccgacgtctcccgcctctgcagccggatccggtgaccgcccgcgcaaggatggaggatctggttgcgcgctctgacttaattagaggagttgttaggatccaattttttgtgtgttcgttcgttcgttcgttcttttctttctttcttcttggacatagatctgctgccgccgccgcagctgccgnnnnctgaaacaagaagctannnnnnnnnnaggatnnnnnnnnnnnnnnnnnnnaggaaggggannnnntgg

SEQ ID NO: 34 - DNA, 592 bp, Zea mays
ggtgccttggcaggctgtccgcgcagcagcagcatctcgtttcatttgaaccatgcggccatgcggggggaggacaggacatatagctaaccttggattttacgtgtgtgcagtgacgaccgtggattcggcgacgcgcgcgctggagctgctggcgctggggctggtccccgacgtgaacatgatcatcacggactactggatgcccgggatgaccgggtacgagctgctgaagcacgtgaaggagtcgtcggcgctgcgggcgattcccgtggtgatcatgtcgtcggagaacgtgcccacccgcatcagccggtgcctggaggagggcgccgaggacttcctcctcaagcccgtccgccccgccgacgtctcccgcctctgcagccggatccggtgaccgcccgcgcaaggatggaggatctggttgcgcgctctgacttaattagaggagttgttaggatccaattttttgtgtgttcgttcgttcgttcgttcttttctttctttcttcttggacatagatctgccgccgccgctgccgccgcagccgctgccgtcgactgaagcaagaagctaacttagttttagg

SEQ ID NO: 35 - DNA, 728 bp, Zea mays
ctttgatgttgccacacagatctgcccttttgtctctatgttgtatgttgatgacatgctaacaatatacttgtttaaacgcccttccatttcttggcgtgtttcagtctaatccttccgttgctgagcgcgaccagagagacaagatcggtgctccaggctctgccctagatgccagtcaatcatgtaagatatttcagcctgtaataactggtcttcctttttgttgttaaccacttcttgagttctatatctccatctgttttctgataattattttaattgccagcgactccgggaagaatgttttcacgtcctataaaaactaacctgaaggttgctgagtcgtctgcatttctagcatatgttaagtcaagcaccccagccaccagctcatttgatagcggactacaaagaggtgacagccggttagattctttggataaccatggtaattgctctagtgcaacagatagaagtgacaccggtgctgatgtaaatattcggaataaagaagcttttgagatgcctgtgcagtatcctatggtatgcttttcttcctctagcatgcatatggagcgaagcaatgaaggccataatgacacttcaggaactccacctgcataccatttcccattttattatccagggatggtagaacacaacatggcactttcatcagtgcaaaattttcaagcaaacataaacagtgctcaagcacatacacc

SEQ ID NO: 36 - DNA, 739 bp, Zea mays
gcactgatgaaagtgccatgttgtgttctaccatccctggataataaaatgggaaatggtatgcaggtggagttcctgaagtgtcattatggccttcattgcttcgctccatatgcatgctagaggaagaaaagcataccataggatactgcacaggcatctcaaaagcttctttattccgaatatttacatcagtaccggtgtcacttctatctgttgcactagagcaattaccatggttatccaaagaatctaaccggctgtcacctctttgtagtccgctatcaaatgaactggtggctggggtgcttgacttaacatatgctagaaatgcagacgactcagcaaccttcaggttagtttttataggacgtgaaaacattcttcccggagtcgctggcaattaaaataattatcagaaaacagatggagatatagaactcaagaagtggttaacaacaaaaaggaagaccagttattacaggctgacatatcttacatgattgactggcatctagggcagagcctggagcaccgatcttgtctctctggtcgcgctcagcaacggaaggattagactgaaacacgccaagaaatggaagggcgtttaaacaagtatattgttagcatgtcatcaacatacaacatagagacaaaagggcagatctgtgtggcaacatcaaagaacagaaatgaaaatatactaaaacagcaacaacaaaaaagtgctgcaacaaac

SEQ ID NO: 37 - DNA, 492 bp, Zea mays
aggagagccactctgatcatgcatatggttcctctccaagtgcatcgtgcatcactcaggttcccacctggacacttaaggatctagaaaatgtgatgcttggacccgattctgacataggtagccctgacagttcctttctgcttgacactgccttgcatggaaataactggagagaacttttgggaattcaaactggggatttgaggcaggtaattgtagcatgtggtaaggctgttgacgagaatgctgtctatatggatgcattgatgtctgagttaagggagatggtttctgtctctggtgaaccgatgcaacgtctgggagcttacatgttggaaggcctcattgcgaggctttctttcactggacatgccttgtataaatctctgaagtgcaaagagcctgtggctacgagttctgagctcttgtcctatatgcatcttctttatgagatctgtccattcttcaagttcggttacatgtctgcca

SEQ ID NO: 38 - DNA, 374 bp, Zea mays
atgcagtggatcgggcgcacgtgcatgtgtgtatggcgagctgaatggctcacgcatctagggttttggagcagtagtagggattgctagttcacgcacacatggttgtatgcagcaaggtgatccaggaggaggtatggtcgatgcatggttttaggttttagacttgcatctatttcaaatttggatcatcgatcgccacaagctcttggcgtgatgattccgattttcttgcttctttgttttttttgtcacatttctctgtgtttcttactttcttcatgtaattcaaggttaacaactttctgctccctctggagggatttacgtgcatggttttgtcatactttctctcattcctctgtttgcatttg

SEQ ID NO: 39 - DNA, 904 bp, Zea mays
  misc_feature (784)..(809): n is a, c, g, or t
  misc_feature (814)..(831): n is a, c, g, or t
  misc_feature (839)..(901): n is a, c, g, or t
ctcgacttcctctgtcagttgtctagctttaatttccgccatgtctcagttcttccatgcagactaatatattatatactaagcatatatatacatactaatgcaggtgacttgaagccaggcgctgaggtgaagatcacagggccagtgggcaaggagatgctcatgcccaaagaccccaacgcaacaatcatcatggtgagtagagttagagtcagctcatccatccatctagctagctagctatccctccatgaaaccgcttatcatctcgcactggtaaatccctgatgtgttcatcagctcgcaacgggtaccggcatcgctccgttccgctccttcttgtggaagatgttcttcgaggagcacgaggactacaaggtctcaaactctcaaataattaatcaaacaacaacagagacagacagacagacagattgatgaaatgaactaattaattaatgaactgaatctatatccaacatgatatacatagtacaccgggctggcgtggctgttcctgggcgtcccgaccagcgacaccctgctgtacaaggaggagctggagaagatgaaggagatggcgccggacaacttccggctggacttcgcggtgagccgggagcagacgaacgcggccggggagaagatgtacatccagacgcgcatggcggagtacaaggaggagctgtgggagctgctcaagaaggacaacacctacgtctacatgtgcgggctcaagggcatggagaagggcatcgacgacatcatgctcgacctcgcnnnnnnnnnnnnnnnnnnnnnnnnnntctcnnnnnnnnnnnnnnnnnncgctcgannnnnnnnnnnnnnnnnnnnnnnnnnnnnnnnnnnnnnnnnnnnnnnnnnnnnnnnnnnnnnntca

SEQ ID NO: 40 - DNA, 712 bp, Zea mays
  misc_feature (702)..(708): n is a, c, g, or t
tcttattactagtttaggttatcagacatgtgttctttgggatgttactactggacagaggatatcaatatttggaggtgaattcccatcagggcatacaactgatgttcaaaggtaattggtagtgcttctaattttttgaggattgaatattttagtgtcatgtgtaacgcttctgatttctctcctcaaagttaattggtatcttctcatttgtacatttttaactttaggctggtgcacactaggttgctagctttaccaatatgttaatgtttgatgatcaaattatccctattgcttctaaagttttctttgtaaactgaatattattcatgtggatttgaataaagtttacctacaatgactagtttgtatttgtctgttgttacatttggacaatgaaagcatactttttagtactgaatgtaattttagtaataacaagtactccttccattccaaattgttggtattttagtttgtcataagtcaaacttctctgtttaccaggttatcattgatatttggagtttggttttgaattctctgacctttccctttcttgttcagtgtgtccatcaactgatcaaatacaaatatgtttgtctctcgctcatgtgatacaactgtgaggatgtggccataggtttggtactggctcagatgatggcacatgtagattatttgctatgagaacannnnnnnaact

SEQ ID NO: 41 - DNA, 762 bp, Zea mays
tgggcttgagcgatcaggacattgttgccctctctggtggccacaccttggtttgttactgtcactcatgtttgtttcaggtatgtaatatgtatgcttgcactgatttaattttcttgaggtttatttagggaaggtgccacaaagagcggtctggtttcgagggggcctggactacaaaccctttggtctttgacaactcttacttcaagtgagtcttagtctcgtttactattgaaaagcaactgcatttagttaagaaatacttaaaatttgtttaccttgttatgtcattcttggccagctgactgctacactagaaattaatctattccatttctcccgatctattttcgtagggaacttctgagtggtgataaggagggccttcttcagctcccaagtgacaaagccctgctgagcgaccctgttttccgccctcttgtcgagaaatatgctgcggtatgtctttcggtattgttataggttattatggagatctgtagggagacctactgattatttggtgtgtcttgtaggatgagaaggctttctttgatgactacaaagaggcccacctcaagctctccgaactggggtaaccattgattgcacaaattgtgcttggtcaattttaacaaatttgatcgtttactcttgtggaatgcaggtttgctgatgcttaaatagaccctatcttggagtgatacattctgctgcctgtatggaatcatgtggtcttttgcatctggagtcaatgtg

SEQ ID NO: 42 - DNA, 491 bp, Zea mays
ggaggcgctcatcgacgagcaccgcggcgacaagggcaagctcgtcgtgctggacgtgggcctcaagcactgcgggccctgcgtcaaggtgtaccccaccgtgctgaagctgtcgcggtccatggtcgacaacaccgtcttcgcgcgcatgaacggcgacgagaacgacagctgcatggagttcctcagggccatgaagatcgtggaggtgcccactttcgtcttcatcagggacggccagatcgtcggccgctacgtcggctccggcaagggggagctcgtcggtgagatcctccgatacaacggcgtcagggtcacctactgaagtgaagtagtgaacaacaaaccagtcagagtcagagcaagcgcaagccgacaagcaacgcttcgatacaaaattgaagacgatacaaaattttagattactgcgacatccatcgacgattggccgatgtttagactgtttattgtgtaccattaccatacttgcc

SEQ ID NO: 43 - DNA, 482 bp, Zea mays
  misc_feature (315)..(319): n is a, c, g, or t
  misc_feature (322)..(329): n is a, c, g, or t
  misc_feature (348)..(353): n is a, c, g, or t
  misc_feature (358)..(373): n is a, c, g, or t
  misc_feature (376)..(377): n is a, c, g, or t
  misc_feature (386)..(390): n is a, c, g, or t
  misc_feature (422)..(426): n is a, c, g, or t
  misc_feature (436)..(442): n is a, c, g, or t
  misc_feature (470)..(479): n is a, c, g, or t
gctgctcctcgagatcgctcttgttgccaaccagcattatcacaatgttcttgtcagcatgggctcggagctcatctagccagcggggtatgtgatcgaagctctgccgtctggtgatgtcgtagaccagcaaagctcccagtgcgcctctataataagcactagtcacggctctgtacctgcagcagttgggtgtagccagcaactcagcatgagaagttcatgaaaaaaaaggtgatggaaagcaggcacgaaaagtaacagcacctaaaatgactaccaattgtatcgttacaagctttctataaaatctgnnnnntcnnnnnnnnaaaaatgactactaaaggnnnnnnctaannnnnnnnnnnnnnnncannacccaatannnnnaataatttccacaggtcaccaccactctgctnnnnngaatgctggnnnnnnntaatatcatgaacaggtctaaagcaagnnnnnnnnnnaat

SEQ ID NO: 44 - DNA, 710 bp, Zea mays
tgagaacagagtagtttcttacgaggctggcaaggtaatatttctctgcattaattacttttactggacatgcttctttcaaccgggatgatagttaaattggctgcatgttgcttgtcatcataggcccttgctgatgacatcggaataccattccttgagactagtgccaaggatgcaacaaatgtggagaaggcattcatgaccatggcaggggagataaagaacaggtaactagatcatttgtgttgtagactttttgtggcagcattttctcattccttttggagtcatcaagtatagtatgtcaacatatggaggccctcttttattgagggactgagtacaaacaaagaacactgtgcaacataatattgcatatgattcaaagtgaaaaataagccatgaatcccatgatcactatgtttgctattgtttatctgtatacgggagcacctaatcattcttcattctccttgttggataggatggcaagtcaaccagctgcaagtggtgctagtaggcctgcaactgtgcaaatgcggggtcagcctgtttctcagcaaagcagctgctgctcttgatcgtctgtctagatcacagtagtgtgattgtgcagcaagcaaaacttaaattggttgctccctgtacattaagcctattactgtcccaaagaactcgatgttatctatccgatactggaagtctgt

SEQ ID NO: 45 - DNA, 495 bp, Zea mays
  misc_feature (155)..(155): n is a, c, g, or t
atgtatcgcaagatacagaatggtgatttcaggtgccctagttggttttcacacaaactcaagaagctcttgtacaagatcctcgaccccagcccagacacaagaatttcagtccagaagataaaagagtctacctggtttcgaaaaggccctgnggagacccgtacagtaaaggagagaattctgagtgagaatgacaccacaaatgctgctccagccgttgctatgaggcgcaagaagaatgttcatgaagacgtgaagcccccgactgtcacaagcttaaacgcctttgaaattatatctttctccacaggattggacctctctggcctatttatcagaaaggagtgtaagaaggagacgcggttcacttctgataagggtgccgtgtccatcatctcgaagcttgaagatgttgcaaaagcactgaatctcagggtaaggaagaaggacaatggtgttgtcaagattcaggggaggaaggtggggaggaag

SEQ ID NO: 46 - DNA, 574 bp, Zea mays
cctcttcttcctcttccttctcgccagcctcgccttctcccaagagttcacctacaagggcttcagcgccagtggccgcggcgggagcccgaacctgaacctgaacggcacgtcggcaaccgagatcttgcccagcggcatcctccgcctcaccaacgagacgtcccggctcttcggacacgccttctacccgaccccgctgcgcttcctggaccagaagaacggcaccgccgtgtccttctccacgcagttcgcctttaccgtggtgcccgagttcccgacgctcggcggccacggcttcgcgttcgtcgtcgcgcccgacccgcgcatgtccggtgcgctgcccagccagtacctgggcctactcagcgccgccgacgtcggcaacgccaccaaccacctcttcgccatcgagttcgacaccgtgcaggacttcgagttcgacgacgtcaacggcaaccacgtcggcgtcgacctcaacagcctcatctccaacgcgtccgccaaggccgaccctttgaacctcaagtccggggacaccaccgcctgggtcgactacgacggcgccgccagg

SEQ ID NO: 47 - DNA, 487 bp, Zea mays
tatatttcttgttcttggtattgccatatgtaaactgattggctagcaatgccacattactgagttgtttactcttgacttgatgatgcaggtcattgcccaacttgaactgtggaaggagaagagctctggcaagtatgagaagaaggtgtatgtgctccccaagcaccttgatgagaaggttgctgctctccacttgggcaagcttggtgccaagctgaccaagctcaccaagtctcaggccgactacatcagcgtgccgatcgagggtccctacaagcctgcccactaccggtactaggcagccagcacacggcttgcagctcactcgggccgttgtgtgctatgaagttcgctacactggcctgtcagttatcttttgcatgcatatgcattatcatatacgcagtcgcgtagcaggtttccttatggttatcgcttgagctgagggggagggaaggagctgtttgcttttgctgaagaataa

SEQ ID NO: 48 - DNA, 489 bp, Zea mays
tttctcctgcctgctcacgaccgccctctcgccggtcgccggtcgccgctcgcaacgcaagtcggaagaggaatctctccaagctccaatcctccgatcctgccccaacccaagtcccctccaccaggccgcacacctccgccgcccggcgcgaccttgcatccaccagcctgccctctccttcgcgtgaggcggccccggcgaccgcgtcggcagtgcaagaccagaccgaggcttctcccgttggaaggttccagccatggcgagcgccgatctgctgcggaaggaggaggagttctactcctccctctttgattccgcaaaaggtaacccgcccatcccctttacccgaaaggaaaaaaaaactcctctttcgatgctcacatgtcgagctcaacccccaaatccgccccttattttagtgctgcgtgaacgcaggcgacggcgtcaagtcgcgctcgcaggtgattgagaggaagattgaatccc

SEQ ID NO: 49 - DNA, 726 bp, Zea mays
  misc_feature (653)..(654): n is a, c, g, or t
  misc_feature (675)..(681): n is a, c, g, or t
  misc_feature (702)..(718): n is a, c, g, or t
ggatcctgatgaagtacttggtaatttttttgcttattgcgacacttttcatagagctgatttatttggttcctataacttatactctccttgctcttgtagtgaaatatgaggcccgtctggaagatggtactgttgtatccaagtctgagggggttgagtttactgtgaaagatggtaaccctcttatgttctgtcttcacatggtcttctgaagatttttgtgcctatcggttgttttctaactactgtattgccaggctacttttgtcctgccctggccaaagctgtcaaaaccatgaaaaaggcagagaaggtgctccttacagtaaagccacaatgtgagattccatttcaaagtttgattattcttctgtagttacatgtctattttctctgaattatgacacttatttgaacttcctcacttcaaatgcagatggatttggtgagaagggtagaccagcagctggagaggaaggtgctgtgccgccaaatgcttcactgctcattgaccttgagttgatttcatggaagactgtcacagaaattggggatgataagaaaatccttaagaaggttctcaaggagggagaaggttatgagcgtcccaacgagggtgctgttgttgaaggtatgctcaagtggtcaanntacttaattgtaatgatgctnnnnnnngttggttcttgactcctttcnnnnnnnnnnnnnnnnnttgcactc

SEQ ID NO: 50 - DNA, 649 bp, Zea mays
  misc_feature (64)..(64): n is a, c, g, or t
  misc_feature (92)..(94): n is a, c, g, or t
  misc_feature (120)..(124): n is a, c, g, or t
  misc_feature (613)..(617): n is a, c, g, or t
gttatgctttcattttttattgagcagatacatttctgttgttcctttacccctgttctcctantgattaagtatgaattgacaattatttnnnatatgttttactaatgatgaaaatgnnnnntaaaaaaatgatactaatttcatttctgaatcctcatgtgcaaccaataggtgttcaaagagctgcaaaaacaagtttagaggctgtcattgtgcaaaaagccaatgcagaagcagacagtgcccctgttttgcagccagtcgtgaatgtgatccagatgtttgtaggaattgctgggtgaggtaatcagcactggtctaattaacaaccgacctttatgcattcatgaaccagttaaaataaatcatacaacagggtcaagactcaagaaactgtaatttttgttgactgcctatcttgttctattgttgcatattcagatttccgatttgtactattatagtttgtcacacataacatgatgtatattgtcttcagctgtggagatggttcactaggtgagccacttgcaagaggtgatggttatcagtgtggaaatatgaagctccttttgaaacaacagcaaagggtgagactgagtatatattnnnnntgctatttgtccctttgtatcactgtgctcta

SEQ ID NO: 51 - DNA, 458 bp, Zea mays
  misc_feature (89)..(90): n is a, c, g, or t
gcagattcagagtggctcctggataagtcctgggatatcctgaacaattcatcatttttatgtagtagagatagagttaagatcattannggcatggatgaagcttattatggatggatagctcttaaccacaacatggatatgcttggcacctcatcatctaaaatgacatatggttcacttgatttagggggatcatcattacaggttacatttgagaatgataaatcagtgcaggatgagacaagcattcgtctgagtattggttcagttgaacatcacctcagtgcttattctcttactggttatgggttaaatgatgcatttgataaatctgtagcacatctagtgaaaagactgggaggagttgctagcaatggcaaggttcaagtcaaacatccctgtctacagactggattcaaggaagattatatttgttcttactgccatccattgaa

SEQ ID NO: 52 - DNA, 747 bp, Zea mays
  misc_feature (104)..(106): n is a, c, g, or t
  misc_feature (393)..(394): n is a, c, g, or t
  misc_feature (438)..(438): n is a, c, g, or t
  misc_feature (480)..(480): n is a, c, g, or t
  misc_feature (483)..(483): n is a, c, g, or t
  misc_feature (709)..(713): n is a, c, g, or t
ggcctaccttttaagtaagtgatatcgactttgctgtccttctatttatcattgtaaccgattgaaattgttttgtgaacttacataatacatattgtattcannntatgggaacttgcctactcagagtcaattggcaggctgggaatttgctatttctcagcattctgctgttccccaaggactgttggtatgctttattatcaacttttcttatcaagacagatttttgagttggcatagattaaaatgtatattttgtaattactttaatgtgttcaggatatcatacaatcaatgccccatgatgctcaccccatgggtgttcttgccagtgctatgagcaccctttctgtctttcatccagatgcaaaccctgctctacaagtaagnnctgcctatacgcaccaatcaagacagaggatattattcaactanatcaactttctgtgatacaattaaccagaaatttcaacccanccngatctttaaatttgaatttaatattttgaacacatattctgctcatgtagggtcaagatctttataaatcgaagcaggtgagggataaacaaattgtgcgagtacttgggaaggtatgcctggttatctagttcctttagttaatgctataattctagcaaacaactggagatcttgcaaatttaaaatgatggtaccttgatttttatatgcatttggcttgttnnnnnaccaacaatagcagctgctgcctacttgagatta

SEQ ID NO: 53 - DNA, 1018 bp, Zea mays
tcgattgtggcgcctttgaccgagtttgaccaccccgagaaaggcgatgctctgtacggtaagttgcgttgccgccgcatctgacttccgggttaggaattaggataggatctgaattccaagtgcctcggagacgtgtaatttattctgcatctgaacctagctttatcagctgcagctttcaagtatatgcatcgatggatgattagattcaaagactaacaaatttaggacgacggcttatacagaatagaatagaatagaatagaaggctggctacgttaattggaagccaatgctctgttttctatttgtgacctctgcaaattttttttatttttgatgggtttcagctatggagctgactctggctctggaaaagctggttaatgagaagctgcacagcctgcatggtgtaagttgctctcacatgcttgtttatttacagagaaatatatattgcgtgcttcgcttaaggcatatatacagacttggataatgtatgtgcagatataaattgaatgagtgttgggtcactacatgtaacatgctattattgtaattaacaggtggcaacaaggtgcaatgatcctcagctgatagacttcatcgagagtgagttcctcgaggagcaggtataaaataaaatgctaccaacaagcttatatatgttcgttccgtatagtttacacgacggaattcttagctgatgagcgaaagttttgggttttcttttgaaaggtggaagccataaataaggtctccaagtatgtcgcgcagctgaggagagtgggcaacaaggggcacggttagtctgttgctaataaacttggtttcatctgctatatatgtctcgtgcccaaagttacgatattgttgagacgtggcttgcgtgcaggggtgtggcactttgatcagatgctgcttcaggaaggggcctgaaggaaggaaagaaatgaccaacaaggatggcgtggacggagctgagctctggttgtgttgtggtgttttcttttct

SEQ ID NO: 54 - DNA, 375 bp, Zea mays
gagcacgctggggatgggcggggacgacaagcagggcgacgccaacaccaacaccaacaaggactcctctaccatcaccagggatcactagacgcgtgtatgcacacgcagcacttggtccgatcctgtcgtccgtgaccctgtttgcttgttcgcgagtccagtatgggtttgtgcacgttttcagtgtcatggtttccttctctacgaaatttggtgttgtaagtttgattcgcaggtacgttgctgtgttttttctgcgtcatcaagtgtctgtaaacgagtcgggcgggtttgagtgtcctttgttgtgataataaagttggtaaatcgtaattaatatatagcatgcgactgtcttgctatggcctaaaa

SEQ ID NO: 55 - DNA, 373 bp, Zea mays
tgggcgccgtggtgcgggccgtgccggatgatcgcgccggtgatcgacgagctggccaaggactacgccggcaagatcacgtgctgcaaggtgaacacggacgacagccccaacgtggcgtccacctacggcatccgcagcatccccaccgtgctcatcttcaagggcggcgagaagaaggagagcgtcatcggcgccgtcccaaagtccacgctcaccaccctcatcgacaagtacatcggtagctcatgagcatgccatgccatgccatgcatgcatgcatcgacgactaaacacatatgtgtatctctagtagcctttgcatacgggatatgatcaattcaagcagccagccgtctgctactgctgtgtt

SEQ ID NO: 56 - DNA, 619 bp, Zea mays
accctactccaccacgcgatcaccgacagacgcctctccgacgagcaactcaaccccccaccgcgcacgcgagagccggattcccacgatggcgacgatccagcaccaggcgaaaccggcggtggcggcggcgccgagcacaactactggcggtgggcagcgcgcgatggacctctacgagaagctggagaaggtcggagaggggacctacgggaaggtgtacagggcgcgggagaaggcgacggggcggatcgtggcgctgaagaagacgcggctccccgaggacgacgagggcgtgccccccaccgcgatgcgggaggtctccttgctgcggatgctgtcgcaggacccgcacgtggtgcgcctgctggacctcaagcagggcgtgaataaggaggggcagaccatcctctacctggtcttcgagtacatggacaccgacctcaagaagttcatccggggacaccgcagcaacaacgagaagatccccgcggccaccgtcaaggtatacgagtggtttcctgccccctctcttccaccgtctccatcccagcgcgctgcatgccaggtgtttgttcaaatgcgtcacccatgtttgtgcccgcagatcctgatgtac

SEQ ID NO: 57 - DNA, 665 bp, Zea mays
gagattttctccctcacgacgccgaaggagcacgccggctctggaaggaatttcctgccatcccagaggtatgcacttcctccttttggcaaagctagagtttccttgctaattgtcttgccttgtacagttgtactgactagtatggattgctgattgagcctttgtcgtgaaatgtcaggctgccgatttcctccctcccgggaagcaagcaagggctttcttctagacgagctcttctggttccttaagtttgtgggccgtggctatttaatctccaactgcatccccagatattcaccaaattctgtgagactgggaactccgggattggtttggataaggtgttctgggaatggggaaccaatgcccaaacgggacccttgggagtgactactacaaccgcccggcgtccaggttcgctgatggttgtcttgaggacgatcgctactctgacttgaagaagtttgacaagccatggcctgaggtgaactcgtttaagcccactgctgttggtattttgaagaggggattggatccaacgtcaatcactgtccttgaaaggaagacggccgacataagggaacattatatcattggtcggaggcttggtcaaggccagtttggcacaacattcctctgcaccgagatcagtacagggtgtg

SEQ ID NO: 58 - DNA, 673 bp, Zea mays
ttctccctcacgacaccgaaggagcacgccggctctggaaggaatttcctgccatcccagaggtatgcacttcctccttttggcaaagctagagtttccttgctaattgtcttgccttgtacagttgtactgactagtatggattgctgattgagcctttgtcgtgaaatgtcaggctgccgatttcctccctcccgggaagcaagcaagggctttcttctagacgagctcttctggttccttaagtttgtgggccgtggctatttaatctccaactgcatccccagatattcaccaaattctgtgagactgggaactccgggattggtttggataaggtgttctgggaatggggaaccaatgcccaaacgggacccttgggagtgactactacaaccgcccggcgtccaggtttgccgatggttgtcttgaggacgatcgctactctgacttgaagaagtttgacaagccatggcctgaggtgaactcgtttaagcccactgctgttggtattttgaagaggggattggatccaacgtcaatcactgtccttgaaaggaagacggccgacataagggaacattatatcattggtcggaggcttggtcaaggccagtttggcacaacattcctctgcaccgagatcagtacagggtgtgagtatgcatgcaag

SEQ ID NO: 59 - DNA, 582 bp, Zea mays
agcagtgggcttaaacgagttcacctcaggccatggcttgtcaaacttcttcaagtcagagtagcgatcgtcctcaagacaaccatcagcgaacctggacgtcgggcggttgtagtagtcactcccaagggtcccgtttgggcattggttccccattcccagaacaccttatccaaaccaatcccggagttcccagtctcacagaatttggtgaatatctggggatgcagttggagattaaatagccacggcccacaaacttaaggaaccagaagagctcgtctagaagaaagcccttgcttgcttcccgggagggaggaaatcggcagcctgacatttcacgacaaaggctcaatcagcaatcaatactagtcagtacaactgtacaaggcaagtcaattagcaaggaaactctagctttgccaaaaggaggaagtgcatacctctgggatggcaggaaattccttccagagacggcgtgctccttcggtgtcgtgagggagaaaatctcaagcctgaaggcttccaccaccagacttgacacccaaactttgctcaccgctacacgaaatctactcctca

SEQ ID NO: 60 - DNA, 799 bp, Zea mays
  misc_feature (761)..(767): n is a, c, g, or t
  misc_feature (786)..(794): n is a, c, g, or t
gagttatcctgtatattttattatgtggagtccctccattttgggctggtaacttctttattgaaccagtattttgtcattaaatttactctacttcagaaaacctgacctggaaaaaactgcagagactgaacaaggggtggcgcaggctattcttcgtggaaatatcgattttaagcgggaaccctggcctaatgtttcggaaaatgcaaaagatttagttcgacacatgttggagcctgatccaaagctcaggctaactgcaaagcaggttcttggtatgtcatcactgtccagtttgatttggcattcctgatgtatttccatttctgaggtggtcaatatgcttagtaaacactattgttgtcctattggtctggagcatctgattgagatatttgcagtgctattcgactttatctctaaaagaaagagctatctcaattcattgagttctcaacctatgtaaaagataaaccatgcttagaatctgaaattagcttcaacctctacctgtttctgagacagtgcagtttgtgacataattggaggccaaatgcagcaacattgtgcacttcattatttataaaatagaggttccatcaagaaatgtttggataatactttaccacaattcttttcccccaaaagtcatacaactcccacctctgtattatcttttttcactttgtcctttttgattgaggaatgctgacatttccccgcaaaaaatacagaacatcattggcttcaaaatgcannnnnnnctcctaatgtccctcttgnnnnnnnnntaaag

SEQ ID NO: 61 - DNA, 827 bp, Zea mays
  misc_feature (765)..(770): n is a, c, g, or t
  misc_feature (786)..(789): n is a, c, g, or t
  misc_feature (798)..(812): n is a, c, g, or t
  misc_feature (816)..(824): n is a, c, g, or t
agttcccctctgaagcaatcgattttgggctgtcagtgttcttcaggcctggtatgtttttacggacagataatgaccaagcaattaagttttgaacgcatgacatttgttgggaaaaaaattcaatgcatagcggatgcaaatacatctctttgttttcctgttgttgtgcacttgtgcctatggaaattggaaaataataaagtggagtgtctttatgtaattcccatggtaacatgcttcatttcccagcaaaataaaatagagctaacttcgtcgatgcagtttattggacatatgcaatacagaaaatctgaatagttcttggctttcatatgtaggtgagcgatttactgaaatcgtaggcagtccatactacatggctccagaggttctaaagcgaaactatggccctgaagttgatgtttggagtgctggagtgatactttacatacttctctgtggtgtaccaccattttgggcaggtactttaaaccttcagtctggaatgcatgcatgctaataataatttaagaaacgatcgtaatcccatattcgtgatgctatgcagaaactgaacagggagtagcacaggcaattatacgatctgtggtagatttcaaaagagaaccatggcccagagtatctgagcctgctaaagatcttgtcaggcggatgctggacccaaatccattgacacggtttactgcagcacaagtacttggtaagccaccactatcacctattcctactgcacaacgggcnnnnnntgctaccactctatgnnnnttatttgtnnnnnnnnnnnnnnncttnnnnnnnnntgt

SEQ ID NO: 62 - DNA, 599 bp, Zea mays
  misc_feature (480)..(485): n is a, c, g, or t
  misc_feature (528)..(530): n is a, c, g, or t
  misc_feature (539)..(542): n is a, c, g, or t
  misc_feature (568)..(573): n is a, c, g, or t
  misc_feature (577)..(583): n is a, c, g, or t
tgtcatacttactcttgaattttctcacatatttgaaaacaggttatagctgagcatctttgggtagaagaggctgctgacataaaggatatgtttgagaagatggatcttaacaaggatcaaatgcttagtttcgaggagctgaagcttggtctgcataagtttggtcagcaaatgcctgatgcagatgttcaaacactaatggaagcggtgagtttacattcttttcccccacaacagaaacttaatttgcacccctttaatattgtactggagtttttttgtttatgtcaaatacctttggatagtgttttatcaacccggtttaatgtttttccttttcattttaatcgagcattctgtcacgaaggtgatgtgttgggcgctttatagttactgttgtgcatgttgtaccaggcggatgctgatggaaatgggtccttgaattatggagaatttgttacattatttgttcatctnnnnnngatcggaaatgatgagcatctgcataaggcatttgcatacttnnnccggaaccnnnncgattatattgaaattgatgaactcnnnnnntcannnnnnnatgaccttggacaaaa

SEQ ID NO: 63 - DNA, 812 bp, Zea mays
  misc_feature (740)..(742): n is a, c, g, or t
  misc_feature (765)..(770): n is a, c, g, or t
  misc_feature (789)..(797): n is a, c, g, or t
  misc_feature (799)..(800): n is a, c, g, or t
  misc_feature (804)..(809): n is a, c, g, or t
aggtttgattagccttttgtaattttattccacctgactagtaactactattgcacaaaaaaaatttccattttatatggattttttttcctaaatgactttttcacaagcttcacagtttcctatcagttttttgtttacgatctgcaatactccctcaaatgcagcaattatcatgcctatatatggatcttttgagtatttgctatagggttgaggctttaactaaactagttacttgctgtaactcttaaatggttcctgtttttttcaccagctctgatgtgctatggttaatggaacagcaaatttaatttaataaaaaaacctcttccattgtaatatgaacagaaaggcactagtttgtctctgacactgtagtgtagaactgtagacagaatatttcttaagtgcttatactaggataaattgttgacatacaatcttcgctgcagtgtcagatttttaactggccactccagaaatggtgggacagatccactatatgtagctggaaatgcggctgatccagacactactttggttgtgtatatgggtttgtcaacacttccatcacttgctccaaagttaatgaagcacggcctgccgccagatacccctgctgttgcagtagagcgcgggactacacctcaacaacgaacggtagcgacccttagaccctcacgaattaaatcgtgtttatccttgctctgccatcctgaatgtttattgcactgtannncttctcctcgttgaaggatcttnnnnnngaagtcaagtcagccgatnnnnnnnnncnnactnnnnnnatt

SEQ ID NO: 64 - DNA, 499 bp, Zea mays
  misc_feature (489)..(491): n is a, c, g, or t
ccagccttctgtttcggcgaccatggaggatgagaggaacacccagcagcaccagggcggtgaggcccagcaggacgccgccgatcaggtggacgtgaaggatagggggctcctggacagccttctcggcaggaagaagcacgacgacgaccaggagaagaagaagcagacggatgagctggcgaccggcatggagaaggtcacggtgtccgagcccgagaagcacgggcacaaggaggaggagcacgaggtcgtcggcgagaagaaggagggccttctcgccaagctgcaccgcaccagttccagctccagctcggtacgttcatatataaacatggtctgctgatattcggatcagtaaaacggcttgttatacgcagtacgtctatattatttgacacgatcgagagtcacgattatctgaccacgatcgtgcgcgcatgcagtcgagcgacgaggaagaggaggcgatcgatgagaacggcgagnnnatcaagag

SEQ ID NO: 65 - DNA, 408 bp, Zea mays
cccttctggaacattgagtatattgttccagatcaagatgaaccttgcccagagcataagagacagattctggcatactactcccttgctggcaggaggacagattgtcctccatcagtaactctgctttacccggcattttgagtgtagatacttgctttttgccagactgaatctcatggtactaagttccattggtcccactatctgtgaagtaaatggtccctgttcttccaattgatgaggacatgcagacgttccagtgcaaagaaccccaaaggtaagctttaagcaggacggccagctctgaactgaggctagctgagaacaatcatgaatacctgaaggcagcacttatgtcagcttggcctagctgtccagtatgggcatgtaagctttaccatcttt

SEQ ID NO: 66 - DNA, 546 bp, Zea mays
gctgctgttgtcgacatgtcgcggaactgcccggagctgaaggtattccggttatgtataatgggacggcaccagccggaccatgcgactggggagcctatggatgaaggattcggtgccatcgttcagaactgcagcaagcttaccaggctatccacgtccgggcaacttactgaccgggcatttgagtacattggcaggcatggcaagtccctgcggacgctctccgtagcattcgctggaaacagtgatgtggcgctgcaatacatcctccagggctgtccaaagctagagaagcttgagataagggactgccctttcggtgacgctggcctcttcgccgggatgcaccatttctacaacatgcggttcgtctggatgtcaggctgcaacctgaccctgcaagggtgcaaggaggtggctcaggtgctgccacggatggtggtggagttgataaatggccagtctgatgagaacgaaaggaatgaaagcgtggacatcttatacatgtatcggtcactcgatggtccaagggaggatgttcca

SEQ ID NO: 67 - DNA, 601 bp, Zea mays
  misc_feature (368)..(369): n is a, c, g, or t
gggtgactgtgatctttcagatctgattgggtttttccaaacctccaaagcattgcaagaattcgccggtggtgccttttttgaagttggagagtacaccaagtacgaaaaggtcattttcccacctaggctatgcttcttagggggtcttaccttcatgggtaaaaacgagatgccagttatctttccgtattccacaatgcttaagaaactggacttgcagttcactttcctcaccactgaagaccactgtcagcttattgctaaatgccccaacctaagtgttctcgaggtaatgtttttggacatctttaatattactcgtgtgtctaaaataagtgactatctaatttcaactgacaaggtanntgctctcgacaggtgaggaatgtgattggggatagaggactagaagttgttgctgctacatgcaagaagctacgaaggctcagaattgagcgtggcgacgatgatcctggccaagaagagcagggaggagtctctcagataggtttgacagccgtagccgttggctgccgcgaactagagtacatagctgcctatgtatctgatatcacaaatggggcgctggaatccattg

SEQ ID NO: 68 - DNA, 631 bp, Zea mays
attgatttctttgaagatgggtgactgtgatctttcagatctgattgggtttttccaaacctccaaagcattgcaagaattcgccggaggtgccttttttgaagttggagagtacaccaagtacgaaaaggtcattttcccacctaggctatgcttcttagggggtcttaccttcatgggtaaaaacgagatgccagttatctttccgtattccacaatgcttaagaaactggacttgcagttcactttcctcaccactgaagaccactgtcagcttattgctaaatgccccaacctaagtgttctcgaggtaatgtttttggacatctttaatattactcgtgtgtctaaaataagtgactatctaatttcaactgacaaggtagatgctctcgacaggtgaggaatgtgattggggatagaggactagaagttgttgctgctacatgcaagaagctacgaaggctcagaattgagcgtggcgacgatgatcctggccaagaagagcagggaggagtctctcagataggtttgacagccgtagccgttggctgccgcgaactagagtacatagctgcctatgtatctgatatcacaaatggggcgctggaatccattggcactttctgca

SEQ ID NO: 69 - DNA, 444 bp, Zea mays
tgacgctggcctgtgggcccttgctcgttatgctttgaaccttagacaggtaaccttgcgatagtgtttagcttttatccttgcaaattcataagcagctggaaccatataaacatgtgcctgtttttgcagcttacgatatcgtactgccaagtcacggggttgggcctgtgccacctgctgagctccctgcgatgcctccaggacattaagatggtgcacctctcatgggtctcaatagaagggtttgagatggctctgcgagcagcctgcgggaggctgaagaagctgaagatgctctgcgggctgaagaccgtgctctcccctgagctcctccagatgctgcaggcttgtggctgccgaataagatgggtcaacaagcctcttgtctacaaggactagacagactcgtgttcctcattgtgtgtgcagtgtcagcatcag

SEQ ID NO: 70 - DNA, 384 bp, Zea mays
cgtctcttcccggcccccgcgctcgtcggcgaggaggagcgagccgagaagaaggccaccacgtacccgaggttcgtgttcgaggactacatgaacctgtacgcgcgccacaagttcgaggccaaggagccccggttcgaggccatgaagtcgtcggccatcgccaccgcgtgagcacataatactgccgtgttttctcccttcgtgtggggtgcatatgcttgagcttgaagagccatgtgcctgtatgtagtggcacgtacggtggttatgcgtgtatcgtggaatggcgcggcgtgatgtattttggttgtctcagatctaagtgtgtgcgtatatattgtgtactgtaaagtttgtagcgtctggttaatgtacgagcag

SEQ ID NO: 71 - DNA, 474 bp, Zea mays
ctatgaaattcacatctcatgtacgtacgatacaaatatatatcttgtccatgccagaattattcttcatatggttgtcgatctcttggactaattaatatgctttctataccaccacttattaggttatacatgagtcgctaaggctcgcaaacatcgcactggccatgttcaggaaagcaaatcaggatgtgcacataaatggtctgcataatctcaacccctcagtgttcatgtccaataaaaatcttgcgtctatacatacatatcctatactacatattgaagagagtacataatatatatataagccaacatttgtaatccatgcattaatacatatgtggtgtgtgcactcagggtacacaattccaaaaggatcaaagatcatgatatgtccactagcatcgcacttgaatacggaggtctacgaggacccctcagtgttcaatccatggagatggaaggtacata

SEQ ID NO: 72 - DNA, 733 bp, Zea mays
gccgttagttgctgtgggacgacgacgacgtgactgaccggacgttgcgtattatgcaggtggcgccgcgtccgagcacgttcctgccgtttgggcacggcgtgcacgcgtgccccgggaacgagctggccaagctcgagatgctcgtcctcatccaccacctggtcaccggctacaggtgcgtccatctcctctcagatcctctccatatattcccgcttgtcctatagcttgtggaccaggatgacacatggctggctgctgccgctctccatggggctccggctctgatctctctccgtgcatgctccaaatctcctcctgtctgtatgtatgcctgtatcgatcatgtatatactcctgtaccataatctgtggggtcctcgaaatgtacgtcttcactagccccgctgtgctctccctcctatataaactgtggtgatcgactgctataacgacagtttactgatcttacactgagacactgattggcgtctctgcatgctttatttttaaatttgcaggtggcaaatcgttggatccagtgacgaggtcgagtacagcccgttccctgtgcccaagcacggcttgcctgtcagattatggagacaaaacaatccggtcgacataaaggggcgtgagaccgacgacgatcatatggaggaggatattttagtttgactcttgagttaggcatgaatttaaccccaagctagctagagaagtttttttt

SEQ ID NO: 73 - DNA, 1144 bp, Zea mays
  misc_feature (1133)..(1137): n is a, c, g, or t
agcttccggggactcaactctatagatccctcaaggtaaacaccgggaaccctattttttttacctctctctctctctctatatatatacttccttgcaatgagttgaactgcggtaactatatatagggctgtttggattaatttcctcctctaattaagcttcatatatgtgtgctatatatggtatcaacaaacactacccagagcaggctaagaagaggatgacaaagttgataaaaacgatcatccaagagaagaggaagaagatgatgtcggaaggaggcgacgatctgcgtggtgggactcatccacgtgatatgatcgacgtcctgctaggcaacggcaacgacgagctcaccgacgagctgatatctgacaacatgatcgacttcatgatccctgcagaggactccgtgccggtgctcatcacgctggccgtcaagtacctcagcgaatgcccactggctctgcagcaactcgaggtacttttttcagtttattaaaaataaggacaaaagattgtctatatatatagtttctgtacttgaaccttcaactgttagttgttttattggctcaatccaaatgaagccaattaatatttggtgtttcaatataattggagagacgatgcaattgaagggattagatttccggactcacgagagttgctatgccaaccatacacatagagagatcaggaaagatagagaacaacggcaacctgctatatatgcgatagataaactatactgaattatgtgctttaaggccatatatctaaattggatctcttccaaattatgtctaactgaccaagacattcttgtacttcagcatgttctgcacatgtaaccatttatatatgcaggtgaccaataatagtttgtattttctccatgttttggcttctctggatatattgtttttttttactgtgcatttagacagagacttattgtgtatatctaagtgtgtgatataagaccttatttttaaatatcttataagacttactgtgcatctagacagacttactgtgtatatctgaattatgtgttttaaggacatatctaaaaaagtttattatttgtgttgatctttataaaaatctgttacaggaggagaacnnnnnctcaaga

SEQ ID NO: 74 - DNA, 631 bp, Zea mays
agcaggtgcactcgttagaaaacacaatttgctatgttgtggcatgctcatgctcttcttttctatgagaagatagatatttatatatgatcgacaagagaatctaggaaggagagagctcatgtggctcccgtgcgtcccgtttcgcgtgtgcagggcaagagcaagctgcagagcgcggaaggggccagtctgttcacgccgttcggcggcgggccgcggctgtgcccgggctacgagctcgcccgggtggtggtttccgtcttcctccaccacctcgtcacgcgctttaggtgagccgtccttctctttattctctcccgccggctgtctcttgaggcggctgagtttcagctcggctctgtgtgtgtgtgtgcacgcgcgctcggaagtcggaacgatgctatgccgctcgctctgattggattggattcttgaccaacaaacagctgggaggaagccgaggaggacaggattgtcttcttccccaccacccggaccctcaagggataccccatcatcctacggcggcgaccggattgcgatgatctctgacctcatggctatgttctccccccttatcttcttcggatcaaggccgaaggctaagcattagatagagtaaggtgga

SEQ ID NO: 75 - DNA, 824 bp, Zea mays
  misc_feature (727)..(735): n is a, c, g, or t
  misc_feature (740)..(752): n is a, c, g, or t
  misc_feature (778)..(803): n is a, c, g, or t
  misc_feature (808)..(817): n is a, c, g, or t
ccaccgtgttcctgcaggagaacccggacatgttcgcgagagcaaaggcaggttctttctttctttctttgttgtttaattttatcctgaaagctagctgaacaattaagtgcgtgctcttcattcccatgccaccaggcggagcaggaggcgatcatgaggagtatcccgtcgtcgcagcaggggctgacgctcagggacttcaggaagatggagtacctgtcgcaggtctgctccgatccaatccaattctctgacgatgctagcttgcattgcatcagtgcaaaaacatgctccatggcctgactgactgactgactgactgatcccgtgaacgaaggtgatcgacgagacgctgcggctcgtcaacatctccttcgtctccttccgtcaggccaccagagacgtcttcgtgaacggtacgctgcatgctgtgcggcttcaattcatcattcattcaggaacctcacctcgctctggaacaggatacctcatccccaagggctggaaggttcagctctggtaccggagcgtgcacatggacccacaggtgtaccctgaccccaccaagttcgacccgtcgaggtgggagggccactcgccgagagccggcacgttcctggcgttcgggctgggcgccaggctctgccccggcaacgacctcgccaagctggagatttccgtcttcctccaccacttcctcctcggctacaagtaactaactaannnnnnnnntatcnnnnnnnnnnnnncgacgattattcctttcttttttttnnnnnnnnnnnnnnnnnnnnnnnnnnctgannnnnnnnnntgcgtgc

SEQ ID NO: 76 - DNA, 905 bp, Zea mays
  misc_feature (768)..(777): n is a, c, g, or t
  misc_feature (779)..(798): n is a, c, g, or t
  misc_feature (804)..(809): n is a, c, g, or t
  misc_feature (815)..(818): n is a, c, g, or t
  misc_feature (822)..(826): n is a, c, g, or t
  misc_feature (839)..(850): n is a, c, g, or t
  misc_feature (856)..(870): n is a, c, g, or t
  misc_feature (877)..(884): n is a, c, g, or t
cgtcatcgtaagttcttctctccctgccggcccggctcatgcctggcaccagatcgactgcgtgcgtgcgcccgccgcgcggagactgacgggacgagctggtgttgtaggaggagcagcaggagatcgcgcggtccaagggctcctccgacgagcccctgacgtgggcggacaccaggcggatgcgcacgacgagccgtgtgatccaggagacgatgcgggcggcgtccatcctctccttcaccttccgggaggccgtggaggacgtggagtaccaaggtgaggcgtcaatcatactcatgcggtcatgcccctcgctgtcaaaaaaactcgcgccaccgtttcacgttggattggaggcgggggcagtctgtccctgtcgtgcgctgctgcggatgaactggacggacgggacgcgttcctaaccgaaatgaatagactgactgactcatccgctgtgtgctggcttgcagggtacctgatccccaagggctggaaggtgatgcccctgttccggaacatccaccacagccccgaccacttcccctgcccggagaagttcgacccctcccgattcgaggtcagtctctctctgcttctgcttctgcttcgccatttgtgccatgtcagacaggtcctcatggctgggcctctgtttcaggttgctcccaagcccaacacgttcctgccgttcggcaacgggacccactcgtgcccgggcaacgagctcgccaagctggagatgctcgtgctcttccaccacctcgnnnnnnnnnncnnnnnnnnnnnnnnnnnnnncgagannnnnntgcagnnnngccnnnnngcgctgccgctcnnnnnnnnnnnnatgacnnnnnnnnnnnnnnnctgatgnnnnnnnnacagatgtgtggatcggacgg

SEQ ID NO: 77 - DNA, 858 bp, Zea mays
catctgtcggcggctcatcagtccttgcggacgaaggtcatgggcaggccgttgagcggcagcgcgaaggggccgaactgcacgccgctctcggacttggaggtggaccacctgtacttggtggcgaggtggtggaagagcacgagcatctccagcttggcgagctcgttgcccgggcacgagtgggtcccgttgccgaacggcaggaacgtgttgggcttgggagcaacctgaaacagaggcccagccatgaggacctgtctgacatggcacaaatggcgaagcagaagcagaagcagagagagactgacctcgaatcgggaggggtcgaacttctccgggcaggggaagtggtcggggctgtggtggatgttccggaacaggggcatcaccttccagcccttggggatcaggtaccctgcagccagcacacagcggatgagtcagtctgtctattcatttcggttaggaacgcgtcccgtccgtccagttcatccgcagcagcgcacgacagggacagactgcccccgcctccaatccaacgtgaaacggtggcgggagttttttttgacagcgaggggcatgattgacgcctcaccttggtactccacgtcctccacggcctcccggaaggtgaaggacaggatggacgccacccgcatcgtctcctggatcacacggctcgtcacgcgcatccgcctggtgtccgcccacgtcaggggctcgccggaggagcccttggaccgcgcgatctcctgctgctcctcctacaacaccagctcgtcccgtcagtctccgcgcggcggacgcacgcagtcgatctggtgccaggcatgagccggcagggagaagaactta

SEQ ID NO: 78 - DNA, 477 bp, Zea mays
  misc_feature (472)..(474): n is a, c, g, or t
gctttggtttggttccgtcggcctgccgtggttttggtgtggctccgtccgatccacacatctgtcggcggctcatcagtccttgcggacgaaggtcatgggcaggccgttgagcggcagcgcgaaggggccgaactgcacgccgctctcggacttggaggtggaccacctgtacttggtggcgaggtggtggaagagcacgagcatctccagcttggcgagctcgttgcccgggcacgagtgggtcccgttgccgaacggcaggaacgtgttgggcttgggagcaacctgaaacagaggcccagccatgaggacctgtctgacatggcacaaatggcgaagcagaagcagaagcagagagagactgacctcgaatcgggaggggtcgaacttctccgggcaggggaagtggtcggggctgtggtggatgttccggaacaggggcatcaccttccagcccttggggatcagnnnccc

SEQ ID NO: 79 - DNA, 471 bp, Zea mays
tttctaaaagtgagcaggcattgaatgataagaagaaatcaatggaaaacttgcagaatgatcttgatgccaaatctaaggctctgaagagttgggatgaatcattgaaaaatgacgagaaaaggttactgaaagaaaagcagcaaatggatcatgaaagagaacaattggagacatacaaattggagcttgaaaagaccaaatcagcattagaagctgagaaggaaaaaatatcagaagagcagaataatctgaaactcacagcgcaagagaggcaggagcatagcttgttgatagcaaaacttaagaaggagattgaggaatacagaatgcgaagcaactccctatctgaggaaatggaggatttaaggaagcaacggcagaaatttgaagaagagtgggaacaactagacgaaaagagagccctccttgtagaggaggacaaaaggttgaacattgagaggatgaatt

SEQ ID NO: 80 - DNA, 668 bp, Zea mays
aagtttcgtggagtccggcagcgccactggggctcctgggtctctgagatcaggcatcccctcctgtaaggcctccgtccctctaatttttagggaacataaactactgatgcaaccataattctgaattgcaatgcatgtatctttttgtgatacgtacagtaagaggagggtctggctgggtacctttgagacggctgaggaggcagcgagagcatatgatgaggctgctgtgctgatgagcggacgcaacgccaagaccaacttcccaatccaaagaagcagcacaggggagcctaccccagctgcgggaagggacgcccgcagcaacttcagcagcggctcctctaccaccaacctgtcccagattctcagtgcgaagctccgcaaatgctgcaaggcgccatcaccgtccctgacctgtctccgccttgaccctgagaagtcccacattggtgtttggcagaagcgtgcaggagcccgtgctgactccaactgggtcatgacagtggagctcaacaaagatgcagcatccactgatgctgcatcacagtccacatcagcaacaactgctccaccagccacgccgatggatgaggaggagaggatcgcactgcaaatgatcgaagagttgctgagcagcagcagcccagcttcaccctcaaacg

SEQ ID NO: 81 - DNA, 1049 bp, Zea mays
  misc_feature (1017)..(1020): n is a, c, g, or t
gatccgcgatgtagtcttatggagtaccaaaattcccgttgaaatgttttaccctaaccttcgacatattcatatatccgattgagaaagatttatcttttatgtaataatagtgtgttcctttgtaggcggaagatcttgcggcagcacttaaagcaagcaggatgaaccctgtaaaggccgaggccaatgatacggtcagtagatatcttcgagatatatgtttccttcgtaaattaactgtgaaggttataccgttataaaatatgggttttctttagcttagagatctgataatctgatagctggttgtgtaagtacacgagcaatcccatcatgctggtgttactggtaagttacttgcatcggaaatatttggcactagtatttagcatgtcaaccaggcaaacttctagtaaatatcatgagaatatggtagtgatgaaatgctgaatcatgaagtgacagctttcagatttatcaccttgacatcttatcaacatgttctattggaaattgtgatcgtaatcacagtattggatgtatgctttgcactagaaaataaaattaattatgcaggagtggtgatttagtgatcaaaggggcaattgagttttagggtacgcaagaatttgctatatatctagaattctagatgcataacagaatggatgtagcgaaaaaagtcaaagcggcttagaatttggaacgagagggagtactattttttttcttgagatgttgatgcattgatgctgtgttggtgtaaatgccaacacttggtgctcttgcaatctgtaacaggctgctgggagttctcagggtattagtggcggggcaggagttcagggccagtatgcacctgccgctgttcttgggggagtggctcagcctcgccccacaggtatggcgccccaactaatcggcagtgggtcggatcctctgcaaggagacgacgaggagaccaggagactacgcgcagagcgagcagcacgggctggcggatggactgctgannnnagcaagagaagagcgctggaggaggcgtt

SEQ ID NO: 82 - DNA, 368 bp, Zea mays
ttgacgacggacctctgggcgaggtgttcaagggcaagagttgccagtcagcatccgcagacatcttaactgaccattggacttcgactcgtgacttgcgtcctccaaccggagtcctacaaatgtctagcagcaacacagtgccagcagagaatcacacgagtaacagtagctatctcatggcgaggatggcgaattctcagaccgtcccaacactccactgagtgttcatcaggctggtctttgttgggaccacaaaataactgaagccatgttgatgtcctgagtttgctgatacagtgatactaggttttcagtcgagtcttgtaactcctgttttagagttgttatatgttcacgtcatgtcg

SEQ ID NO: 83 - DNA, 368 bp, Zea mays
  misc_feature (59)..(59): n is a, c, g, or t
  misc_feature (102)..(102): n is a, c, g, or t
  misc_feature (114)..(114): n is a, c, g, or t
  misc_feature (345)..(345): n is a, c, g, or t
ttgacgacggacctctgggcgaggtgttcaagggcaagagttgccagtcagcatccgcngacatcttaactgaccattggacttcgactcgtgacttgcgtnctccaaccggantcctacaaatgtctagcagcaacacagtgccagcagagaatcacacgagtaacagtagctatctcatggcgaggatggcgaattctcagaccgtcccaacactccactgagtgttcatcaggctggtctttgttgggaccacaaaataactgaagccatgttgatgtcctgagtttgctgatacagtgatactaggttttcagtcgagtcttgtaactcctgttttagagntgttatatgttcacgtcatgtcg

SEQ ID NO: 84 - DNA, 431 bp, Zea mays
ggatccattgggctcaggcttctattccgttctctgaggaagagctcgagtacatcagaaatcttgatccaaggaaagatgtgcagatgctgcgccgggaacttccgatgatacgtgaggcctgcctacatgtactggccctgtgcacaatcttccttaaggaggctgcagctttcggactctgcttggccgagataggcgagatgatgaccagggagttcagagggatggaggaggaaccaagccagctggagcttatgtgtatggaggccaggaagagagtagcagagtgggagcccttctctgccacagctgaacatggagaagatacagatttccagttctcggtggatatgctaggagaatacagtgatgtagtgcgatcaccaaggttcaatggctcaggttccaaagtgtccagtttcagaagc

SEQ ID NO: 85 - DNA, 840 bp, Zea mays
  misc_feature (22)..(22): n is a, c, g, or t
cttggagacatgctgttctgtnatgcagttcgtaatcctggccttattattgacattgtacaaggtatgattcactgttctgtccttgtctttgctttcttatgcaacattgagcttgaaatctttacagatatacggctgatgaatggggaagccatccatgcaacaccaaggaagacagggattatagttcttggtggaggccttccaaagcatcatatatgcaatgccaatatgttccgcaatggtgcagattatgctgtgtatattaacacggctcaagagtttgatggtagcgattctggagcacaccccgatgaagcagtctcatggggcaagattaagggttcagcaaaacctgtaaaggtatatgttccttcacgaagcttcagatgctgtttcttatgtttcacataactctagttaaacttactctggtaaacgtcacgctgcacacaaactcttgctgttgatttgtcttgcaacgaggtatcaaaacaatcgaaaagtatatttttattagggtcgaaaagtatattttattagggtcgaaaagtatatataaagctgtatattaatttctaaaacaacttaacttctgtcactgtgggcaacttccgcactgacagaatgttagaacgctgcattttaggcttcaaacatgcaccatcttacattctctaataactgtaatgaattattatctgattatttaatcgtgctttatctgctaatagaagatatcaagaagaaaccagcataatgggagagcacgtattagtctagcaatctaatccgttctttgaactggaaatgcaggtgcattgcgatgcaagtatc

SEQ ID NO: 86 - DNA, 549 bp, Zea mays
  misc_feature (500)..(503): n is a, c, g, or t
  misc_feature (514)..(519): n is a, c, g, or t
  misc_feature (525)..(527): n is a, c, g, or t
  misc_feature (534)..(542): n is a, c, g, or t
acatattcaacgggaaaaagctcgaagatattgttccttcgtcacacaactgtgatgtaagttaatttctgtgttaagctaagttcttttgatggttcacttcatacgccactcacaagtttgacatttttttaagattccgcatgtgaaccgtactgagtaccagctgattgatatatcagaggatggatttgtatgttcctctaatcattaaaactacattcttctttgaaataaatgttaacttcagtcttatattttaatttaatttgtttcaggtgagccttcttacttcagatggcaacactaaggatgatcttagactcccaactgatgagactcttgtggcccaggtctgtttgaaaacatttttcatcttaagtcttgttggttttcttattgacttccaaatattacagatggtggttatctttgttagcttattagtcatatgttctttcttggtagcttctcttccttgatgtttgttaattgatctnnnncttataaggannnnnnaaagtnnngccttgnnnnnnnnnacattcc

SEQ ID NO: 87 - DNA, 769 bp, Zea mays
  misc_feature (710)..(720): n is a, c, g, or t
  misc_feature (724)..(727): n is a, c, g, or t
  misc_feature (734)..(736): n is a, c, g, or t
  misc_feature (764)..(765): n is a, c, g, or t
attgttaactttgcattcctgctgcaccaccttcctgatgaaagtgtctcaattatgaaccaaagggatcggcttctccgtatggtgaagggtctccgaccaaaactagtgacgttggtggagcaggacgcaaatactaacaccaccccattcccttccaggttggttctctcgtgaacatttttactgcatctggttggtacacagagttgtctaaaccgatgatatacatgctgtttaactacccatttcagcaaacatgtgtgcttcacgatgctgaccttgtgaaagaaatgtggtttttttgaactttgtgccagccttacactatcatatagttatatctctgtggttcctcatgttgccctttggtatgcaggttccgggaggtctatgactactattcggcactttttgattcactggatgccacccttccaagggaaagcccagatagaatgaacgtggagcgccagtgcctcgcacgggaaatcgtcaacatcttagcttgtgaaggtcctgaccgtgtggaaaggtaaattcttaacagcgctcttccatgagtcctggtctcatgcacgttgcaaactccaattaatgtttatacaccagctcaaaaaaaatgctattaccctgcaggtatgaagtggctgggaaatggagagctaggatggcaatggcgggctttgtgccgtccccatttaacagcnnnnnnnnnnntggnnnnagatctnnnctgaaatcgtactgcgataagtacaggnncgag

SEQ ID NO: 88 - DNA, 717 bp, Zea mays
aatggttggcaaaagtaacattcctttgttttatctgcaatattaacatctattttaaatttgtgtgctgtaggcattttctattacattctttggtgagtggggtgacaagagccaggtaagttgtataaaagtaccgtttatcttctagctctggaaatcgtctattgagtcataaatagataatgtttttgctatattgatgaacctcttgtcagattgctacaattggcttggctgctgatgaaaacccgttcggtgttgtcctgggtggaatcatgtaagagctgcttcttttactgacctggctgctctatttacatggcttattgtgtgttccctggtaaaaacttctttctgtgcttagagcgcaagcactctgcactactgctgccgttcttggtggaaagagcctagcgtcccagatatctgagaagatggttggaactagactcattttctttgcactcctgtaaaatgtccagcattagttcgatgcttgtctggttgtaggttgaactgtcaagcggagtgctcttcctgctcttcggtatcatgtccttactctctggaccagaaggagaattgtaatccctgcttgagcctttttcagctagctgattaacatggctttctcttcttagacctatcttatttcagtacatgaatgatggcaacgaaagccatccatccatggcgaacaggatgttgatttaa

SEQ ID NO: 89 - DNA, 693 bp, Zea mays
  misc_feature (530)..(541): n is a, c, g, or t
  misc_feature (561)..(568): n is a, c, g, or t
  misc_feature (571)..(580): n is a, c, g, or t
  misc_feature (602)..(614): n is a, c, g, or t
  misc_feature (621)..(623): n is a, c, g, or t
  misc_feature (633)..(688): n is a, c, g, or t
ttcactttggagctttttgattcaatactgtcagaggtaagtaattgtttgttgctgtcctggatttcaacaaatgagtaatgaaattagatgcttatctttagagttgcttgctctgcataatttcccagccagcattggtcaaagatagcactaatttcttatctgaatggttaatggtctaattataattttgcttggtcttatagggaagtaaaacgaagacaaagatgggcctgcgaaacataatctgctcaatccagaaagaaaagaaaggttggtggaagcgcttgctaaagtcagaggaaaagcatccatacatcaaagttgactggaacaaatggtgcgatgaggatgaagagtctggtatgtgctaatgatatacatccccagatatatgcagttgtttttggtctagatgcattctgaatttagtatgaataaagggttgtaaaaaatcaagccaggttggaattcagtagtttaaattgatgaaatgtgtattttttttatggaacttggatttgttnnnnnnnnnnnnatggagtccattccaaactnnnnnnnnttnnnnnnnnnnctactacaatttactttgggtnnnnnnnnnnnnnaatcttnnngactatttcnnnnnnnnnnnnnnnnnnnnnnnnnnnnnnnnnnnnnnnnnnnnnnnnnnnnnnnnattaa

SEQ ID NO: 90 - DNA, 750 bp, Zea mays
  misc_feature (644)..(652): n is a, c, g, or t
  misc_feature (676)..(679): n is a, c, g, or t
  misc_feature (700)..(746): n is a, c, g, or t
tttaatactacatgctttctcttatggatgtagcatttcagtttctaattgtatcggtcttgctgtttggttagtttaatatttaatacatgtttttctcttatggatgtaccatttcggtttctaattgtatctgtactcctgtttgcaggagagcaaagcagctattgccccaaggaccatatgctacctgataaagaaagctaagagcgggtggtggccaaggctgctgaagcaggagggcaaaccacctgtgttcttgaaggttgattgggacaaatggcaggacgaggatgatgaagacgctggatgttagtgtttcatttttggttgattatgttttcctttccttactactgcaatactatttagtttagcttgaagtaacatatattattcgtattgcagttaatgactttggtggtatggacttctcggtaagtgtctagtggaagcctcctttgacgattaaggtgggagcaaagtttcatggtactttcgtcattgtagaaactggacataggaggtgctgatgacgacgatattggggatgatgaagatgatgtggttgaaagtgctaacaaaggtacatcgttctcgttgtcatcatgattatttatttgctcaagggcagttgttgctgnnnnnnnnngtagctttacactatcatgggagnnnngacattctactacttatttgnnnnnnnnnnnnnnnnnnnnnnnnnnnnnnnnnnnnnnnnnnnnnnnttct

SEQ ID NO: 91 - DNA, 671 bp, Zea mays
  misc_feature (606)..(609): n is a, c, g, or t
  misc_feature (631)..(644): n is a, c, g, or t
  misc_feature (647)..(660): n is a, c, g, or t
tatttaatactacatgctttctcttatggaatgtagcatttcagtttctaattgtatcggtcttgctgtttggttagtttaatatttaatacatgtttttctcttatggatgtagcatttcagtttctaattgtatctgtactcctgtttgcaggagagcaaagcagctgttgccccaaggaccatatgctacctgataaagaaagctaagagcgggtggtggccaaggctgctgaagcaggagggcaagccacctgtgttcttgaaggttgactgggacaaatggcaggacgaggatgatgaagatgctggatgttagtgtttcatttttggttgattatgttttcctttccttactactgcaatactatttagtttagcttgaagtaacatatattattcgtattgcagttaatgactttggtggtatggacttctcggtaagtgtctagtggaagcctcctttgacgattaaggtgggagcaaagtttcatggtactttcgtcattgtagaaactggacataggaggtgctgatgacgacgatattggggatgatgaagatgatgtggttgaaagtgctaacaaaggtacatcgttctcgttnnnntcatgattatttatttgctcannnnnnnnnnnnnntgnnnnnnnnnnnnnntttacactatc

SEQ ID NO: 92 - DNA, 321 bp, Zea mays
gctcgcgttcttcgacgtcgctggcagcgtcctgcactgctggaccatgcatgcccaaaaattaaagacgacgacgacgacgaccgctgctgctgctgcagctaggcactaaattaagctttgctggatcggagttattaatgttcgttgctgcctcgcggcggtacgatgagttgatgatgcaattaattatttggttttgtcgtcttttcgtgcgtgagagggaagcaataataattaattgctgctgcttctgttgttgtgtgcacatgcatgtgagggtgtcaagtatgttcagcctcttgcaagataaaatctctc

SEQ ID NO: 93 - DNA, 391 bp, Zea mays
  misc_feature (274)..(274): n is a, c, g, or t
  misc_feature (277)..(279): n is a, c, g, or t
  misc_feature (298)..(300): n is a, c, g, or t
  misc_feature (329)..(332): n is a, c, g, or t
  misc_feature (351)..(351): n is a, c, g, or t
gcttgccaattcaactgtagagatcatgacacagttcgatgaatttgatgtgcctgcagctctttatacagcttaaaatgcaattgttgcaatagcagaaggtgctcgcgtgagcacctagaaccaggcacatttatcctgggatattcaatcatttgtacatgtacacttgaaagagaactgacatcttttcaacctgaaaatttataagctttatgtaaccgtgaaggtcggatattgcacatgtaaaattgggcttttcccctagacccanggnnnagaaaaattaagaaactcnnngtgattcatatggacccagctgcactaannnnctgctgtgccactcagctnattaccttaaaattattacctgtgttgttgtcctttgctc

SEQ ID NO: 94 - DNA, 519 bp, Zea mays
cgcctcaaagccaaaggtaaactaactaagcatatattatattcgtctactagctgcagtacgtctgtctgaatcttctgcatgcttgcaatgcaggtatcgagccggacttcgggctctacggcctcaaggcgatcaccaaggtcttcaagagcggcatcaacgcgacgccggtgatccagtgcagcaagggccccttcgacaagtacatgctgttccagctctacttctgcgcggcggggaacggcacgttcatcgactgccccgcgccgcagcagtacacctgctccaaggagatcctcttccaccccttcaagaagtggatgctcaagcagcagctcaaccaggacgacgaccctttccagctgcctggcgtcgccatggacaactgatacaccgaccccttcaagaagtggatgctcaagcagcagctcaacgaggacgacgaccctttccagctgcctggcgtcgccatggacaactgatacaccgtaccgtcgtctctgtttgcgtttctgt

SEQ ID NO: 95 - DNA, 438 bp, Zea mays
cactcgttcgcctcaaagccaaaggtaaactaactaagcatatattatattcgtctactagctgcattacgtctgtctgaatcttctgcatgcttgcaatgcaggtatcgagccggacttcgggctctacggcctcaaggcgatcaccaaggtcttcaagagcggcatcaacgcgacgccggtgatccagtgcagcaagggccccttcgacaagtacatgctgttccagctctacttctgcgcggcggggaacggcacgttcatcgactgccccgcgccgcagcagtacacctgctccaaggagatcctcttccaccccttcaagaagtggatgctcaagcagcagctcaaccaggacgacgaccctttccagctgcctggcgtcgccatggacaactgatacaccgtaccgtcgtctctgtttgcgtttctgtcaag

SEQ ID NO: 96 - DNA, 303 bp, Zea mays
tgatgacgactccggtatctactaccagctggctcttatggtatgtataataataattattatatctaatctaattaagaagaaggcccggccgccggcctgactgcatgcatgggacgcccgcgtgcagtggccaggagcatactgcgagcagaccagcgctgggtgctgcaagccgaccaccggcgtctcgccggcgcgcgacttctacataacgggcttcaccgtccttaacgcgaccaccgacgctgcagtgacgggatgcagcaacaaagttccttacgaccctaacctgattaccgg

SEQ ID NO: 97 - DNA, 726 bp, Zea mays
  misc_feature (666)..(670): n is a, c, g, or t
  misc_feature (714)..(714): n is a, c, g, or t
agtttcgatgctagacgaagcaatcgactacctaaaatcacttcagctacagcttcaggtactgaatgaaatcatatcagatacacaattgttggttacactaaacatttatttatttttatctttctctcctgcatcctttcatgttttatttattcagcctccagatattatgggtgctatagtagtgtagtctggagatgtaaactaccaatgcaattcattcatggattttctgatcatcacattgtcatatgtacacacagatgctggtcatggggaagggaatgtcaccagtggttcctcttgagctgcagcaatacatgcattacatcacggctgaccctgcccagttgcctccgttgcgcccctccggccagcagccccgacaatttcagataactcaagccaacccccagcgacaatctaacgtcgagtcggatttcttgagccagatgcagaacttgcactcttctgagccgcctcagaactttctcaggccaccgaaattgcaactttatacaccggtaatatgttcaaacattatatctatcaaagttaattttaaccttttcttgtctttatttttcttttctcgtatttcacgcatttcaaaatttaagatttttctttgtggggaaagatgaaaatttaagctgctagatnnnnnatatacagttcaaatggcaacactgtcagcttttacctgaacgntgctagctactc

SEQ ID NO: 98 - DNA, 693 bp, Zea mays
  misc_feature (677)..(678): n is a, c, g, or t
gcatagctggtatggaagggtgcaaaatgcaatttgtttacatggaactgctatcgttattctagattttgttaatgttgcttcccacatgtttcctcaggtggtacattggttccaatcagttggactgagatgcaatgtgatttgaccggtcaaattgagcaaaggaaagttgcaaaggtggaatagatgtgctgtggccctcctgataaatggtaaacatgttagtaacttatcttaatttgagctttcccttgtgtgggatacatgtacttctatctggaaagtatgtttttcatgtactagaatgctgatgatttgttgcatcatgtggttttcttatgatcttttatactgcagtagaaatttgactgcctttgttgtcattaaccattgaatgctcgcttgccttgccatttgttctcattcactcatgactcatgtatcacaaatttctttgttctcatgaaacaggtggtggcggtatacaaattgtggaccagtgacaccaggtccttgggcggactacccaattctgcgacgcccaacttcattacagctgcattgagcatgggtttttaaaaccctggctgaatttaaccagacatgaatcgtagccatgggtcctgtaacccaaccttgggatctgaatcatagccatgggttctgtaacccannaaccttgcccttgtg

SEQ ID NO: 99 - DNA, 689 bp, Zea mays
gcatagctggtatggaagggtgcaaaatgcaatttgtttacatggaactgctatcgttattctagattttgttaatgttgcttcccacatgtttcctcaggtggtacattggttccaatcagttggactgagatgcaatgtgatttgaccggtcaaattgagcaaaggaaagttgcaaaggtggaatagatgtgctgtggccctcctgataaatggtaaacatgttagtaacttatcttaatttgagctttcccttgtgtgggatacatgtacttctatctggaaagtatgtttttcatgtactagaatgctgatgatttgttgcatcatgtggttttcttatgatcttttatactgcagtagaaatttgactgcctttgttgtcattaaccattgaatgctcgcttgccttgccatttgttctcattcactcatgactcatgtatcacaaatttctttgttctcatgaaacaggtggtggcggtatacaaattgtggaccagtgacaccaggtccttgggcggactacccaattctgcgacgtccaacttcattacagctgcattgagcatgggtttttaaaaccctggctgaatttaactagacatgaatcgtagccatgggtcctgtaacccaaccttgggatctgaatcatagccatgggttctgtaacccagtaaccttgccct

SEQ ID NO: 100 - DNA, 429 bp, Zea mays
  misc_feature (292)..(297): n is a, c, g, or t
  misc_feature (310)..(374): n is a, c, g, or t
  misc_feature (377)..(383): n is a, c, g, or t
  misc_feature (385)..(398): n is a, c, g, or t
  misc_feature (402)..(406): n is a, c, g, or t
  misc_feature (411)..(412): n is a, c, g, or t
  misc_feature (418)..(422): n is a, c, g, or t
gctgttgcgataaaggtgactttttgacttgtattgcttgttacttgcagttttaaatttcgtattttcttgcaactgtttgaatggagcctataatttctacttttagtttgtgctagcttaacaatacccagtgagctgtgtatatgattgagttactaccccaaaattcaccgattcatttcttctgtgaatcccactttgttgtttaagagtctggtcaagtgacatgacaacccttggcatatcctcagaccattctattcgagataaagtgttttttttccctttnnnnnnaacacaaaaaatnnnnnnnnnnnnnnnnnnnnnnnnnnnnnnnnnnnnnnnnnnnnnnnnnnnnnnnnnnnnnnnnnggnnnnnnnannnnnnnnnnnnnnaggnnnnnttganngatacnnnnntaccaaa

SEQ ID NO: 101 - DNA, 522 bp, Zea mays
agtctcactcgccaaataatgctggttctcaagaccatgagactcacaagcagtacacgctggagtcctcggcggcttccggttgttcaaggcatggttctccctccagccaaagcgtccatgccgggagtggcagccctgtgtctcacgacgacagccactccggctccacgaacggccatggatcacctgtgagcgcgtcgtgtgtcaccggcgaggaccctactgatctcaagcagaaactgaaggatcttgaggctgtaatgctggggacgtctgagactgaccccgagatagtcaacagtctcgagatctccgcggcaaaccaactctcgttggagcccgaggagtgggagcacatggtgagcatgcccagagggaacctgaaggagctgctgattgcctgcgctagggcagtggaacgtaacaacagctacgccattgatctgatgatcccagagctgaggaagatggtttcggtgtccggcgagccgcttgagaggctgggagcctacatggtgg

SEQ ID NO: 102 - DNA, 384 bp, Zea mays
ggagggctttggtgtcaatacctacaccttgatcaacagggatggaaagcctcaccttgtgaaattccattggaagcctacttgtggtgtgaaatgcttgctcgacaatgaagctgtgactgttggaggcacctgccacagccatgcgacgaaggatctatatgattccatcgcagctgggaattaccctgaatggaagctctacatccagactattgatcttgaccatgaggataagtttgactttgacccgctcgatgtcaccaagacctggcctgaggatatcatcccgctgcagcccgttggacggatggtcctgaacaagaacgtcgacaacttctttgcagagaatgaacagattgctttctgcccagcgattattgt

SEQ ID NO: 103 - DNA, 382 bp, Zea mays
ccgtccgactaccgccacatggaagggttcggcgtgaacacgtacacgttcgtgagcgcggcggggaaggcgcagtacgtcaagttccactggaagccgacgtgcggcgtgcggtgcatcctgacggacgaggaggcggcgctggtcgggggacggaaccacagccacgcgacgcaggacctgtacgactccatcgcggcggggagcttcccggagtggacgctgtacgtgcaggtgatggacccggacacggaggagcagtacgacttcgacccgctggacgacaccaagacgtggccggaggacctgctgccgctccgccccgtggggaggctggtgctggacaggaacgtggacaacttcttcaacgagaaacgagcag

SEQ ID NO: 104 - DNA, 594 bp, Zea mays
  misc_feature (65)..(65): n is a, c, g, or t
  misc_feature (90)..(90): n is a, c, g, or t
  misc_feature (495)..(498): n is a, c, g, or t
  misc_feature (524)..(526): n is a, c, g, or t
  misc_feature (533)..(541): n is a, c, g, or t
  misc_feature (548)..(553): n is a, c, g, or t
  misc_feature (560)..(567): n is a, c, g, or t
  misc_feature (569)..(575): n is a, c, g, or t
  misc_feature (577)..(581): n is a, c, g, or t
  misc_feature (585)..(589): n is a, c, g, or t
ggagggaaggaagaatggtacttgtgtaattcatgtgtaaaactatcttgttcctgtcagcatcnaacagttatgcatatctgggctccntgtttgcctgaagttttattaaacaacataagggcttcattcaacagctcactgcagtaacaatgcaccctcgtttaatatggaatctattcagtaaaccaagtagaaattctgactttgttcaacttacagaaagtatgagttatcaaacttaagaggctcctttgtccaggcaccatcgaatccagacctctcagggtgagcccttccctaaaagaacaaatgtctcaagatgtgcgtatgaacaaatgagtactccttcagagacaaaccatttaccagagtatgtccccctgatagagctacaatatctttgtccgataagcccatccgataaaagatgtccctcagatgtggtgcacctattcacgaaatgaatccaaaaaaacaagagatgtacattannnncagacatgatcaaataataagtacannntgacatnnnnnnnnnagtatannnnnnctggatnnnnnnnnannnnnnntnnnnnactnnnnnaataa

SEQ ID NO: 105 - DNA, 314 bp, Zea mays
tgtttcaggtgatgttttacagtagaaattccttcagctgacgacttaacaaacgtgcaataatgcaggagcttgatctctcagtcgatttgaacgcggctagtgctactgagcaagaagctgcttgaacaccccggcggcctcttttttttgcagctctacacaatagctatttcttcgattttttttttaaaatgttccatagatggataagtttattgatgaaatccattattgtatgttttttggagttccattttttgtcacatgcatgtaatgaacaacggtggcaatcatctataaaggttcaaaaa

SEQ ID NO: 106 - DNA, 642 bp, Zea mays
acgccatttgtgcgcacgcacgagcacgagcacgtcccctactagtgtgccggccatcactcggccaccagaacaccacagctcacggtctgctgcttgtcatgtcatgtcacgcggtgcagttgacagagccaaggagatgctcggcacgttcagcccccagctggagccctacacgtacgtgacgccggaggacaccaccccgtcgggaatgtttgcccgggggtcctactctgccaggaccaaggtacgtacgtacgtggatgcagaaccagtcctttttcggttcacacagaatccttcaggctcgatagttcacgaggtttggtttggcatcctgttctttgacagttcctcgacgacgaccgcaagtgctacctggagatcaactacaccttcgacatccgccgggagtggccgtcgacgagctgaccatccttccctccctccatcggtggcctgagcagaccagtcgtttcgttctgtgttcttccttttctatgttgcctcgtcctgtcctgtccctaggtttttgtttgttcaccgtgttgctgcgtgcgtctatatgtgcccttctccatgcgccagctgtctgctgcgttgacaccgttactagacagtgcaaatgtcaggtcgggtcta

SEQ ID NO: 107 - DNA, 420 bp, Zea mays
  misc_feature (296)..(297): n is a, c, g, or t
  misc_feature (311)..(325): n is a, c, g, or t
  misc_feature (338)..(345): n is a, c, g, or t
  misc_feature (352)..(354): n is a, c, g, or t
  misc_feature (372)..(374): n is a, c, g, or t
  misc_feature (404)..(405): n is a, c, g, or t
acgtacgtctcagcattactccgcatgctggccgtgcgctggtcactgaagatggccatgctctttctgtcatgcgtggtgtggctgcagtgttcaggtacatcccctggatccacaacgtggtggccgtggacgaggacgggtacaacggctgcacgacgccgccggggtcgcggacctacacgtccggcgccgacagcgtgacgctcgccaggggggacaacttcttcatctgcacccggttcggccactgcaacctcggcatgaagctcgtcgtctatgccgcgtgatctgtnngagctagcgactgnnnnnnnnnnnnnnnactgggggcgctnnnnnnnnggctgtnnntgctctcgagcgaactgnnntgtttgatttgtgctatttcgtgtaggctnngtcagtcgcttggtt

SEQ ID NO: 108 - DNA, 327 bp, Zea mays
tacgccagcatctcgccaggaaaatggcgggcactactccgcgccgcttgctcctggtcatcgtccccctcgtcgccgtcgtgccggcgtccgcaaaagactacatggtcggcgactcgtccgggtggaagtccggagtggactacgctgcctgggccaagggcaagccgttcgccatcggcgacacgctctgtacgtgccaaataaagctcgtcgtcagattcagatacgtacagtacagtagccgccaatgctgtgtccatgcatgcatcatgttctcgtatataatgtcagtggcacgttcgttcgatcgtccgcgtgtatatc

SEQ ID NO: 109 - DNA, 645 bp, Zea mays
ggtccgccgtattattgcaataacaacgctcctccctcccggactgtcgccgcagtcttcgagtaccagaacgggcggtcggacgtggtgcaggtggacgaggtcggctacgacaactgcgacaaggccaacgcgctgagcagctacagcaagggccacacctacgccttccagctcaaggacgccaaggactactacttcatctgcagctacggctactgctacaacggcatgaagctccacgtcacagcaaagtcgtcatcctcatcctcctcttcctcgtcgccgtccggatctgactcctcctcctcctcctctgacaacgatgacgacgactcttcctccccctcgccgcccgccaagaagtccaaggccaagaccagcgccgcgccgccaccgtcagtcctcgctgccacgcccatggctaccgccgccgccgccgccgctctgctcctcaacaggatgctctgatctgatctggtctgcgttactgcgtatgtagtcacgtggctccagatcttgcttgggcgctgatgagctacactacactacactagttttttctgcttcttttagtttttttcccccctcaccccttgagattggggaggcctcttctgcttctagcttgcttgcttgctgctt

SEQ ID NO: 110 - DNA, 369 bp, Zea mays
gtttcccagcacggggtgactgctcctgccggaatccacaacctgttctccttgataagcaagaggatagagatgaaggggttcatccagagcgattacgtgcacctgttcccgcagttcgtcgatgacatcaccaggcattacagagacgggaagatcgtgtatgtggaagacatgagcgttgggctggagagtgggccggcttccttcgtcggtctgttcagcggtaaaaatgttggcaagcaggtcgtctgtgtgtcgcgggattgaaaggcctggattttgttccctactggccagtacccttaaataaaatcaggaaaacattattttcaactccgagaaggaccccactagccagtaccacgg

SEQ ID NO: 111 - DNA, 358 bp, Zea mays
ctcgcgcgcgacgaggtgaaggtgatggtggaggacgacacgctggtcatccgaggggagcacaagaaggaggagggcgcggagggcggcagcggcggcgacggcgacgggtggtggaagcagcgcagcgtgagctcctacgacatgcggctggcgctgccggatgagtgcgacaagagcaaggtgcgggccgagctcaagaacggcgtgctcctcgtcaccgtgcccaagaccgaggtggagcgcaaggtcatcgacgtgcaggtccagtagacaaactgagctgtcacgacgggtctttgtgtagcactagcgtgggttgggctcttcgcgccgaccgtatcagtactcgtgaccc

SEQ ID NO: 112 - DNA, 580 bp, Zea mays
gcgttgcggctttctgcttccgtgaaatgccgtcggcgggcactcaccgtgacctgtgcgctcccggagaaagaacggccggcggcattcaacatcccgcccactggtgagtacatgcacttccatttcacttagcatcattatgcaacaatataataatgcgtgctaagcagcttacgcacaagagcatgcatgcgtttcagctctgctgtgccccgtgcccccgccggacggcaaggaacggtgggacatcaaggaggaagatgaccgcgtcacgctgtggctccaggtgccagggctgtcggcgagcgacatcgaggtgaccaccagcgaggacgtcctcgagatcaaacgcagggtcgtcgccccacagcagccggcgcccgtggacgcgcacggcgtcggcgcgttccacatccggctgctgttgaccaaggagtacgacggcagcaacgtcacggccgatctcaaggccggcatgctggaggtcaccgtccacaagaacccgcaacgccccggcgaacgcgccgtgatgatgggggcgaccaagcccccgcccgagccccgtcaaaacgaggag

SEQ ID NO: 113 - DNA, 404 bp, Zea mays
ctggtggacatgccggggctgggcacgggcgacatcaaggtgcaggtggaggacgagcgggtgctggtgatcagcggcgagcggcgccgggaggagcgcgaggacgccaagtacctgcgcatggagcggcggatgggcaagttcatgcgcaagttcgtgctgccggacaacgccgacatggacaagatctcggcggtgtgcagggacggcgtgctcaccgtgaccgtcgagaagctgcccccgcccgagcccaagaagcccaagaccatcgaggtcaaggtcgcctgaggtgggactaggtcgaccgatcgtggctctgaagatgtgggagcagtgccagcgagttgtgaggactgaggacctctacctgtgtggaatgtggcgaggaataatcgtagtctgta

SEQ ID NO: 114 - DNA, 688 bp, Zea mays
  misc_feature (516)..(516): n is a, c, g, or t
  misc_feature (556)..(560): n is a, c, g, or t
  misc_feature (572)..(576): n is a, c, g, or t
  misc_feature (580)..(581): n is a, c, g, or t
  misc_feature (624)..(625): n is a, c, g, or t
  misc_feature (629)..(641): n is a, c, g, or t
  misc_feature (643)..(645): n is a, c, g, or t
  misc_feature (647)..(648): n is a, c, g, or t
  misc_feature (650)..(651): n is a, c, g, or t
  misc_feature (655)..(658): n is a, c, g, or t
  misc_feature (663)..(667): n is a, c, g, or t
  misc_feature (669)..(670): n is a, c, g, or t
  misc_feature (672)..(677): n is a, c, g, or t
cgccgtcgtcgtcggcggcggcggcctccgagactgccgccttcgccagcgcccgcatcgactggaaggagacgcccgaggcgcacgtgttcaaggccgacctccccggcgtgaagaaggaggaggtgaaggtggaggtggaggacggcaacgtgctgctcatcagcgggcagcgcagcagggagaaggaggacaagggcgacaagtggcaccgcgtggagcgcagcagcggccagttcgtgcggcgcttccgcctccccgagaacgccaagaccgaggaggtgagggccgcgctggagaacggcgtgctcacggtcaccgtgcccaaggccgaggtcaagaagcctgaggttaagagcatccagatctccacggccctcacctcctcggtcttggcgttctcggggaggcggaagcgccgcacgaactgaccgctgctgcgctccacgcggtgccacttgtcgcccttgtcctccttctccctgctgcgctgcccgctgatgagcagcacgttgncgtcctccacctccaccttgacctcctccttcttcacgcnnnnngaggtcgggctnnnnncacnntgcgcctcgggcgtctccttccagtcgatgcgggcgctagcgnnggcnnnnnnnnnnnnnannngnncnncacnnnngcgannnnngnncnnnnnngcggaacatgc

SEQ ID NO: 115 - DNA, 442 bp, Zea mays
gtgcacactggcgccagatgggtatgtgtgcagcccttgatagcctgagcttttggcaaaactaatggtctgtgacagactaaccgatctttggttttttgctcttggacagttcaatgacatgatcaacgtgccattcacgtcgaagccgttcgtcgctgggttggtagcctatatcctggacaacaccctccaggtaaaggagagcgcggtgcggaaggacaggggcaaccactggtgggagaagttcaggagcttcaagaaagacgcgaggagccaagagttctactcgctgccgttcaatctgaacaagttcttcccgtcggtctgatctcaaatggcgccgccgctgaatcaattctggaagcaacccttgttcatatgggccttaatgaggaacataattctgctggtctggccagtggaagcttctgtgtctcca

SEQ ID NO: 116 - DNA, 788 bp, Zea mays
  misc_feature (721)..(721): n is a, c, g, or t
  misc_feature (736)..(741): n is a, c, g, or t
  misc_feature (746)..(757): n is a, c, g, or t
  misc_feature (768)..(773): n is a, c, g, or t
gtttgcttcgcagctgtttgtaggacatggagagaaatgtgtaaagagattgtgttgagcccggagttttgtggcaagctcaccttccctgtgtctctaaaacaggtaagggaaagaacaatcaacctccttcagttcgagcaatcttgaaccggatgttgagaattgcctccaaaccttgagcagcggatatctatatctccctctggtccttgatatattgcttgtttcttttgacagcctggtcctcgagatggaaatacaatggtccagtgttttataaagaggaataagtcaaaatccacttaccatctctacctgtgccttagcaatggtacgtcacatgatttgcacattttcaagattcaatagcaatgttcataagtttatactgttttattggagcatatgggattattgttagccagatatgtttctcctttttgagtgtttgattttgtgattatatctcgtatcttgtaatcctcataaattctgaaattgtgtggccttttaatctcatattcatgagagtatttacagttaaatgatcaatggtctgtttatcttgtttcactttatcaaatttgttgactcattttcttctgtgcacagttgttacttcagaaagtgggaaattcctcttatcagctaaacgacaccgcaaaaccacatgcaccgagtacactatatcaatggattctggcaacatctcaagatngaaaagaacctacannnnnnaaatnnnnnnnnnnnnatgtttttgannnnnntgttcttgtttcccc

SEQ ID NO: 117 - DNA, 1094 bp, Zea mays
  misc_feature (129)..(129): n is a, c, g, or t
  misc_feature (154)..(156): n is a, c, g, or t
  misc_feature (232)..(232): n is a, c, g, or t
  misc_feature (366)..(368): n is a, c, g, or t
  misc_feature (375)..(376): n is a, c, g, or t
  misc_feature (416)..(420): n is a, c, g, or t
  misc_feature (541)..(543): n is a, c, g, or t
  misc_feature (1045)..(1048): n is a, c, g, or t
  misc_feature (1063)..(1063): n is a, c, g, or t
aattaggtggcacatgacaaaatatttttgaaagcataacttaagatacacaaaatgaatgaagttgcaggatttgtgagttctaactggtacctgtgttttgatatgccttgcccttcaactacctgntaatatgttttgatggtttacacgnnncactgtctatgtactcttattgaagaacaaactccctgaacctgctagcatgccttgtacattacttggtattagngcttgcaatacatgaatccattgcaactttgcaattgactgcttaagttgtgttcttgcactgctgacatatttggtattgcaaaagttcgttgaccatctaaatgttggagaagttagcacttcactgtcttnnnctcttannttaggttatatgacacttccccttgtttaaattctctgtnnnnncatcatactctttccctcctgaaatataagggatttgagttgtcctaagtaccgtcataagtttgaccaagcttacacttacacagaacaatatatttctgacactgagttagcatcattnnntacattatgaatatattttcttaatttacctctttgatatggtagatgttaatactcttctctataaacttggtcaaactttggacagttttgactagaggacagcgcaaaatccattatatttcaggacggagggagtagattattgatctcctgttatgttttaatgcttgtattgaaacttctttccccatcttaatatacaattctacttctgcaccttgtttagatctgatttctgggggacaaacttcaaaatatatgatagcaagccaccatatgatggtgctaaagcatcaagtagtcgatctagtcgtcgtttcggaagcagaaggattagtccccaggtatcgtctggcaattatgaagttggacaggtttcatacaaatacaacttgctcaaatccagaggccccaggagaatgtattgcactctcgaatgcccttcagcgcaagagacttgggaaaactcactcaagacaaagttcaggcgccccctggnnnncacaactttacgaantaaagcaccccgctggcatgagcacctgcaa

SEQ ID NO: 118 - DNA, 1291 bp, Zea mays
  misc_feature (1226)..(1235): n is a, c, g, or t
  misc_feature (1272)..(1274): n is a, c, g, or t
  misc_feature (1277)..(1280): n is a, c, g, or t
gcattgaggggaattaaactacttaaggagctgaaaggtcctaatattatagagctgattgattgtttcccttacaaggaaaatttgcaccttgtatttgagtttatggaaactgatctggaagctctcataaaagataagaacataatactgtctccagctgacacaaaatcatatctccagatgctgttaaaaggtctatcgttctgtcataagaaatgggtgatacacaggtacctactaccttgctaatccccttctaatgaaaacatcatttgataagctgtgttgcagggatatgaagccaaataatttactcattggtgccgatgggcagctcaagcttgctgactttggtctggcccggatgtttgggagtccaagaaggaacttcactcaccaggtatttttatagcttatgtgtatgtgcgtctagttaattgttccctgaacttagaagctggttgcagaagcaaggttcacttagagcaccttcctttaacattatatttctgatgcagtgtattctagtcactggatatttagataaatggatttaattttccctttaccaaggaaaaccgtgacacatgcatgcccaaatttgtcgtctctatgcagtttccttgcaagagcagtgataattggaactgtgtcagttagtaaatttgtttagttatttttgtactttgtttagtgtaatctattttggagctttatcatagcccttttgctagaaattatctggtaatacaaacgatgcaatatcttaagtcaccaaactattttttgcaactgctgactttcttaataagtagtgaaaactgcataatcttgtgcaaaagaaaacacatatacatgaggaaatcttagtgtatttccaggatatcccagtggacatacttcttcatataagagattttatattgcttttttccttgcatgacacaattagaaaaaagcctgatctttttatttgggaagtatgcttccagctagtaaacttttctgattagggaggatgataacgtattattcatttgggaaggatatcatccttcttacaaaattaccattgctcgtttttgtctgagcattgcagacttggaagttctgctaatcatagttcctatttagtagcatactttatgcagtcaaaggccacctctagttatctgtgttgagcagttatttaatgttgccattgtatttcgttcctttattannnnnnnnnngatttattttgtcctggtggtggcaggcacatgaatnnnacnnnntacacgtagtc

SEQ ID NO: 119 - DNA, 447 bp, Zea mays
gtgaatttggggctatacttgctgatgttgtaaccaacatgaaagttcctatcacagtactaaatgtaactttaatgggatcgtttcgaagtgatgcacatgttggcacttggagttatcctcccactatacttgattgcagccactggtgtcttcctggagtccctgatgcttggaacgaactcgtgttttcgtaccttttgacaaatggtgagttcttagttatgctaatgtctatcttcatttctgtgaatcctgtgggtaatggatgtcagttagacaaattttttcacttaggagtaaaaattttactttcttgcaaggtatagtgttgttccactgcagctacagtgttatgaatttccaggacttacatatacaatacactttttatctctgccgaaccatggtggcatggtgcccgtggaatgtcatgcatagcatgaa

SEQ ID NO: 120 - DNA, 219 bp, Zea mays
tcaaacaaaacatttgaaccccatggctttgttcatctagacacattttctttgggctagcccctagcagttggtttccaggcgtatgtatgcaggcaccaattcaccatcagaggacctgatcgttgctggggaagaagagcttccagtagagcagctcgttccacgtgtccggcacgccggggaggcaccagtgcgtgcagtcggcgtagctcctgg

SEQ ID NO: 121 - DNA, 1028 bp, Zea mays
ttccctttgtatatttcggtgtgatgaatggaaagcttagaaatagagtgaagcattgctcataatgtggtgcatctctctctctctctctatctccctctttttgctgttcaccagaccatctgtgatcgccaaagatatttttgctaagctttgtacccacgcagctgtacctttttttattgcacagtaaattttttttatcattgatatggccccttgtggctagagctgttaagaggcatagagcaaactccgattcaaatatgttatattgttatatatgtaccggtaaaagaaaaaaatagttatttgattcacaccttggcctttatctgttcttttctaagcttttgtggtacatgcttctttagtttcatccatgctgaaaccttaacgtttcatgtttgctaggactacaatgccaccattgagttctattgggctccctttctggccgagtcaaattcggatgatgctgttgtgcaccggatcgcggatcggattgtaagagggacatccattgagaagcatgccaagttttggaagggggctgacatcttggtattcaacacctacctatggtggatgactggacaaaagatgaagattttgtaagcgtcttcctctactaccacgccgagttctttcaccatgtgtttcaaaccgaaagtttgcaagtcattgaaaaattggtcgtgtactttccagtttgaagatatatatattgtcttaaaaaacacctcctggtttcaggcggaactccttcgaagataaaagcaaggatatcatagagatggaaacggaggaagcctatgagatggtacttaatgctgtgctgaaatgggtggagagcaacatgaaccccaggacatcaagaacattctttgtcactatgtcacccacccacacaaggtaagcctgcctggcagcctgattgcagtagtagcctctgtttcacggttctagcttcaaaagaagtgcgcgtgcgtatatggcatatatacacacggctacggctaaacatg

SEQ ID NO: 122 - DNA, 703 bp, Zea mays
actggctggtgcggttcctgttcgggccggtgccggtctacttctcggcgctggccatcctcatcgtgctcaccaacgcgcagtacttcgggctggtgggcgtcggcgtggcgccgcgcaccgcgaagctggcctcctcggcgcccgtggtcagcgtcatgaagtactgcgacatcttccgcggcgagtgggtgccggacgcggaggcgccctactacaaccacaagacgtgccacatgatccaggagcaccagaactgcctcaagtacggccgccccgacctgggcttcctcaagtggcggtggcggccctccggatgcgagctgccgcgcttcgacccgctgcagttcctgcagttcgcccgcgggaagtcgctggccttcgtcggggactcgctggcgcggaaccacatgcagtcgctgctctgcctcctgtcccaggtccgttggttacttcgtttatgtgctcggctgctcctgagtgatgatgatgacaacggcctgctctgccgccgagacgcatcagactttgcgcagctgaagcttccacttccacactacaccacaccaccagagcagagacagccacatgcaagcagcgaactgacctcgcgaccactgtgtctccatggctggctgcaggtggcgtatcccaaggacctgtcggcgaacccgtcggaccagaacaaggtgtaccactaccg

SEQ ID NO: 123 - DNA, 701 bp, Zea mays
agctgaaaaagatggccctaaaggttactgtcttcatattaatgcttacttggctagttttcctttacctaatgttttttttccaaatatgtgtgcaggttattgcctcaaaccttaacgaggaagagatcaaggggctaaagcaaatgttcatgaacatggacacagacaatagtggcacaatcacgtatgaagaactcaaagcaggactagccaaacttggatcaaagctgtcggaagctgaagtaaagcagttgatggaggctgtatgttctaatctataatatatattgcaataccattattagaatcatgttcttgactgacatgcttacctttcgacctattccaggctgatgttgatgggaatggatccatcgactatgttgagttcatcactgccacaatgcatagacacaagctcgaaagagacgagtatttgtttaaggcattccagtacttcgataaagataacagcgggtgagtacttgcaaattgatatatcaaatgctaacataacatgccgccacactttttatcccatcaaaacatgtttacgctatcgattatgtacaaaaaaatcgacccctgggggaatgaccacctcctttttgcatgtaaaagtatctggtccacatttattggcactggctgaaactggttttgtttaacatggagattacgttgattttatgcagttt

SEQ ID NO: 124 - DNA, 473 bp, Zea mays
aagataatgccaaagtctgtggagacaacatatgtggatgaacaaactgcaagagcttcacacaccctagcagagagcaacgggacagctagcgttccagtgactgtacctgaaggaactcatcctgatcaaacaagtgatcaagtgggaatcaatggaagcatgaacccatgcatccatccaatggtttctgcagacccaaaatttggtagtagtgccacaccacagacttttcctcataattatgctgcctttgctccaatgatgcagtgcaactgcaaccaagatacgtacaggtcattcaccaacatgtcatccacgttctccagcatgcttgtttccacgttgttgtcaaaccctgccatccatgcagctgccaggctcgcagcatcatactggccagcagctgaaggtaacactcctattgatccgaatcaagaaaaccctgcagatggcgtccaaggaaggaacat

SEQ ID NO: 125 - DNA, 490 bp, Zea mays
tgtaagcagggtgagatcgaggccgtggtcattgccaccggagtgcacaccttcttcggcaaggccgctcatcttgtggacagcaccaaccaggtcggacacttccagcaggtgctgacagcaatcggtaacttctgcatctgctccattggggtcggcatcctcgtcgagatcatcgtcatgttcccaatccagcaccgcaagtaccgcagcggaatcgagaacctgttggtcctcttgatcggtggtatcccaatcgccatgcctaccgtgctttcagttaccatggccattggttcgcacaagctgtcacagcagggtgccatcactaagaggatgactgccattgaggagatggctggtatggacgtgctttgcagtgacaaaaccggcacactcaccctcaacaagcttagcgtcgataagaacctcgtcgaggtgttctgcaaaggcgtcgacaaagaccatgtcttgctgttggctgcaaggg

SEQ ID NO: 126 - DNA, 147 bp, Zea mays
gtccatgggatcaacagaatgggcaaagacagggggatggtccctcatgaattctgctcgcttgtctctgggcacctgtggcatctgaacttgcacttgaggttgaggtgggggtggctgctgctgtacctgctgcatatgtggaga

SEQ ID NO: 127 - DNA, 713 bp, Zea mays
taagatatactatctgatatctctcatacataccatacattaatgctcatatgtataaagaacaaacacaacgccatcgtccatgtctatatactgtacaattgtaagaatgataacacatttccgtgacctttacgcgatgttaacactgcttgcttcagaaccatgaactgaagcagaatgtattgtataacattgttactgatttaatgtttgttcgagcaggagacggagaagattgcgctcgcagaatcaacgggcctagaccagaagcagatcaacaactggttcatcaaccagaggaaacggcactggaagccatcggaggacatgcctttcgtgatgatggaaggcttccacccgcagaacgccgctgctctgtacatggacgggccgttcatggccgacggcatgtatcgcctcggttcatgaactacacacttccatggacgactgtgtggggcctatatatccaatcgtcggaccgtgggagtatatttcagtgtaccaggaccaggatgcgttgcagtgcaaggacattgttgtggaatttttgttgctgattgccaaggggtgggtcggtcgatgtagcgtctatgcatggcttgtagttctcctgtaatgttgttgttaatttccgcttggcggcttgtaatcttaggtgtatctctggaacttgaatcctgggtgattaatccggcaagcagctgcct

SEQ ID NO: 128 - DNA, 724 bp, Zea mays
ggacgtggcgttcgcctactcggggcacaacgtggtgctggagatccaggccaccatcccgtccacgccggacaagccgtccaagaaggccatgtggaagggcgcctttgtcgcctacgtcgtcgtcgccatctgctacttccccgtcacgttcgtcgggtactgggccttcggcagcggcgtcgacgagaacatcctcatcacgctctccaagcccaagtggctcattgccctcgccaacatgatggtcgtcgtccatgtcattggcagttaccaggtacgtacggtacaaacatttcacttctccatatccaagtcacatacactccatatccatgtcattggttgtcggtgcaggtttatgccatgccggtgtttgacatgatagagacggtgctggtcaagaaaatgaggttcgctccgagcctcacgctccgtcttattgcccggagcgtctatgttggtatataatgcctctatctgaactgaaccctaaagcagtagatcgatgagaatctgacgtcctaacaaacaagacgtactgacaagtgcgtgcaacatgtgtgcagcgttcacaatgtttctaggcatcactttccccttcttcggtggattgctcagtttcttcggcggattagccttcgcaccgacaacttattttgtaagcttttccaaagatccatgcatgattgcattaattgacccattttttttcctgcaacaa

SEQ ID NO: 129 - DNA, 510 bp, Zea mays
gcgcttttcgtgatcccggagtcccctaggtggttgatgatggagaagagagtttcagaagcaagggcagtgctgctgcagattagcgagtctgaagctgaagctgaagaacggctggctgagatcgaggaagccgcaggtctgatgaaatcaatgaaatctgaggacaaagaagtgtggagggaacttttgaacccgtctcccgccgtccgtcggatgctgtacgctggttgcggtattcagttgttccaacagatcacaggaattgatgctactgtctattacagcccaacaattttcaaagatgctggcatcaagtctgatcaggagcttctcgctgcaactgttgctgtgggtttcactaagacagtgttcatcttggttgcaattttcctaattgatagagttggacggaagccacttctttatgtgagcaccattggcatgaccatctgcttatttctcttgggggttgcacttacactgcaaaaccatgccgtggggcttatg

SEQ ID NO: 130 - DNA, 469 bp, Zea mays
cccttgcttctgaaactctcttctccatcatcaaccacctaggggactccgggatcacgaaaagcgcaaagccaatgaagactgatgggaggataccgacaccaagcataatcctccaattgatgtgctcagaaaggcctgagaaggcataattggaaacatagccaagaaggatcccaaaattgatgcagatctcaggaagggatgtgagcgtccctcgggcacctgcgggggagatctcagcaatgtacactccagataccatggcaccaaagccaatgccaaccccagcaaggagcctccctatcataagcacagtgaatgatggagcaaacgtcatgatggtcgcgcctatctggaacacaattgcaccgaggcccattgtccattttctgccaattgcgtcagatgttcgcccccctgataggcttcccaagagtgagaccacgctcagacagcctactaggat

SEQ ID NO: 131 - DNA, 398 bp, Zea mays
ctccatcgtggtgccacagatggtcatcgcgattggctctgggccgtgggacgagctgttcggcaagggcaacatcccggcgttcggccttgccgccgtcttcgccttcaccgctgccgtcgcagggatcatcatgctgccaaagcagcccaagaccagcttccggtccgtctccatgggaggaggccattgatgatcacaactctaggatgcatggtccactgtggttcacgattcttttacctttgggagttggacggccaggtgtttgttctcaaggccgcttccgaggcctaaaccggtgggtttatttctaggccggatcatgacgaacaatctgtttcgctgggttgtaaaggaaaagttttacacgaacacacaacgtgtcgggctattta

SEQ ID NO: 132 - DNA, 621 bp, Zea mays
acataaatgcactgacaagatggtggctatctgacacgcagatgatggccatgggaagtggactgtgcattcctcccatgctgctgccgcgagccatgcagctgcaaattccttcaattgctcatttccatcatctcggcatgggattgggttatgggatgggtgtcctcgatatgaacagcacagcggcagttccatttcagcccatccctggcgctcactatacttgtccgatgatcccaggcacgccaccacaaggtcttggaattggaatgcctggcacaaacacgatgccagtgtttggagtccctgggcaagcaatccatccctcagcgtctagcgtacagccattcccatcgttggcgggtcttcctgttaggccaaacctggcacctcaagtcccagccgtcatggctaacatggtgcaggagcaacagcaaggcgtagcgactcagcagcagcagagtctgaataatgaagctcaacagaaagcaaataccggagatccacaaatactacaaaaatagatgaagagatcttcgccagtaatcagtttctggatggtggtggcaacaggactaatactatagggagaaatgaggctgaaacattaaaaacggt

SEQ ID NO: 133 - DNA, 355 bp, Zea mays
ttggtggtggcgagaggtgcaagagcatgaaccatttcatttgggggttcttgtgtgcccttggtgaggcacaattcttgaaccggactcttgtcatggacttgaatgtctgcctcaatgcacggtatacttcgagtgacaaggatgaagaaagagatttcaggctctactttgattttgagcatttgaagcaatctgcgtccgtgattgaccagagccagttctggcaagattggggacagtggcacaagaaagataggctcaagaacttctacactgaagacatcaggatgaccccaatgaaacttcgtgacatcaaggacacattgatcatgaggaagtttgggaatgttga

SEQ ID NO: 134 - DNA, 618 bp, Zea mays
  misc_feature (398)..(401): n is a, c, g, or t
  misc_feature (453)..(456): n is a, c, g, or t
  misc_feature (500)..(505): n is a, c, g, or t
  misc_feature (517)..(521): n is a, c, g, or t
  misc_feature (527)..(529): n is a, c, g, or t
  misc_feature (547)..(559): n is a, c, g, or t
  misc_feature (568)..(582): n is a, c, g, or t
  misc_feature (584)..(604): n is a, c, g, or t
  misc_feature (608)..(615): n is a, c, g, or t
aaggagggatatttttctgtcagatttggcacgtagggagagtctccaattccagtatgtttacgacctctaacacagatcggttctcaaagctataaatttaacggcagtctagtcagcttgcaagagaaaattggattcagagttatccatgaagacttcatggcaacattagctgtgtttgtcatagaccaagatgtttatgaaagcgctcatactatttctactacggtttttttttaaataaaagtgccattataccgaccaatgttaaatgttccaatgcagcgtttcagcctaatgggcaggctccaatttcaagcaccgataagccactaaagcctcaagtgagagccaatggtatagacgtggctactttcgcagttcctagacgcttnnnnactgatgaaatccctttggtcgtcaatgatttcagggtagctgctcgaaatnnnnttgaagctggtaagctccctgtttgcactctgaatgttcagatnnnnnnacaaagaaagannnnncaaatnnntatctgcttcagaccgannnnnnnnnnnnngcacacagnnnnnnnnnnnnnnntnnnnnnnnnnnnnnnnnnnnncgannnnnnnngac

SEQ ID NO: 135 - DNA, 630 bp, Zea mays
  misc_feature (7)..(7): n is a, c, g, or t
atgcatngaaaggtggttgatgctgttcatgccaagggagccatctttttctgccaactatggcatgtaggtcgagcttctcaccaaggtatgttaataatagggacaaattccataaaacaaatatatttcacgattctgtaattcccccatggactacattgcattgctaaaaatttcttgcagtcagattatatctgtcttgaatgaaggtttagtccactgaaattatattcagtcggaaacaggagtcgttgtttgtaggcaattttaggatgatttagtcaggtcagtggagaccagagtttctggttgggaactggaaagttgcctgatttcttacttttctactatatcgcttcttctcaaggcgtctctaatagtctagcttagagctagttggatcaatgtttgctaaacagtgcaaaaaggaagagatagtcacgatgcccctatctctcacacaaatcacaacacgatatgcctactgctgtttgtctccatgtttggctagaggtattgctagcttatattataggataagagacgccctgcaagcaaggaacaaaggttgcctttcattaatcttcagtcagagcactacaatctgcacctcttgagatagtttga

SEQ ID NO: 136 - DNA, 587 bp, Zea mays
gcaagggcgccatcttcgtctgccagatctggcatgtgggcagggtctccaccaacggtacgtgcatgtttctcagctctcgatcatgctacttgcttgacttgcttaaccaggagctgatgttctagtcggttacccatccaacttgcagagctccagcccaacggcgacgcgcctatctcgagcacggacaagcagatctcccccgacgccaagtccggaacggcgtactcgaagccgcgccggctgcggaccgacgaggtccccgggatcgtcgacgacttcaggcgggccgcacggaacgcgatccaggctggtttcgacgccgtcgagatccacggcgcgcacgggtacctcctggagcagttcatgaaggacagctgcaacgaccgcacggaccagtacggcggcagcctggagaaccggtgccgtctcgccgtggaggtcgtggacgccgtcgtccgcgaggtgggcgcgcgccgcgtcggcatcaggctgtcgcccttcgtcgacttcgtggactgcgtggactcggacccggtggcgctcggccactacatggtgcagcagctcaacaggcatagcgg

SEQ ID NO: 137 - DNA, 797 bp, Zea mays
gcgacttcgtcgaggcgtgcaagaagaatccttcgctcctcgccgaccccaacctctccttcttccgggattacctccagaggtccatctctcacccccccctcctcgctatatctttcgattcgcccccatcgtccttcattctttctgatcgtaggagcccccgtttttttgcagtttgggtgccaaaattcccgccgccgccccctctttcgaaagtcccaaggtaacattacccatccatcttctcctctatccaccccgcgtaagtatctgctcggatccttcttttttttaagagagagggagggagggaaataatcttctttgcaaagcatgttatattttgtatggcacttcaagtgaaattactagggcgcagagaaaaaaatgctgaatttctttacccactccgtatcattcacaagacacttatgacttccttgtcgtgtgttgcccatccaaggttctttctcgagtccttgctttttcatatgcaattttgcgctgcagagatcttccatggacgacattgatgacgacggtgatgacgacgacgatttggatatgagggatcccactcctgagcgagacgagctcgatgaagagattgttgagtctgatcttgagctcgaaggagaaattgtacagtctgaccatgatgacccaccacagaaggtaaccactctattctcttgccactaacatgtcctctttcccttctgttaggatcctagcgacaaggtagatgtgctgctaaggttttttttgtgccatgacagatgggaaatccttca

SEQ ID NO: 138 - DNA, 373 bp, Zea mays
cgtctgacagtttgttgcaaagcactcgtggtttttacataccaagcttatgaactttgtaatctacatgtaggtggggaggtttgaccccgtgacccgtgaggctcttgaaccgcaccagctggttcctaatcttgccatcaaggaagctgtgcatgcgtttttgagtgagcatggttgggcttacaagattagatgatcgctttggaatacaggttttggatactgtcggatgtgacggtgggatttttttgttcactgttggggggcagattttaatctgggatggctgcgtacagattcaccttctccagttgtgtacatatgagatgctcattatgatagtaattgtgaacagtacaccaaaggaagt

SEQ ID NO: 139 - DNA, 759 bp, Zea mays
  misc_feature (682)..(687): n is a, c, g, or t
  misc_feature (715)..(721): n is a, c, g, or t
  misc_feature (730)..(730): n is a, c, g, or t
  misc_feature (732)..(739): n is a, c, g, or t
atgctgtttttctttgaaacattttcactttttttatagcgcacgaatatatttgcgtatgaaagcaactgcatgtgtgagaggaatgcctcagaattttgcttagcttattgctttatgtaccatgcatcacctttcttttctaaggaaatcaccctctcacttcacaaaatgtttccctgacttatttttcttcgcatttgaaaggacattgactgccccagtggaaatgatcaaatgtttgaagtccatcaaagaatacgccttctgtgcctcaaattatcctcttgttattactcttgaggatcacctcacaccagatctccaagctaaagttgctacggtatagtctacttaccacatcacctcattgcagatatcatgtttgaaaccttgattctaacttcaggctgttttagatgctcactgaaacatttggagatcttcttttcgtccctaatccagacccgatgaaagagtttccttctccagcatctctaatgaagagaataatcatatcaaccaaacctccacaagaatataaggagtttctcaaagccgagaataatcgcagtggcagcggaaacatagctgagttgccagaccaaggaagcctgagaagaatagattcaaatgccgatgaatctgatgggaaggtctgcaatatcactgccttgtgaannnnnnacccatgatttaacaaaaatgaatgaannnnnnnttttgtcanannnnnnnngaactggatgagcaagacga

SEQ ID NO: 140 - DNA, 694 bp, Zea mays
  misc_feature (644)..(644): n is a, c, g, or t
aaggtacaaaaggggtagcgcttctgctgattcagatagctctggggctattgagctaccatctgatgctgaaggagattcacaagaagtaaacagcaaagcaaaggtgagggatgatcatgccaattgcaaactcaatgaggtacaccaaagctctgaatcagagaaagataagcaacttgtaccagataacgcagcaacaaccaatatgtcagatgtacaacgtgaaaattctcatgtacagaacaatcagaagtacgaaattatcaatgtgccttctgattctaggccacttctagttttcattaacaagagaagtggggcacagagtggtgattcactgagacagcgtctgcaaattcttcttaatcctgtgcaggttggtatgcttcaagctctttaatcggttttcagttgtgcaagtttccttgtagatttgctctgtttacttgacacatctagcacccctttttattttatatgttttttgtctgtgagcataaattaagtaatgttattgtgtggctctgtatatatctttaagcctgactgtagctttaataaatcctcttatactcgacttatccaaatcttcgttctgtgcacaaccttttgaattggtaaagtttagttcatgttgcttngtcacgttcagttaatcctccacattgtctttttaaactgattcatttta

SEQ ID NO: 141 - DNA, 452 bp, Zea mays
gacgaacgcccgcatggtaataacataacgagtacagcactgatttgaaggtccagacatgcccaaagatttccatgttgttgcaggtgtgaccggatactgtggcacggccaaggcatcgagcagctgcagtacatcaggggcgagttcaggctctccgaccacaggccggtctgcagcgtgttcgtgatcgaagccgatgtagatagcgggagcaagatcaggaagggctactcaacgctggacgctaggatccactgcgagtcccccgagatacccaagagacacagcttctatgatgacttctgaaattttggcccgtgatgctagttttgtctataacatagcagcttacaaagatcagacacgtttgtagcgaaaaggctcaggtttctcaagcctaacacctgtcttaatttgtaccaagcggtatactaactgaaagtcaatgg

SEQ ID NO: 142 - DNA, 725 bp, Zea mays
  misc_feature (707)..(709): n is a, c, g, or t
cctaaacggaatctaaagcaattttgttgtattcttgaacgctaactaacgttactgcgatccattcttcttcattctcagaaagctaactagtgtgattctagagggaacgccggtgccctgcctcttcttgatggtggttgccttccaaggcctcccatcttctctcacactgctggtggttgtcgagctcacgttgtagaactgcatacagacgaagccatgatcagcactgcagcttttcttaagcgggaaaccatggtctcccagatgaagctgttggattttcttcggcttggcagcatactcacctcacaaacaccgtggagcagtagtctctgaaatgggtcctgaacattcagcacaagagcatcgtctttgtcactagcgtcttcaatgaaggccctaacgcgttcctgcaaacatgaaaaaggcagaagcaaggtgacgtgaggaactgagaagctggatgagaagctggtacaagtggcataaatgaaattaagaagatcgtacttctaataagagggaaagaaaactcgatgtagtgccaataaattatctacatgttcttagatagtagatacatacatacatacagatacataatcaaagaactctgatgtcttctttacaagaaaaactaattagccatgatccattataatcatttcggtaaatagaggtcaaaacttgaggaaagaagnnngtctcaaaaaaaaaaa

SEQ ID NO: 143 - DNA, 774 bp, Zea mays
  misc_feature (120)..(120): n is a, c, g, or t
  misc_feature (700)..(701): n is a, c, g, or t
  misc_feature (740)..(746): n is a, c, g, or t
  misc_feature (751)..(763): n is a, c, g, or t
gcatattgaagatgctaccactgaattgacaccgcaggattctatttcaaagcattgcgttgagcgacaatgctattgttgctcaaagcctattgacatacctagatggaggtacagtanatgtgaagttttcttttttacgatctgaaatgctagtctttgtatgctattttttttcttttctgtaaacagtggaacctttaagatagatggaaaggaacacatatcactggctggacatttgtcatccaaatcttgtgagaaagtgtggaaattgtcatcattgccgaaggtggttcaagtgacaaaggttcctagaatggcagtgtggcctaagatatttaaagcatcagaacccagtggtgacaatattggcctatatttcttccctcctgaaatgaggtgacttgcttagcctttgtgtttctttccattacttgtactatcattttcttgtgtataaatgtctaatcattttatattcctccctaggcacgatgaagaactagatcaactagttaatgaagtcatggataaagatttgatcttgcgagctattattggtgaagctgagatgctgatattcccgtctgttctactacctgaaagatatcagagtatgatctttcttttgtttgtaaaaatatggcctcttttggactacataacatatctagtaattttctattacgccgatcannttgaagcggaactaattgttagattattgtatgctggtnnnnnnnggagnnnnnnnnnnnnnagtatggcagc

SEQ ID NO: 144 - DNA, 503 bp, Zea mays
gcgggagagacgagcttctacaggtaacgaagatcgattactgtttacatggcccttgatttttacccttaaagcgtcttctggcttaaagcctttgacgatcacagtgcaatgacatgggggcagttctggaacatgcagatcatggactactcctccctcccccatttctgcagacaggagggctcgggctcatccaaacattcgtcaggcgacgccgataactgcttctctctcgaccacccgttccaccaggagctctacagcttcatccaggagcaggcgctgaaccaggagctcatcaagcagggctccttgcacgtgaaaatccccgagcaggaccctgaggacgcaaagatcgtggaggtcatcgaggccgagttccacaagcttggcgtgcagaacgggtccgccaatggcatcgaccaagcatagcacctttgtctaataaggccagcctgattcaaccgagacgttgcttgccacttctgatgcaactaatc

SEQ ID NO: 145 - DNA, 718 bp, Zea mays
  misc_feature (51)..(51): n is a, c, g, or t
  misc_feature (53)..(53): n is a, c, g, or t
tgacgtccgggcatacattgccgctatagagatcttgcaggtatacgttcntntaatcatgttcatccatcacttactactagctactatttcaattccgccttcagtaaatataatgcacgtaactaaaaccacacaaaaaggttccatttttctttctttttccccttccttgggaaacgatcgaggcaagatttcttctctgactctcctcctctcatgtcgtctcctgcagaactactacccggagcggctcggcaaggcgctgatgatccacgtgccctacatcttcatgaaggcgtggaagatgatctaccccttcatcgacaccaacaccagggacaaggtgagcgtactgtactgtgtacccccgtctcggtcgatggtctccgaatcccagcggtcactactgccgttttcattttggggaacaatgagaaagtagctagtagcgtaggttgctggcttcttcatagtccatccatctcctctcgatcgtctcctcactaaccaccgttttgcgcgacgatgcgattcgcatgcgcagttcgtgttcgtggaggacaagagcctgcaggagacgctgcggcgggagatcgacgaggggcagctcccagagttcctcggcggcaagatggacgtgatcccactcaaggactatggcgtgcagcagcagcctcaggccgtgtaatgccatgcgtatatacagcatacacga

SEQ ID NO: 146 - DNA, 764 bp, Zea mays
  misc_feature (724)..(726): n is a, c, g, or t
ctacaaaacaagtaataagttctctcttctaaaatgccgcccttgctattcttttctagtttcggaaaattttcaggtctcccgagcttcctgaactcaggattcacctgtatgctatttcgaaatttcagaatacttcatcccatgaagggcagatacggttcctagtatatactttggagaatgcaatcttcagcctgcctgaaggccaagaaaaaatggtatggctgattgatttcacaggatggacagtgtctcatgcttcgccaataaagacttgtagagaaactgcaaatatactgcaaaatcattttcctgaaaggctggccattggatttctatttaatccccccaaagtatttgaagctttttataagttaagtgctctcgacctttgcgcatctatctgattttaattttaaaaaaactgagaaaccaacatgtagtgttgatacagacaaaaacattgcattttccattctttaccaacttaagtttttcaaattctttcaggtcatcaagattttcctcgatccaaaatcagtcgagaaggtgaacttcgtgtaccagaaggatgaggagagcatgaaggtcatgtacaaatacatcgatccggaagtccttcctgtagagtttggggggaagagcaatgtggtgtacaaccacgaggagtactccgagttaatgagacaagatgacatcaaaacagcaagcttttgggcannngatgcgaaaactaaccatgctaaccctgccatcaatgg

SEQ ID NO: 147 - DNA, 667 bp, Zea mays
gctcctcgcgcaggctctccagtccctcgtcaaacaggtcccttctcttaatttctcttgtgcatgcatgcaagtgcaacatcatgtcagcttgcttcttgatgcattgcattgcgtttgcgttgcattgcatgcatatgtatggcatgcagggccgtgtgaagaaggataagctggactccttcaacctgccgttctacgcaccttcgatggacgaggtgagggacgtgatcacgcggagccaggcgttcgacatcacccacatccagctcttcgagtccaactgggatccacacgacgacgacgacgtggagatgaagatggaagaagacgtcgccgccgtccagagcggcgtcaacgtcgccaggtccatcagggccgtgatcgggcccctcatcgcccgccactttggcgagcacatactcgacgatctcttcgagctgcatgccaaaaatgtcgcagtgcacctgcagaaagtgaagaccaagtaccctgtcatcgtcgtttccctccaggcgaaatgagccgcgcgccaaataaaggaccaagctagctgatgaaaaatctggcgtcaagttagctattagtaccgctactactatatgcatgcagaataattagtcaaacaatcagaaaaataaagtgcctcagagactgttagtggcag

SEQ ID NO: 148 - DNA, 594 bp, Zea mays
  misc_feature (382)..(384): n is a, c, g, or t
  misc_feature (528)..(532): n is a, c, g, or t
  misc_feature (547)..(564): n is a, c, g, or t
  misc_feature (583)..(589): n is a, c, g, or t
acttgacgccagattttgcatcagctagcttggtcctttatttggcgcgcggctcatttcgcctggagggaaacgacgatgacagggtacttggtcttcactttctgcaggtgcactgcgacatttttggcatgcagctcgaagagatcgtcgagtatgtgctcgccaaagtggcgggcgatgaggggcccgatcacggccctgatggacctggcgacgttgacgccgctctggacggcggcgacgtcttcttccatcttcatctccacgtcgtcgtcgtcgtgtggatcccagttggactcgaagagctggatgtgggtgatgtcgaacgcctggctccgcgtgatcacgtccctcacctcgtccatcgaaggtgcgtagnnnggcaggttgaaggagtccagcttatccttcttcacacggccctgcatgccatacatatgcatgcaatgcaacgcaaacgcaatgcaatgcatcaagaagcaagctgacatgatgttgcacttgcatgcatgcacaagagaaatnnnnngaagggacctgtttnnnnnnnnnnnnnnnnnnctgcgcgaggagcccccannnnnnnctgac

SEQ ID NO: 149 - DNA, 341 bp, Zea mays
atggaagaagacgtcgccgccgtccagagcggcgtcaacgtcgccaggtccatcagggccgtgatcgggcccctcatcgcccgccactttggcgagcacatactcgacgatctcttcgagctgcatgccaaaaatgtcgcagtgcacctgcagaaagtgaagaccaagtaccctgtcatcgtcgtttccctccaggcgaaatgagccgcgcgccaaataaaggaccaagctagctgatgcaaaatctggcgtcaagttagctattagtaccgctactattatatgcatgcagaataattagtcaaacaatcagaaaaataaagtgcctcagagactgttag

SEQ ID NO: 150 - DNA, 450 bp, Zea mays
  misc_feature (133)..(136): n is a, c, g, or t
  misc_feature (144)..(146): n is a, c, g, or t
  misc_feature (150)..(154): n is a, c, g, or t
  misc_feature (156)..(156): n is a, c, g, or t
  misc_feature (180)..(188): n is a, c, g, or t
  misc_feature (192)..(196): n is a, c, g, or t
  misc_feature (246)..(248): n is a, c, g, or t
  misc_feature (250)..(250): n is a, c, g, or t
  misc_feature (252)..(258): n is a, c, g, or t
  misc_feature (264)..(271): n is a, c, g, or t
  misc_feature (280)..(281): n is a, c, g, or t
  misc_feature (291)..(297): n is a, c, g, or t
  misc_feature (309)..(320): n is a, c, g, or t
  misc_feature (329)..(333): n is a, c, g, or t
  misc_feature (440)..(444): n is a, c, g, or t
cacgagttcctcatagcgtagcctgaggaagagggagaagtccttctgaaactgctgttgaaacaacttcaccatcgatggtgacatagtctttgtgatgtagatatctaggcatgatttttgggtgcccttnnnntgctctgnnncctnnnnntntatacatagagagagaaaaaaaannnnnnnnnacannnnncaactatatataggtttgtttcaaattaaaacactcaaaagcatggatcnnncnannnnnnnacaagnnnnnnnnggtaagacnngtgagtggtnnnnnnnatatctcttgcnnnnnnnnnnnnggaatgcannnnngagagcgccactgaaggcagaacagagagtggaaaagatgaacgctttcgctagggaagatcctagtgtagtaggagcccggcaatccggagatatagcaaggaggnnnnngtgcct

SEQ ID NO: 151 - DNA, 485 bp, Zea mays
  misc_feature (8)..(9): n is a, c, g, or t
ggcactanngcctccttgctatatctccggattgccgggctcctactacactaggatcttccctagcgaaagcgttcatcttttccactctctgttctgccttcagtggcgctctcaggtatgcattcccataaccgtaccgcaagagagatgcagttcaccactcacacatgtcttacctgtcagagcttgtctgttgcttgtccgatccttgcttttgagtcttttaatttgaaacaaacctatatatagctgctctttgtttgaccgtctttttctctctctctatgtatacatatacaggcaccagagcaactgaagggcacccaaaaatcatgcctagatatctacatcacaaagactatgtcaccatcgatggtgaagttgtttcaacagcagtttcagaaggacttctccctcttcctcaggctacgctatgaggaactcgtgtctggtggccaaatggttctaacatttattggaag

SEQ ID NO: 152 - DNA, 450 bp, Zea mays
atgatgccgggtatgatgccaccgatgacaatgatgccgatgccgagtatgatgccatcgatgatggtgccgactatgatgtcaccaataacgatagctagtatgatgccaccgatgatgatgccaaacatggtttcaccaatgatgatgccgagtatgatgtcttcgatgataatgccttcgatgatgacgccgaccatgatgtcaccaatgatgatgccgagtatgataccaccgatgatgatgccgagcatggtgtcatcaatgatgatgccaaacatgatgacagtgccacaatgttactctgattccatctcgcacattatacaacaacaacaattaccattcatgttgagccccacagccatggcgatcccacccatgttcttacagcagccctttgttggtgctgcattctagatataagcatttgtgttgtacccaataatg

SEQ ID NO: 153 - DNA, 480 bp, Zea mays
  misc_feature (472)..(477): n is a, c, g, or t
gccttcgacaaccacatggacgccaagcgcacgctccgggagatcaagctgctgaggcacctcgaccacgagaacgtatgtcagtcaaaacagagcatatctatataaaatagttgttggatgatctgacgccgattattgccgctgctccgatttggaccaacaattgaaacagatcatcggcatcagggacgtgatcccgccgcccgtcccgcaggcgttcaacgacgtgtacatcgggacggagctgatggacacggacctgcaccacatcatccggtccaaccaggagctctcggaggagcactcccagtacttcctgtaccagatcctccgcgggctcaagtacatccactccgccaacgtgatccaccgtgacctcaagcccagcaacctgctggtgaacgccaactgcgacctcaagatctgcgacttcgggctggcgcgcccgtcctccgagagcgacatgatnnnnnnagt

SEQ ID NO: 154 - DNA, 1203 bp, Zea mays
  misc_feature (197)..(199): n is a, c, g, or t
  misc_feature (1007)..(1008): n is a, c, g, or t
atatcatattaccgtattattcttcggcatcattgttgcttcatgatagtagtgagctagtagatattggatacatcaattcactcactccaagccatctacccaccatcttcactcatattaagacctgctcgtttatgtattattcacatgcagtacagtaatggttgaagtgttgaaaggctggtattgatcgnnngaactcagtgacaggcagaaatcatcccattagggatctcaacttttgtgttttaagaaaagatgaaatagagttgggcaatattttagcctgggcaatgagtctgctgcgtctattcattttcaaattgttacttcgctggctccaaattatacactacaaatatgtatgtaatggttttgtgtggtcttaaagagcaaacatcatatgagttatcacgattgaatgtaaaaataataataaacataatataaccccatagatacttgctgttttccgtataccagctgtcatgtaaatctagccatgcataagaaattcttcatattaatccaagtccaaggctcagtagagaatttaatattttttttaaaaaaaaatattgtgcactttgtttcatgtttaatttctcaccctatttctttcatgcagctcattggaacaccgaatgaggctgatcttgattttgtaaatgaaaatgcaagaagatatatccgccaacttccctgtcatgctagacagtccttccctgaaaaatttccacatgtacaacctttagcaattgacctagtggaaaagatgctaacttttgatcctagacagagaataactggtaacacttttgaaggcttgtccatcttttgtttctatatatatatttttgaagctttctttatttcaaaatgttgtttttgccataaatagtcaccattccacttcgaaaatagcaagtgcacttatggcatcttttgtcagatcgtgtttcaaatattggaaacacatgtcttttattagcacactattcttnntaatttgctgattgtgtcaccaaatttgaagttgttaaattctccctttttattcttatctccttttcatttaacagttgaaggcgcacttgcacacccttacttggcatcacttcatgacataagtgatgagccagtctgctcaatgcccttcagcttcgacttcgagcagcatgcattatctgaagaacagat

SEQ ID NO: 155 - DNA, 432 bp, Zea mays
  misc_feature (60)..(62): n is a, c, g, or t
  misc_feature (392)..(393): n is a, c, g, or t
cctcttgccttgatctgaggagatgcttcactaccaccctgaagttgctacagcaatacnnntgtcatgagagattccacagcccccaggacatcagcgggggctcacctcttctttttttgtctttgataaaaagtctactggtattagccgattattgcggcacctagctgttatagtacacttaatggctggttggaaccaattatggcctgaagttgctacagcaataagcatgtcatgagagattccacagcccccaggacatcagcgggggctcacctcttctttttttgtctttgataaaagcctactgcgagtagccgattattgcggcacctagctgttatagtacacttaatgtctgcttggaaccaattatggggcctagnngtggcagaacacttaatggctgcgtggaaacaataatgg

SEQ ID NO: 156 - DNA, 704 bp, Zea mays
tagccatttacatcctgggtagaccatacgttactcagtcaatattggttttatgatcttctcgctgcaaacagattttggagtaccatccccagatgcttcaggagtacatcgaaggtggagatcagattcacttcctatacccaaggtgcagatttgcactattgatttctcctgtttagttcagtgcagaagtacatctaccataggcctctgcactttttatagcttgatgctcaatgcctcactgtcttttaatttcttgtctaatacctgaaacagtggcacttttcgctaacgctacaccattgcagtggggtcgatcgcttccagcgacagtttgctcatctcgaggagaactacaggagaggagtagcaagcaccccgccgcgaaggcagcccacatctctgccgaggcatatacacaacaccattgatcgttgcagttacagggtagcgtaagttttgaattttttttcttgtactggcttaatgtggttctgtaactgtgacagagagcgagtctgctcatcagaagatggccacagtcaggactctgacagcgaagagcaaagagcagcatcctacgttgcccgaacaaccataagccctccaagatcacaagaggagggcggcaagctccagcctgcctaccagagcgccgccgccgccgcagactcctgcgccaagagctatctgaaggg

SEQ ID NO: 157 - DNA, 412 bp, Zea mays
ccaaggactgacggaacggatcggatggattgggcgattggcatcgcaggagattctggatcagattgtcttcgagcgcacgccgcaatggtcaactgcgcagcgctggcttggctgctgcctccgttcactcttcgctgtcagagcgaaacagcggtaacagagcaagacacgaggggtctgcactctgcagttgtgcaggaggaggaacagacacagggagaggagggcgcgcggccggacatggcgtggaacagagatcgtcgtcaccgccggcgggggtgtggtcgacgacgcgacatgcgaaacactacgtgctagctagcataggaaaaaacaacatgaaatcgtacaaccaaccaatccctcgcactgttttagttgttagctgtaggcgaaactgttcatccaa

SEQ ID NO: 158 - DNA, 348 bp, Zea mays
gagagcccaagcaagcgatggcgcgtatcggcgcgagtcatgtactcctcgtcgtcttgctgctctctgcggtcctgagctccggctcggctcgggttcccagagaacgaccggacgcgatgctgccggccggtcagacggcggcaatggccgagatgaccgtgcccggcgaagggcagagcagtgggccggcgtttggagtggcggcgcacgagtccaagcgcctgagccccggaggccccgaccctcaacaccattaggtgatggtagtaaccgtgatgagttattagctcgtgtgctgcatgcctctggaagacggtttcttatgtatcgtacgtcgcctcgtcg

SEQ ID NO: 159 - DNA, 337 bp, Zea mays
tgagagacgaagttgtcattgccaggggccctgaagggaacacgacctctgcctcagcctctgcctggtcggaggaggcgccggggataccgtacgacaggtcgaagaggctcagccccggtggtcccaacccgcagcatcactaatcgtcgtccgatcttgttggcaagtgccactgcggacatcttgctacgggaatctgtggttgattactacactttggttctgatcagcttttcttttctgtcctttctgatcagcttttcttttctgtcaaggccgtgtgatcaaggagtaaacgtaacaaattatcgccacgatttttctgaatgtatcc

SEQ ID NO: 160 - DNA, 357 bp, Zea mays
cgaagagttgcagaactgggtgcgttagccgtgagcgacagcggcggcggtggcggtggctcgccgccgggcaaaggctgctgcttgcccaaccagtcatcttcttcagcgtcagggcgacacctcggtgacgattgttgcaagcaaatgcgtattgtgtccaagaggctggtgccccaggggccaaaccctctgcacaactgaccagctccgggctccaggtctgcacttgcatgcatcgagagataggcagaggctttttcctttttgtaacgcagccatgcagagtgattagtggagctgcaggtcttcctcttccatgaggtcatgtaaattataggcctacagcttagtttg

SEQ ID NO: 161 - DNA, 456 bp, Zea mays
attctgtccttgtttgtttgtgctcttgttgcttcaacatctgtcaatgctaatgtgtggcagactgatgaggatgctttttatagtacaaataaactgggagtcaatggcaacatggagatggcacaacaacaaggtggatttattggccatcgcccaagacttgcattattcaatagggcatcaaaacaactggaccgtgaaaaaagacctgtgcctagcgggccagaccccatacatcacagcatcccatcacatgctcctcagcatccaccatcatatggcaaagctccttatgaagatgacaagagcatagcatctcctggtctgtccaacccgataggtcctccaccatttttagatagatactagttcatgcaaaagtagtgagtatttatgcacctatgccaatgaataacctctaattacctacatgtattggcctggtgtttggta

SEQ ID NO: 162 - DNA, 559 bp, Zea mays
acaactgctgtgttccagaacaagcacatcctgttggacttcattcacatgatttgcatagattatgagatgaccatagacaaaccactagcatgggttgatgataatggcaaacgcttctttccagatttatctgctgggctctacacatctaaaccatctcagcatgagaatggtgaagctgatgagtgtgatggaacgcctacaagtgtagctgaaagttctagttcggtatctgttggtgaagtagtttctcatggtaagaggatcaatgatattgcagaggacaacatgagagcacataacatattgtatgaagctgttggtgaaaatatttcaggtccttcattccatttgaatgaatattctagtggaaccatacaagctactggcaagccaaacgattgtcgacgtattgattcagctgtgcggaatttgttgctcaaaggattaggtcagccgtttagtgaggaagatattattggtatctatagaacaccactgctagatcagcgagggcaagttcgttgtggtctcttccagaaggagatcgaagaga

SEQ ID NO: 163 - DNA, 384 bp, Zea mays
gaggaggtggccgtcgagcagctgccgtcctaggcaggcgcacaccggcgtcctcgctttcttgtccgtccggccgcccatttgattttcggagttgcatctatctcatctaatatggatcatccatccatccatccatctatagcagtattatgtatgcatccacatggtaataatctggctgaccgcatccgcatatggtcgtctcatcgtccatctataccttgaaagctactaattaattactgagttattattactactgtttttactactactactacgtactactaatattactacaactacctcatctagctagctggtgtattaattgattttgtttgttactgctgtactactgttgttgtggagatgaaccat

SEQ ID NO: 164 - DNA, 707 bp, Zea mays
ccattctttcgacgaggctgaagcagctgaaaatgcaaaggtaacttgtcacttagaccaggctgatgctatcaggaggttatgattttgtgttggtaagcagcaacacttggttccttctgacattagcagtgtgggtgcagtctgcagacattgaccggaggattttgcaagaaacaaaagccgaacaacacatccacaagctcttacttctcggtaatgccaacttacttgaacttaagagcttttttttcttcttcatgtgaagtatatctgttctgtagttttctctcttgatagtttgctggatcagccaaaagaactgttgcgaagttgatccctagtcacttctctttccatgcattctagacttgataatgtgcctgtccattgataaggtactttgcctgtattcctaacagtcatcctccttttcaatcacttctttataaggtgctggagaatcggggaagtctacaatatttaaacaagtaaggtttatgccactccctggagaatcataattcttatgtcatcatcaagacagcaagtcacggatgtgtcttaccgctcattcgcagataaagcttcttttccaaactggctttgacgaggcagagcttaggagctacacatcagtcatccatgctaatgtgtatcagacaattaaagtatgctatactaaaaagggtgtgtctttttttttc

SEQ ID NO: 165 - DNA, 683 bp, Zea mays
  misc_feature (641)..(678): n is a, c, g, or t
gggtgggtctcctgcgtcaggttctccccaaacacatttcagcccaccattgtctccggttcctgggaccgcaccgtcaaggtctggaaccttacgaactgcaagctgcgctgcactctcgatggtcatggcggatatgttaacgccgtcgccgtgagccccgatggatcgctctgcgcctccggcgggaaggacggtgttactctgctgtgggatttggctgaggggaagaggctgtactcgctggatgcgggctccatcatccactccctctgcttctcgcccaaccgctactggctctgcgctgcgacccaggactctgttaagatctgggaccttgagtcgaagcacgtcgtgcaggacctcaagcctgacatccagatctccaagaaccaggtttgtacccaaccttacctggcttaacatgcatgttaccttttcggaaaaccctaaaggttagggtcagtaattgtatatgtttttgtcccgatgccttcctttttcctgttaatgtcgctgcagaaatgacaatgtgcttaatctttagtgttaggccgtgcgcttatatgtactgtagagtctactgtttatagagtgaattttgaaatggggagtgggataggaaggctgctggaaacagnnnnnnnnnnnnnnnnnnnnnnnnnnnnnnnnnnnnnntttgc

SEQ ID NO: 166 - DNA, 504 bp, Zea mays
agcagattttgagcgtgtagcgttgtgttttccacatcatcatcatcacgtgctgtttcttctcgttgttgatgtatggttgtccttgtgaacgaaacagagtggtcacgagtacggaagggaagcctgacccgcttcttcctgtgtaagtgctgttcctcttcttgttttcaaccaccactgccattaccataccctgcagaatccttacagtaccggtggtctctcggtcttgtttttacagcaccagtggcccggagaactcgtcttgggacaggtggttccagcgggtgcgctcccgcagcaacaaatggtgggcatcgaaaggccctgacttctcgtagctcctgcaaacaaagcggagaccatcctcaccagtcgtgtgcagattagaatgaaacacgttgagatgtatcgtccattggtgtcctggggaaacagaacaggcggcggcggcggcgagtgcggtgtggctctcgcaacgcctgatagtttttttttttt

SEQ ID NO: 167 - DNA, 773 bp, Zea mays
  misc_feature (697)..(697): n is a, c, g, or t
  misc_feature (700)..(705): n is a, c, g, or t
tatttcttacgagctgaatgttctgggctccaggtatggtcattgactgtcttggtgcgacaaattacatctggacttttattttggtaaacataattagctaccctttactaggaataagctctttatatgtgaatcttgggtccaaagattttgatggtgataattgcaactgcattggtaggtcaatggtctcaccggttaaactgtttatatgtaacagtctatggagctgcttagcttttagtttgcattcatggttaaagaactatatagacatgttgccgcctttgataagcaaaactttaagatgtttctgttgggattagggttacggaggtcgtacgagtggtagatttagggtctagggttctaggaccaggaccccggcgcttgggcgctgtcgggctgttggtggagaaggtaaggaactgttcacgcgatgaaaaagtaacaacgattaacagtaacgcgtgatgaaaagtaacgggatagggaagcacagtcaagataattgtatcttgcccgctttcctctttctttaaccagagggtacaatatataggctgtgatagcaaccctaacaaactaatcaactctatctaggagttccaaactaatgcttatccatctaaacaaactaatttgatacttatccatctaaacaaactaactggaactagctgattttattagngcnnnnnntcataacagtttcactctacatggaaaatgtagatatacatatgaatggacaacatgactaactgtct

SEQ ID NO: 168 - DNA, 1211 bp, Zea mays
  misc_feature (678)..(679): n is a, c, g, or t
  misc_feature (1181)..(1184): n is a, c, g, or t
atttcttacgagctgaatgttctgggctccaggtatggtcattgactgtcttggtgcgacaaattacatctggacttttattttgataaacatagttagctaccctttactaggaataagctctttatatgtgaatcttggatccaaagattttgatggtgataattgcaactgcattggtaggtcaatggtctcaccggttaaactgtttatatgtaacagtctatggagctgcttagcttttagtttgcattcatggttaaagaactatatagacatgttgccgcctttgataagcaaaactttaagatgtttctgttgggattagggttacggaggtcgtacgagtggtagatttagggtctagggttctaggaccaggaccccggtgcttgggcgctgtcgggctgttggtggagaaggtaaggaactgttcacgcgatgaaaaagtaacaacgattaacagtaacgcgtgatgaaaagtaacgggatagggaagcacaggcaagataattgtatcttgcccgcttgcctctttctttaaccagagggtacaatatataggctgtgatagcaaccctaaccaactaatcaactctatctaggagttccaaactaatgcttatccatctaaacaaactaatttgatacttatccatctaaacaaactaactgganntagctgattttattagggctgttggtcataacagtttcactctacatggaaaatgtagatatacatatgaatggacaacatgactaactgtcttgttgcttgcttgttgcagaggtccaagaaggatgaactgtgttatggattccatccctgcatcagctgttaaggaaggagggaaaactcctacacagactgaatttccacttagcagccttgactctttcccatcatttccattcttcagatctaaatcagctcggatagacagttcaacgtcgcaatcatccagtcagagggaagataggttggtgcttaagaacaagtctcctaggtggcacgaacagctgcagtgttggtgcctgaatttccgtgggcgggtcactgttgcctcggttaaaaacttccagttggtggcttctgaggacaatggaccagagaaccaagagagtgacaaggtgattctccaattcggaaagatcggaaaagacttgttcaccatggnnnncggttatccaatatcggcatttcaagc

SEQ ID NO: 169 - DNA, 594 bp, Zea mays
tatatcacgatcaagtgatggctgtgttggaaaaatgaggtggagtatcttacctgactacactatttctgtctaacctcaaatgatttttgagctgttttctgtttggacctgacattgtaatggcaacaggtcaaattttcttggcactaaattcatcgtgcatgacactcgagcaccacacaatgctgggagccttgtctcctgtgagcgcggcagccgcagaatctcctctaggagggtttcccccaaggtacccactgccagctaccccattgcccgggtgaactatgagctaaacctgcttggcacaagggggcccaggcgtatgaattgcacgatgcattccatcccagcctcaacgctggaccctcaaggcatggtgcctgagcctggccaacccaagcagctcttcatccctggctcgtcgtccttcgaagaatcctttcgcagtgcaaacaacaccccttccagctcaaggttctcggtcgcagaccgctccttggactggagctcctctcgattctcagagacgagcggattggctcagcaggacgacaatgacagtgaccaggctaagaagaggcctttggt

SEQ ID NO: 170 - DNA, 487 bp, Zea mays
agctccgacacgctcgccctgggctccagcgccgtcaggagcttccagttcgggtgcagcaacgtggagtcgggcttcaacgaccagaccgacgggctcatggggctcggcggcggcgcgcagtcgctggtgtcacagacggcggggacgctcggcagggccttctcgtactgcctcccgccgacgccgagctcctccgggttcctcacgctcggcgctgctggcggtagcggaacctcgggcttcgtcaagacgccgatgctcaggagcagccaggtccccacgttctacggcgtgcgcctccaggccatccgggtgggcgggaggcagctcagcatacccgcctcggtcttctccgctgggacggtcatggactcgggcacggtcatcacgcggctgccgccgaccgcctactcggcgctgtcgtcggcgttcaaggccgggatgaagcagtacccgccggcgcagccgagcggcatcctcgaca

SEQ ID NO: 171 - DNA, 436 bp, Zea mays
atgcctagtcattgttagcttctctcccgtctttgctactgcgaaaatgggttattcgatctcaaaatacattcgttcttcggctgttcaggcaggggagaaggtgatgagcacggccgtgggggccaaggacacggttgtcagcacggccgtgggggccaaggacacggttgtcagcaccgccgtgggagccaaggacgcgatgatgaactcgctcggcatggccggcgaggacaaggacggcaccaccaccaccgacgccggcaaggacaccagcacccgcaagcctggcactggcagggactattagaggacacggcagccaaacttctcagtgtttctgttccagaagtttctgatcccatcatttaggttcaaaagtttctcatttcatttcaaactttcagtgtttggtgcatgctgtaaactctcttca

SEQ ID NO: 172 - DNA, 863 bp, Zea mays
  misc_feature (773)..(780): n is a, c, g, or t
  misc_feature (791)..(798): n is a, c, g, or t
  misc_feature (802)..(805): n is a, c, g, or t
  misc_feature (818)..(827): n is a, c, g, or t
  misc_feature (834)..(854): n is a, c, g, or t
ggtgagcatcatgtattatttcactaaagattaatgacattcctcagagcagaacggccatcaattcaccgccttgacatgagttgcagaatgtttctgggtgaaaatttagaagaatgctccattgaagaactgcataatctggaggttaaactggcgaagagccttcacgtcatcagagggaagaaggtaagtaaatgccacagttgtcacataaaccctagtacgtctctaaaatttctgcgtattacgataacaaagaaactgttcgcccaagttgatatgcacgtcctaccttttgttttcacagacacaactgctggagcagcagatatccaagctgaaggagaaggtaagataacgcatagagcccagaccccagagtatcctgaaactcttagtgaccaattcctgacctctgctgttccttgtacaacttgcaggagaggaccctgctccaagacaacaaagagttgcgggataaggtaaatcaaacgaacacaacattgaaaaccgcagagaaggcatgtagggttttttttaataacattgcaaactgtaaattaaactcttaacgttaacatgatatgcgcaagaaagacagtctcacagccatcatgtgtggttttctaaaacttaacgtgctgcctgttctgttcttgtggcttcagcagcgcaacctccagtctccaccggaggcgccaccggacctgaaccgctgtgtccctccttggccgcgtagcctgccggcaccgagcaatgacatggacgtnnnnnnnnagctgtacatnnnnnnnnccgnnnnggagcgctcctcnnnnnnnnnntctgatnnnnnnnnnnnnnnnnnnnnngatcggcta

SEQ ID NO: 173 - DNA, 1094 bp, Zea mays
  misc_feature (98)..(100): n is a, c, g, or t
  misc_feature (161)..(163): n is a, c, g, or t
  misc_feature (348)..(349): n is a, c, g, or t
  misc_feature (391)..(394): n is a, c, g, or t
  misc_feature (632)..(635): n is a, c, g, or t
  misc_feature (658)..(658): n is a, c, g, or t
  misc_feature (660)..(660): n is a, c, g, or t
  misc_feature (670)..(671): n is a, c, g, or t
  misc_feature (680)..(705): n is a, c, g, or t
  misc_feature (715)..(760): n is a, c, g, or t
  misc_feature (766)..(777): n is a, c, g, or t
  misc_feature (781)..(1089): n is a, c, g, or t
ccgcttcctgatcctgccttccttgctgtgagtactgcatcaaataaattgagatggtcagatgaatgaatcagttgtcttactcgactgctgacctnnngactgagaatctgtggtgctgcttcaatggctatttgcaggtcaggccgtgtgtatgtcgnnnacacagcgacaaacccaagggcgccatccttgcataaggtggttgagtctgaggacattgctgagaatactgggcttgggttccctcacacgtctcattgccttgcgtctggcgacattatgatttcttgccttggggacaaggaggggaatgcagctggcaatggcttcctgctgttggattcnnagtttaatgtcaaaggacggtaagttcttaccgtttaggccnnnnccatcggtgttgaagtgtaagtgtaacatgttactatgcccaattacagagcatagcctgttaccattgaatcacatcatgctgttatacactctgtgccatgtcacagtaacataagagcacacgatccagacttgtatgatgggtgtgattcatgtaatgtgctctgaaatagctgcagatatacgacaaaattgcttgacatgtgaaaaacggacagattcattatgctgatctnnnngtctttattacttattaagtttntnctacatgcanntgggaaaannnnnnnnnnnnnnnnnnnnnnnnnnatgacttctnnnnnnnnnnnnnnnnnnnnnnnnnnnnnnnnnnnnnnnnnnnnnnccctgnnnnnnnnnnnncagnnnnnnnnnnnnnnnnnnnnnnnnnnnnnnnnnnnnnnnnnnnnnnnnnnnnnnnnnnnnnnnnnnnnnnnnnnnnnnnnnnnnnnnnnnnnnnnnnnnnnnnnnnnnnnnnnnnnnnnnnnnnnnnnnnnnnnnnnnnnnnnnnnnnnnnnnnnnnnnnnnnnnnnnnnnnnnnnnnnnnnnnnnnnnnnnnnnnnnnnnnnnnnnnnnnnnnnnnnnnnnnnnnnnnnnnnnnnnnnnnnnnnnnnnnnnnnnnnnnnnnnnnnnnnnnnnnnnnnnnnnnnnnnnnnnnnnnnnnnnnnnnnnnnnaaaaa

SEQ ID NO: 174 - DNA, 779 bp, Zea mays
  misc_feature (279)..(282): n is a, c, g, or t
  misc_feature (673)..(677): n is a, c, g, or t
  misc_feature (750)..(756): n is a, c, g, or t
gccgcgctcaccaggatcatcgtcggggtcgtcgaggcctgccactcgctcggggtcatgcaccgggacctcaagcccgagaacttcctgctcgccaacaaggacgatgacctctcgctcaaggccatcgatttcggactctctgtcttcttcaagcctggtaagctgctgctgctgcagaatcgcaaacttctgcccgttgttcctttgcgacatactagtactactgtttttagtcaacggctgaaatttgtgcactgcatgtgttactactaatcnnnncagtagtagctcgtacagttgtgcttgcctagttgcgttagctctgctttatccatgttcgttgtcgtaggacatgaaatggatgattgcagctgaaattctctaacagcatcttctttggagtcaactcaaattttgctacagaaaagggttgaaagctaactttgcaatagtgtggtcttaccggaaataaatgcagctagctacttgcaattgcaatagtgtggcaattggcaaacactaattaatactgtaagtttagtctcctaacctgctaggcagcagggagcatttattagctgagtggcagttggatgattggatatgatggaagctgcgggtgtgtttgttttcccctcctaaattatataaattaaattatggtgcaagnnnnnagaataaaatatcactttgttactataaataagttgaaataagctagcattaagtagcttatttataatctcnnnnnnntatctgatattttactcttatat

SEQ ID NO: 175 - DNA, 835 bp, Zea mays
  misc_feature (252)..(252): n is a, c, g, or t
  misc_feature (313)..(313): n is a, c, g, or t
  misc_feature (794)..(798): n is a, c, g, or t
  misc_feature (825)..(831): n is a, c, g, or t
agtgctctacattattactcttgcgcattaaactcatgatggatggatgtgagccaagcatacactgatgctaaaattgaagattgtaaacctcaactgggtctagaatgatgttatacgtgataggctaggggtagcaccaattgaagaaaagcttgtccaacttgagatagtttggacatgtccaacagagatcgccagaggcgtcagtgcatagtgggaagtgggaacctaagacgcgatagcaatganaaaatagtaagaccgaagttgacatgagaagagatagtaagatgagacttgaaaggataanatatacctaaagatttagcattgaataggagtgcatggaaaacaactatttatgtgtcccttggttacatatcccttttagtgatgttcctcagttatgtaattgtgtaggtgatatgttcactgaggaacaaaatgagctcgtagaatcagctgcagagatgctttatggtctgatacatgcacgatacattctgaccagtaaaggactggctgcaatggtaattgttcttctctaaccggtgtactgacactttgatgtagttttatttattaaggctgctttcttgtacagctggagaagtataagaactatgactttgggcggtgcccgcgtgtttactgctgtggtcaaccatgcctgccagttggacaatcagacatccatcgatctagtaccgtgaagatatactgccccaagtgtgaagacatctactacccacggtccaagtaccaaggcagtatcctaaccatactcttannnnnctgtcttaatgcgtatatgtttcaaannnnnnnctct

SEQ ID NO: 176 - DNA, 536 bp, Zea mays
  misc_feature (321)..(321): n is a, c, g, or t
ttcttcccccgtacctctcaccagcggtgtcttcggtatgtgaaaacccaattcttcaaccctacaggatccaacaggcaatcgcagctggcatcttacctttatcacccttgttcctccaacaatcatcagccctattacagcagttacctttggtgcatttattggcacaaaacatcagggcacaacaactacaacaacttgtgctagcaaaccttgctgcctactctcagcaacagcagtttcttccattcaaccaactagctgcattgaactctgcttcttatttgcaacaacaacaactaccattcagccagctanctgctgcctacccccagcaatttcttccattcaaccaactggcagcattgaactctcctgcttatttacagcagcaacaactactaccattcagccagctagctggtgtgagccctgctaccttcttgacacaaccacagttgttgccgttctaccagcacgctgcgcctaacgctggcaccctcttacaactgcaacaattgctgccattcaac

SEQ ID NO: 177 - DNA, 617 bp, Zea mays
tcccactattgctgaaggcgatgagtctgtatttgtcaactccaattcaaacagctcgatggtgcctcctgtcctggagaacaatgctgttgatctcactgatgggctgacagatttggaatcctatatgaggtttcttatggatggcggtgcaagtgattcaattgatagccttctgaaccttgatggatcacaggatcttggtagcaatatggacctctggaccttcgatgacatgcccatcgctggcgatttcttctgaggaatttgaagcttggccataggactatgtacatagggactagggtaagcatcggcgtctgcaaatttctctgaagttacattccattttcacctgggctaatattttttttgttccatgtttcaggaataaagactgggagattgggaagcacctgcttggcaccttggggtagcatatgctcgtgtctagctcagatgcagaagtcgcattctgaaactctttggttatcgacctgttccctattttaactatctctgtatgagagccatttatgagactgaaccattttaccattttgttttcccccttctttcgttgttacagtatatggtttaacattatgatttatgga

SEQ ID NO: 178 - DNA, 499 bp, Zea mays
  misc_feature (492)..(494): n is a, c, g, or t
ccttagatctgaaatcggccggctaacagagagctcagagaagctcagactagagaattcagctctaatggtaatgaactttttccaatgcctctgtatactacattcaggcgatgtcatgtcaatctgcctttcctctgacgcgaggtgcactgtcacttatcaggtgaagctgaaggacaccgcagaaccgtctccgattaaagcatccgcatccccgtcctctccccgtgcctccgcggagaacttcctttccatgatcgacagcgccaacgcgccgagcgtcagcaggcacacggagcacggcggtcccaggctccggcagctcctggactccagtccggcgacagacgtcgccgccgtaagctgatgatgaagccggtccggcaaatacgccacagcacatgcatgtgtcctggggattccgcaggctcatgctgctcgagtgctcgccgtaaacgtcagcgttacggactcggactctgtactccnnnttagg

SEQ ID NO: 179 - DNA, 811 bp, Zea mays
  misc_feature (131)..(131): n is a, c, g, or t
  misc_feature (140)..(140): n is a, c, g, or t
  misc_feature (152)..(152): n is a, c, g, or t
  misc_feature (355)..(355): n is a, c, g, or t
  misc_feature (364)..(364): n is a, c, g, or t
  misc_feature (583)..(584): n is a, c, g, or t
  misc_feature (596)..(600): n is a, c, g, or t
  misc_feature (608)..(615): n is a, c, g, or t
  misc_feature (648)..(650): n is a, c, g, or t
  misc_feature (751)..(757): n is a, c, g, or t
  misc_feature (767)..(786): n is a, c, g, or t
  misc_feature (797)..(805): n is a, c, g, or t
tcgtctctttttttttgctatatacttatttctggatgcgactgttgattcgatctatttttggttgcctttttatacagggaggaatttcgcaaggagttcaaggagaagaaccctaagaacaagtctgncgctgcggnaagaaccctganagctgctttatgaccggccccatattattactatctactttgacttttcccttaatgacgacttattatttgatttactcgtcacgattcccctctcctggtcgaacttttcaggtggggaaagctgctggcgacagggggaaatccctgagcgagtcggtaagctccatcttctgtactaaagtagtagttgattggactanaaatctcgngctgattaattgttttacgcgtgcgtttgtgtggattgtaggacaaggctccctatgtagccaaggctaacaagctcaagctcgagtacaacaaggccatcgctgcctacaacaagggcgaggtagggaaactgatgcttcaattgcgttgttacttaatgtgtatataaactgctcctgctggtcatttattcaaatacgtatgcttactgaaccatnngttgtttgttcnnnnnactgcagnnnnnnnngctcctgccaaggaggaagaggaggaagatgannnggagtctgacaagtccaagtcggaggtcaatgacgaggatgatgaagagggtagtgaggaggtatacaaaatctattcctgtcttctccatattttttccnnnnnnnaaataccaannnnnnnnnnnnnnnnnnnntgctcatgcannnnnnnnnttgcta

SEQ ID NO: 180 - DNA, 707 bp, Zea mays
ctctttcttcaggtgaccttggaagcaacacctctgtgatacagctaaaatgcaagcacacaaaggcgcttttctcatttgtcatttgttccaggtgcttaacatccccaccaagattaacaagggtaccgtggaaattatcacccctgtggagctgatcaagaagggtgaaaaggtgggctcgtccgagtctgccctgctcgccaagctgggtatccgccccttctcgtacggcctccaggtcaccagtgtctacgaggatgggtccgtgttcagccctgaggtgctcgacctttctgaggaggacctgattgagaagtttgccactggtgtctccatggttgcctccctgtcactggcgatctcgtacccgacccttgctgctgtgccccacatgttcatcaatgggtacaagaatgtgcttgctgttgctgtcgagacagactactcatacccacatgctgacaagatcaaggagtacctcaaggtaaaacgtgctttcttgggttatggaagttgttaagcaactcaaggccttgcataattctggtttaatttgattacagtccatatctatgaatgtgtcttgttggcatttaaactaccatgcatacctatgcttctttgtccatatcatatgtactgtatcatcagatcacgatgtagctagtttatgtcttggaaccatgtgtttttaactattctga

SEQ ID NO: 181 - DNA, 503 bp, Zea mays
ggggtccccgcaagaatggactgatcaagcagttcttaaaggatgtcgattggggggagattgactatcttgttgtggacgctcctccaggaacatctgatgagcacatctcgatcgtgcaataccttcaagccacaggaatcgatggcgcgataatcgtcacgactccgcagcaggtctctctgattgatgtgaggaaggagataaacttctgcaagaaggtcggcgttcctgtcctaggtgttgtggagaacatgagtggcctgaggcagccgctttcagacctcagattcatcaagtcagatgaggcgggcaagacagatgcgacagaatgggccctgaactacatcaaggagaaagcccctgagcttctgtcggtcatggcctgcagtgaggtatttgatagcagcaagggaggcgccgagaagatgtgccatgaaatgggggttcctttccttggtaaggtgcccatggatccgcagctgtgcaaggcggctgaggaa

SEQ ID NO: 182 - DNA, 744 bp, Zea mays
  misc_feature (667)..(667): n is a, c, g, or t
  misc_feature (682)..(682): n is a, c, g, or t
  misc_feature (684)..(684): n is a, c, g, or t
  misc_feature (700)..(724): n is a, c, g, or t
tggttctgatcttaagccatctcaagtgatgaatgagccaagggtccacgtcggtgggcgtgacatgaggactctttacacacttgtaagtgtgtgattgtcatcgcatttttattggttaattcttgtttcttgtgatgataatttgtagattagttcttgttttctccttttattttgctcaggattcatatctgggccatatatctatatatactatcagttgacctagtttagggtatatctttaagcatcttctacatccgtgatgataataatagatccatgaaaagcaaagaatatgttttttttgaactctcaagcccttttgtatgcctttaggctgataagacgaactggcctatcatattttctagaaggtgcaattttggatcatataacgactaaggatcgttgtttagtaaggttaaatccatatatattgttgtctgggtgtctttatgtgatgtcgttcacacatacactcataatgtaacaattaatccaaataaaatgcattagtgcatgaaatgagaatatatatgtcaattggagacctgattacttagtatgtatctagatttgctaaactatagttaatgtctgtcaacctatctatttatcctgttactaggtcatggtggacccagatgcaccaagccccagnaaccctacaaaaagngngaaccttcactggtannnnnnnnnnnnnnnnnnnnnnnnnaatccactggcgctttccat

SEQ ID NO: 183 - DNA, 359 bp, Zea mays
  misc_feature (343)..(343): n is a, c, g, or t
ggcggtgtcggtgaacctagagttgagattggaggtgatgattttcgagtggcctataccctagtaagccatcacgtactccgcagatcgagtccatttggcgcgcggtaggccatatctatggccaagatgtctcgactactctccaaactctcatgtccaagtgacatccatggcttttggctcactgtgtgtgacggctaaatcagtctcctcgatcgtgcccatagctcggttgactacaaagattggctcatgctaataaatatatagtagtattatacactgagagagacactaacacccccccccccaaaaaaaaagggcagggatttctgatcancccacccccaaaaaaa

SEQ ID NO: 184 - DNA, 497 bp, Zea mays
ggccgctttgtcaagcgcgccgccggcacctcctcctcctcctcctcgggtgccggcacatcggacagcatcgacgctgctgccaagttctggctctccttctccgacgacgccagggacggcttcttcgtggacgccggggcctacggggtcgtgccaagcttctagaaagtttgtgccttgaaaatgaatggcatcacagcgggcagcgcttctgggcttctggcggtggcgttcgcccagtttgaagcaagttaagcaaccgcccttctcgtttgtgtcgtgtcgtctcgtcattcatgtgagcagcatccgtggtgaaattccgccatcgctatttttaaatgatggcgcggaatttcgatgggtcatcaccagttggtgaacgaactaggggatttattgtgtcttgtatcttgtaagatacaactttactgggttgtctatcaaattctgcgttggctcatcgtcatcgctttactggggctaacaatata

SEQ ID NO: 185 - DNA, 472 bp, Zea mays
tgccatttatttattttttaaaatcaatacggaagtgtaaatttttttgatggtttgttctgccgcgttaccttgtgaatggagggaaccaacgacttgagaacgaggaacatctcgttgagcttctcccggcgctttcgctctaacatgacgtggttcttggcgccgttttcctgggctgttaccgtcgtgcccccgccaccgcagttcgtgttcgcccaagcaccgccgccggccaccgctttcttcagcaatttctgcggctcttcgatgaccggcaccgccgccgcttcacccgagcaggagtgcgatgacctcgtccaaaccacgaaacttgtcgcgcgagaaccatcagcgggtgcgcttgagccatccaccgggagcgctgacgacgggacttcgaaattagacccgtccattatccaggcatcctctagcggctgcacgtccatttcctcgcagaggctgtaga

SEQ ID NO: 186 - DNA, 670 bp, Zea mays
  misc_feature (616)..(616): n is a, c, g, or t
  misc_feature (663)..(663): n is a, c, g, or t
  misc_feature (665)..(667): n is a, c, g, or t
ctgctcttcttttcagatcatggaaagagcaaattgtgacgtcttttagatcggtatatggtattccatgtatactcatacaatattattattagtataacctttaccgcagttttgacagtgcttctctttcgcaaggttccatttgttctggttagtactgaattaggaaatcctacgggagtggtacatataaatgtggataaggcggatcaaccgttgcctcttaccacagtgtttcataaacttatcccacttgagacgactccttacacattgtttcaaactattattggcaacggctatccggtaagttcttttggttgtggcattaagaacatatatttatctatgcaatattcagccatggggtatatctcttaagctgttatgttatttgtgctatagattgcgttgttggatgaagaaaaaatactaccgattggtaagaaaattacagcaataggactatgtcaagcaaaggatgcagaaagtgttgagataacatcgtgcccagagatcccctttttcttgtaagatgttatttggtgttacggtttcatattttttttcttttcttgctgatgccatacaccatttttttcctctatgaatntccttgtgaataagggagggagggcatgcattctcttggtgcgctantnnntaa

SEQ ID NO: 187 - DNA, 658 bp, Zea mays
tgctttcagtttgcggcatcagtcggtggcgcctgcgatggagtctctgttcggccaatcgcagcggaggaggagggcgggcggcagcggcttcgaatcgctcaagcgtctgggtcacatctcacccgctgtgcagtcccacctcaaacatgcaagcccctcgtctccttctccaatcccggctctcttctcacgcttggctttagctgatcccgttcccgactgcaggtgtacctcaccctatgctccgcgctggccttctctgcactcggcgcgtacctccacatcctcctcaacgtcggaggcgccctcacgaccgtgggatgcgtggcctccatcgccttcctcatctccctgcccgcttcacgggaccaggagaggaaccgcttggcgctgctcatgtctgccgcgctccttcaaggcgcgtccgttggtccgctcgtcgaccttgttattgacttggattcgaggtcaatcgtcgtcactcatccattacattacacaagaatgatgagctgtggtctgctttgttgatgaaactgcttctcatgtaccaggattctcgtcactgcgttcgtcgggacggcagttgcttttgcatgcttctctggcgctgccatcatcgccaagcgcagggaatacctgtacctcggcggct

SEQ ID NO: 188 - DNA, 519 bp, Zea mays
gtctgcatcagcttcgccgtggggctgagctgcctgacggcgaacgggccagtgatactggaggcggtggtgatcacgatggtggtggtgctggggctcaccttctacaccttctgggcggcgaagaggggctacgagttcgagttcctggggccgttcctggtgtccgcctgcctcatcctcatgctcttctccctcctgcggatcatcttcccgctgggcaggacggggaccatggtgtacggctgcatcgccgcgctcgtcttctccggcttcatcatctacgacaccgacaacctcatcagggtctactcctacgacgagtacgtcgccgccgccatcgagctctacctcgacatcatcaacctcttccaggccatcctagcggtgctcgaaggcgtcgactgatagggtcatatatataacacggccggctgaggctcatgggctgtgagcatatatacataggatcatatatatgcaatctatacatgagctaccactaccactaccgagaga

SEQ ID NO: 189 - DNA, 1158 bp, Zea mays
atagtggaactgcacttgatttgccttacctctgcagaatgaacaggtaactttatattatgcatggccatttgatcttttttatgttctcccgcttacccttggcatatgaagagctgtttctgaacctaatgggaactttattatcttccgatatctggaattagcactgcaaaaaactgcgctatccatcccataaaaagtctgctacctatttctgaacctaatgcaaatctcatgttagttttgttatgtttaaattcatcatgatatggttttattgaaataaaatctgggtacagcaccaaatatcaatgagctagaattgctgactgcattaccgctagcacacatttcattactttcatgaattcgaatttagaatgctatgctatgtcacttccatttgtttgcaacaggtgtcatatcatttttttattatcacatacctctgttccacatcgttgcaatctttgcagcatgaatctgtccagataatttatccctggtgcatcagttaaaaagtttatctggtatagaataattatgtaatttttgtaaggctgattctagtcctatgtttgtatttgtattaggtatggctcataatcatatacatctataagagattctagttatgatagacatctcttcagctaaggccttttatctaaattgatattacaggagtgggcaatatgtatgggaagatcaccgaccgcgatctggtgtctggaaaggcactagtggtggggaagctatttcctttagtggttgtgatgatgatcagacctctgcagatacctctgtaagttctagatccactcctcaacaatttattgcagtcatgtctatgtgctactctttaaattatgaggcgagtctgtttaagggactgctggcagatcatctttttatgcagtttcttgtttactatttgttcgatcaagtttgttttggtctgcttcaacccactgtcgttcatagcatttgattcaactggaattgttctgatcaggctttatcaaagatcacttcgactggtgcaatgacattctgcttcatccaagctattgaacgtggacagggcaccacctacggtagtatcctgaactctatgcgttccacaatacgcaacacaggtgactcagcgggtgt

SEQ ID NO: 190 - DNA, 767 bp, Zea mays
gcaagtccgtacacacagacacacaacgcacgtcaccgccatgtctgccgccactgcttgcatgcccctggtccttgatccgtctcctctccatggatcggcggcaatggcagatgccgttgagaggcggcagcccggtggcatggagaccaccaagaccggttccgagggaacgctcggccgcgtcgtcaggaggtatatatatttccgttccgtgcggaaaacatctgttgttcattaccaaccattttaatttctcagccagctgcaggctgcagctgcccggatcgatgtggccggctgcccggccggcgtaatcaagaacggccggccaggcagcactagtataattttcattatggaacgtatcctgttcttcttccttaagctgacaaacatgatgcattcgatcgatcagccaagtgtttggcaacgaggacgacgaccgtgctgggcacgacgccggcgacggcgacgaggtgagcaagccgcgggcggtggtccacacactgacgtgcgagcgcaagccattgttcgagggcttcgcgctctggcggagcatcggcaggtaaccacccatcgatgtcgatccaccgctcgactcgcaatcggcaggatggatctcattttgcattgatatataatgatgatcttcatgcatatatacacagaattcatatggtaattattatatactatatattaagctgtgatcgtttcgtttctcactgcaggcctgagcttcccgaactggatccaatcttatc

SEQ ID NO: 191 - DNA, 563 bp, Zea mays
tgatccagcacaatcagcgttgttcttttcagcacaattgtaagttctttctcaaactgcagcacctaaagattacacaatataataagccatattgattttcaagcctatattgcagacaagtactcctaccaaacataagaacattcctttccctgctacaacatgggtctgactcagaacaattattctctgtttatgcaggtctttgggctgctgacgaagccactgatcaggctcttgatcccgtcaaggcacctatccagggaaccaagcgccctttctgaactatccagcccgaagtctttctttgagcagctggccgccaacagccctggacacccggatcttgagaatggcataagcctacgacgcccggcgagcctccgttttctcctagtaagcccggcacggtccgtccaccattactggcgcaagttcgatgacagtttcatgcggccggtgtttggtggccgtggcttcgttcccttcgtccctggttcacccactgagagcagcttgccattgcttcctggcaatgagaactgaaaccaggcgtatcg

SEQ ID NO: 192 - DNA, 355 bp, Zea mays
  misc_feature (304)..(306): n is a, c, g, or t
  misc_feature (315)..(318): n is a, c, g, or t
ctttcggaatcaaccatgatttcactgggatgtgctacccactccttgttagctctgttggtatcattgtctgcttgatcaccaccctttttgctactgatttctttgaagtcaaggctgtgaaagaaattgagcctgcacttaagaagcagctcatcatctccaccgccctgatgactgttggtattgctgtaatcagctggttggcccttccagctaagttcaccatcttcaactttggtactcagaaggatgtctccaactggtatgtttttttctgttaatctttgctatttatttggannntggaatgtnnnntgacaactgccatatctttgcaggggcttgttcttct

SEQ ID NO: 193 - DNA, 568 bp, Zea mays
  misc_feature (494)..(495): n is a, c, g, or t
  misc_feature (522)..(524): n is a, c, g, or t
  misc_feature (538)..(553): n is a, c, g, or t
  misc_feature (562)..(565): n is a, c, g, or t
gagctgtgatatgactgttcatgttggtggcaagcgaacccatggaagatacctgctcctaaggcaaagggttgaagtaagtttctattctttcattgatctggattgctactccctgcatttttatagctctcaaaacagaaagctatgattagtttccaggagataaaccgggccatatggatgacgtgcctatggaaatccaagatcctgaaaaccagagagaccagaaaaagccgcccaaggagcaaacggcaaaccaccataacggcgatgatccggccactgatggcaactgtgatgaccagggtaacattgattcaaaaatgatcgatcttaatatgtgcccggttcgtacgcatgggcaagaatcaaattcccaggtctgtcatgctcactgcaattgatgtctactgtacttctcattacagtttcgatcttgtaacaagtgttctttctgatggtaaatccagactcagggggtaggtcttagnntgaacaaccatgactctccaggggtgnnnccaacaagcaattnnnnnnnnnnnnnnnnacaagcaannnngaa

SEQ ID NO: 194 - DNA, 827 bp, Zea mays
  misc_feature (804)..(807): n is a, c, g, or t
gtaccagtgaaattagtcaactccagattgttacagtaagtcatatcctctgcagtgctcagagcacaagagatcctttagcatacgtatcttatctggctcctttctgctaagacgaagtgcactgtctgttcctgtcagactgctgcctaccatttagtgacaatttacaaagcatatacgtgagcctctgtcacatctgaaagcaaagagaagaaaggattgtcagggtatttatattgaattagaacagattttctagtgcattttctgtatgcaggcatctaagtgcaccaatctatctatcctgctgcatgtaccgagttatggcatggaatctgtactttttttaatttgccgtctcatgtcccccctccctcagtcctcttagttctgtactccaaccttgaatttcggcatacatggtagatgaatacaagatgttaattttaaatcataggttcgtttcatggcacttgttcaggtggtcggccattgcaacccatctaccaaatcgcacggacaatgagatcaagaactactggaacacacacctcaagaaaaggctggccaagatggggatcgatcctgtcacccacaaatctatcagtggcactcgcattggcaccacaaacaacaaatcaaccaaggccgccgcaagcctcagccacatggcacaatgggagagcgcccgcctcgaggctgaggcacggctggctcgagaatcgaagatacggacagcaacgccaacaccaactgctctccatgcgcagccaacgatactacctgcctctgctgcttctnnnngccttgacgtgcttcatgca

SEQ ID NO: 195 - DNA, 1047 bp, Zea mays
  misc_feature (275)..(295): n is a, c, g, or t
  misc_feature (308)..(325): n is a, c, g, or t
  misc_feature (331)..(336): n is a, c, g, or t
cggacgacgacggccagcagcaacagctgcagtcacccccgcaccaccaccacgagatagaggacgacggcgatgaagacggcgacgacgcccgcagcgacgcgcctgcccgccacggcggataccactcggtaagcctgcccgtctccttccccgccgcgattccgattcacctcggcagctttgctgttccccgtcgaacctgcctggggctgggcagggcttaggttttcggattcgttcgtgggactcggggatgcagtgttttttttttnnnnnnnnnnnnnnnnnnnnngggggggaattgnnnnnnnnnnnnnnnnnnttttgnnnnnncgcttgattttgttttattgtgtacatgcagagagaggttgatgaatccatgaatttgtttgccttatattgactccaagtccagtcctctgttctactaaacccaaacactagaaaaaaatggagtttcaggttcacaaggtctagacacgtgcttcattgcatttacaggagtatagcgcatgttttctctgtcatgttttgctttacaagtttcattgctactcagttgggtttaggaaaactgtagtttagttgatttctgcaagcgcaccaacctgtgctgtgagttactaaactgtaaatctatttacatttttgggaaattttgagcgatatcaattgatcttaacaacaccggacctattctgctgagaatttgggccaccgtgctcttctagtgtcactaaggatttcaagcttaatgctcatgtaatttcccttctgccaaagctgttcatccttacatactgttccaatcttccaatgctttgtacttaataaagcctcctgaggtaacactgacctatttaatacatatttatctaggaagaagtggatggagaggcagagaatggaggagaaggtgaaggcgaaagtgaggggcaagttgaaatggaagaggaaagtgaaggcgaagctcatcgtgctgaccttgatcaaggagaaagtgatggggacaaagtccatagctccccagaaagagaactc

SEQ ID NO: 196 - DNA, 888 bp, Zea mays
gactgacttgcaattactgtagaatatatattgttgacaagaacttacttcattttttttaaaaaaatctctgcgcctggctttccagcatgacaatttcagggtgggtgttcatgatctccgttgggttcaatgcagcagccaggtaaaaaatatatacacgctagagatctctttttctattccgatgaggcgatgacaggaaaagataaaccttgcattttttgtttccagcaaggtaaaactgaactatcttctgttgtcttctgttgtttcttccagcgtaagagtgagcaacgagctcggcgccggcaacccaagggcggcggcgttctccgtggtggtagtgacgctgctctccttcgtcctgtcggtcctcgtctccgccgtcatcctgctgtgccgggactacatcagctacatcttcaccgagggtgaggacgtgtcgcaggcggtctcccggctcaccccgctgctggcgttcacgctcatcctcaacggcatccagctccagcccgtcctctctggtcagtacatatatatataatacattgcatactgagagagtactgcatcgctcatgtatatacacacacagtacatagccatgcatgatgactcacgctgacgattctctctgaatacatacaatacaatacaatacaatacgatacgacaggggtcgctgtggggtgtggatggcaggcgttcgtcgcgtacgtcaacgtcggctgctactacatcgtcggcatcccgctcgggtgcctcctaggcttctactttgacctcggagcagcggtacgcacgacctctctgcgcgtggcgttcttcgccgtcactttgtcttctacgtttgatacgatggctgctggatacaacggttgcagg

SEQ ID NO: 197 - DNA, 833 bp, Zea mays
tatctaatgtacctaatgggtcgaagaggtgtgcaacagatcataatctaactgtttccaactctgtaatcacactttctacttttctagggtctacaccttgcttaaaaggaagaggtgtggccacatatttaatactctccatgttttgttcaggtttatagctcacttgggcatggcttatgccatcacattttggacctgttatgtactgttgaaggagtatgaaattatttctaacatgaggctgcgctttctagcttcagagaaacgccgaccagatcagttcactgtatgttcttttgctactctgttcctgtttattatagtgtttattttgtgttgcatatcacattgaatagttgaaaaagtagatatgccctggtaatttcaccaactctgcattaacttttttcattctcagaagttgggcaacgaaccaaatccgtgttcagatccatctattacttggctaagttttcgattttatggggtgtacaaataaatatgaacttctggagaggtttcatccatgttctagatgaattgcatctgagccttgtggctgcaaatccaacatgtttctttagatccttttctggaaatcagaatatcttcatatcaggactaactttacatagctgtcatgataagttgatgcacctttagttcgcaaattctaagttactaatttgccaatgtgttttaggtccttgtgcggaatataccaccagatcctgatgaatcaatcagtgagcttgtggaacatttcttccttgtcaatcatcctgatcattatctacaacaccaggtacttctactaaactgcggat

SEQ ID NO: 198 - DNA, 542 bp, Zea mays
ggtcgacgagatcgtagacgcgctggcaaagatcataaagtctccaatctgtcctcaggcaaccaaggccggcatggtcgccacctatcacctggcgctatacgacgagcgtgtcgcggcgcgccttgccgctgccgggctcgtccccgtgctcgttgaggtccttgtagacgccgacaagagcatgtccgagaaggcactggccgtgctcgacgcggtgctcgcctcggaggaaggccgcgcgagcgcgcgggcgcacgcgctcgccgtgcccatgctcatcaagaagatgttccgcgtgtccgacctggctacccagcttgccgtgtcggcgatgtggcggctcggaaaggcgcacagcgacggcgaggatgacggtgcggtgacgcggtgtcttgtcgaggcgctgggggttggggcgttccagaagcttctcctgctcttgcaggtcggctgcagggacgcaaccaaggagaaggccaccgagctgctcaagttgctcaacaagtacaagagcgtaggcgaatgcgtcgacgctgtgg

SEQ ID NO: 199 - DNA, 790 bp, Zea mays
  misc_feature (758)..(759): n is a, c, g, or t
tgtacgcaagctaaattttctcagcttgtctgcgtgcttcagttccgttccggttagtttgatggccaatgctgcgtgcagcctcggcggaggccggcatgcgtgtcggcgtcgctgtcgtcggagcgcgaggcggagtactactcgcagaggccgcccacgccgctgctggacaccatcaactaccccgtccacatgaagaacctgtccgtgaaggagctgcggcagctggccgacgagctccggtccgacgtcatcttccacgtctccaagaccggcggccacctcgggtccagcctcggcgtggtggagctcaccgtcgcgctgcactacgtcttcaacgcgccgcaggaccgcatcctctgggacgtcggccaccaggtacgctgatgcggcatgggccgcgcgcgcggcatggctctgggtaacgtgcgctccatgtgagcgtgccgggcaggtcgcggacaggctagctaattaaccaccccggacccgggccttttgtttgtttgtttgattcgcgcgcatgcagtcgtacccgcacaagatcctgacggggcggcgcgacaagatgccgacgatgcggcagaccaacggcctggcgggcttcaccaagcgcgccgagagcgagtacgacagcttcggcacgggccacagctccaccaccatctccgcggcgctcgggatggcggtgggccgggacctcaagggcggcaagaacaacgtggtcgcggtgatcggcgacggcgccatgacgnncgggcaggcgtacgaggccatgaacaacgcc

SEQ ID NO: 200 - DNA, 770 bp, Zea mays
  misc_feature (721)..(721): n is a, c, g, or t
  misc_feature (736)..(750): n is a, c, g, or t
ttagattcagggccttttttgtttgtaatggtagttacttgtacattatagagcatgtcctcgttctgtatgcctgtctctcacacgaattggtcttgcagtggatcatacggtgctgacatcacagccgagaagctgaaggacttccacaggcgccggctgcaggttcttgcaagtgccggtcctgacctgattgcgtttgaggccattcctaaccaaatggaggcacaggtactttgtaaatcagagctccatgtgaatgaactgaaacatgatggtttaagaaacaaaggtttgaactgcagttgtgcatgcctggtgttgaaactgatccctttctcttataggcattggttgagcttctggaggaagagaaagtccagatcccttcctggatctgcttcagctccgtggacggtaagaacctgtgctctggggagagttttgcggactgccttaagatcctcaacgcgagcgagaaggtggccgttgtaggcgtgaactgcacacctcctcagttcatcgagggcatcatatgtgaatttaggaaggtctgtagtcacctctacgcagagcagttcctttatgccatttcttcagttgtctggagtctctggacacgatgacgtgttaggcatgcttctgtttgatccgttctcccttctgtctccatcagcaaaccaagaaggcgattgcagtttacccgaacagcggcgaagtntgggacgggagagcnnnnnnnnnnnnnnngagtagacaccacatttttg

SEQ ID NO: 201 - DNA, 820 bp, Zea mays
  misc_feature (764)..(790): n is a, c, g, or t
  misc_feature (802)..(815): n is a, c, g, or t
tatttacaactacttaacgacacagatcatgtcttcacgtactcatgccagatattcacttccgtttcgctgtaaatagtggggattatggtgaagctggtacgaaagagttcctgaaggactttcatcggcggaggcttcaggttcttgctgaagcaggcccggatttgattgcttttgaaacgatccccaacaaattggaagctcaggtctgctactttgtgacctggatcttttgccttgcatatctacccattcttatgaaatagtctctgatggctggctactttgtcgtttaggcatatgttgaactccttgaggaatgtaacattaatatcccttcatggctttccttcaactcaaaagatggagtgcatgttgtgagtggtgattcgttaattgaatgcgctactattgctgacaagtgtgcaaaggttggtgcagtcgggataaattgcacacctccaagatttattcatggactgatactctccattcgaaaggtacccctagtatccaccacattttgcatagtacttaccatattttttgcccctcaattgcaaatcaatgttcctgttatccctgcgaagtgcacatatcatgatttccgttcttgttttcccttggcatgaatcactgttgggggaggctgcagttctgttttatctaactagtaactttgttgttttaccacaggtcacagacaagcctattctgatatatcccaacagtggtgaaagatatgatggtgaaaaaaaggnnnnnnnnnnnnnnnnnnnnnnnnnnnctgggcttattnnnnnnnnnnnnnnatctt

SEQ ID NO: 202 - DNA, 600 bp, Zea mays
aggaagaaggcccccgtgtcgcgctcgtcccgcgccggcctccaggtaccctctcgcttctttttctttcgaatttcatctcgatctgtgcacgccatatgttactcagatgctaactttttaactggcgcttcttgtttgcagttcccggtgggtcgtatccaccgccagctcaagtcgcgtgcctctgcgcacggccgcgtcggcgccaccgccgccgtctattccgccgccatcctcgagtacctcaccgccgaggtcctcgagctggccggcaacgccagcaaggacctcaaggtcaagcgcatcaccccgcgccacctgcagctcgccatccgcggggacgaggagctcgacaccctcatcaagggcaccatcgccgggggcggcgtcatcccgcacatccacaagtcgctcatcaacaagaccgccaaggagtgaatcaaggccgtgctgctgcttctgcctgactacagtcccatctcgttctgtacttgtgcaatctgagtttaagtgcatgttggcacagttctagtaaactcatcctgttcacctatgcttctatcttgttaatttaagctctattccgcgagctttttg

SEQ ID NO: 203 - DNA, 874 bp, Zea mays
  misc_feature (768)..(787): n is a, c, g, or t
  misc_feature (792)..(815): n is a, c, g, or t
  misc_feature (833)..(868): n is a, c, g, or t
cgggccgtggcaaggctatcggcgctggcgccgcgaagaaggcaacgtcgaggagctccaaggccggactccagttccccgtcggcaggattgctaggttcctcaaggcgggcaagtacgcggagcgcgtcggcgccggcgcccccgtgtacctcgccgccgtcctcgagtacctcgcggctgaggtttgtgccccgcttcgttttctttcccctctccttgttgcgattcgcttcgggtccgcgtcgctgcggtctcggatctggttgttttgccgtggaggattgttcctggatctgaaatgagtcgcggcattgtacttcataaaaagtctcaatacatttcccgattccaattgcttcgattgcacatctatgcatcctgtaatttaccaactaatttgaacagacttggcactgaattattcgcattgtaatttctaggtgaaccggacaattttctggaataatatatctctgaatcctgcaattaagcagttggtagtaatgttaagcatgaaccattgtagaaaatcggagccaaatgcgtccttactcttactatttctagcattttctcccgtcatttctcaatggcaatatatccagtgttccaatggttacaacagtttctgactatgttcatttatccacggtgcaacaacaggttctcgaacttgccgggaacgccgcgagggacaacaagaagacccgcattgtgccgcgccacatccagcttgctgtgcgcaacgacgaggagctgaccaannnnnnnnnnnnnnnnnnnnatcgnnnnnnnnnnnnnnnnnnnnnnnnatccatcagcatctgctnnnnnnnnnnnnnnnnnnnnnnnnnnnnnnnnnnnncgacga

SEQ ID NO: 204 - DNA, 481 bp, Zea mays
cggatcgggcgctacctcaagaagggccggtacgcgcagcgcgtgggcactggcgcccccgtctacctcgccgccgttctggagtacctcgccgccgaggttctggagttggcagggaacgcggcgaaagacaacaagaagacgcgcatcatcccgcgccacgtgctcctggcgatccgcaacgacgaggagctcgggaagctgctggccggcgtcaccatcgcgcacggcggcgtcctccccaacatccactccgtgctcctgcccaagaaggcggcggagaaggcggccagcggcggcagcaaggagcccaagtcccccaagaagggcgccaagtcccccaagaaggcttagaaagtagggtcttcatttgcgctgtgtgctgtagcatgttcgtgtctagatctgtggatgggatgtgtcatgctctagtatcgtccttgtgtcttattgtatgttcgtcttcatcgagaagatcttc

SEQ ID NO: 205 - DNA, 621 bp, Zea mays
  misc_feature (568)..(570): n is a, c, g, or t
aagccggtctctcgctccgtgaaggccggcctccagttccccgtaggccgtatcggccgctacctcaagcagggtcgctactcccagcgtgtcggcaccggcgcccccgtctacctcgctgccgtcctcgagtacctcgccgccgaggtcagtcggaccgcacctattccccacccgtcgcggaagacgcggaaggcctgatttgtctcgcgttgcctcgtgtctccttcctatttttagctcctcgagttggcggggaacgcagcgcgggacaacaagaagaaccggatcatcccgcgacacgtactgctggcgatccgcaacgatgaggagctcgggaagctactggccggcgtcaccatcgcacacgggggggttctgcccaacatcaaccctgtgctgctccccaagaaaaccgctgtcgctgctgccaaggaaggcaaagagaagaagtcacccaagaaggccgccgccgccaagtcgcccaaaaaggtggccgcctcgtaggtccctggcaatgctgatgcactgtctctctctgtcctctctgaactgaaacgctcctaannntcgttgtcggtcatggtcgttgttgtttgatgcgcttttattgtggttgtt

SEQ ID NO: 206 - DNA, 723 bp, Zea mays
  misc_feature (702)..(719): n is a, c, g, or t
attggggctttgaagaaggcaggcaatggggccgtggacgaagtggtggacaagtagtgccttgatcttattctaacaaatatacacaggtttctacatgctttgtgcttatatattgtttgtttatttcataggtgagagatgagtaccgtacagattatgatcctgatatccttcgatgctattctattacagtttactccattccgatttggtgttatagaatatagaaagccatatgatgtttccataaatgccccacacctcctggtatcaacttaaattcagctataaaattacatgtttctctgtgcctgttgccttttactggtgcaattttgattatggtgtacctttgcatgtttcctttgttcaacaactgttctcaggagttaccaagtttccttaatgaatcaaacgtagaggtggttacggtaagatggttcagagggaactagaagcacaaagagaactagttgactatggtggatctttccaaccaaatgcaccacctccctgtaagttggatgttatttggattatgttcttttgagaataattttccatgaatttacatttgttttgtgacgcctatggttttggtctttgattgagttcttaggggcttgtatagtaacaactttggttgattcaacatgtaatgtttgctggaatatctgaaacaattttaccttttcccannnnnnnnnnnnnnnnnntcct

SEQ ID NO: 207 - DNA, 828 bp, Zea mays
  misc_feature (811)..(817): n is a, c, g, or t
ggaatctgcatgggattcttgttgggtaatacttgagaaatactcgctactctcactgcttatgtgaaatatcacttctgctcttaatcttctttataaactgttttacaggagggaggtgttccccaaaggaatattgtatgcttctcgtgagtcccattattcagtattcaaagcagcaagaatgtacagaatggattgtgtcaaagttgacacccttatgtctggggaaatagattgtgctgatttccagagaaagttattgcagaaccgagacaaacctgccatcattaatgttaacattggtgagtattaactccaatccaagactaatgcttggccttcgcatatattctgcttctaaacagcattgctgtgcaggaacaactgtgaagggggcagttgatgatctagacttggttatcaaaacccttgaggaaaacggctttaaagatcggttttatattcattgtgatggtgccctttttggattgatgataccatttgttaagaaggtgctatttttgattttccatgctgtatatactaattacatcaggctgtactactagttcctcatccactttgaattgatggctcattctcctgcttatatgtatatgcatcttcactaggcacctcaagtgacatttaaaaagcctattgggagtgtcagcgtctctgggcacaagtttgttggatgccccatgccatgtggtgtccagataacaagattggagtacataaatgccctgtctagcaacgtggagtatctggcgtcaagggatgcaacaatcatgggaagcaggannnnnnntgcccctatct

SEQ ID NO: 208 - DNA, 593 bp, Zea mays
  misc_feature (428)..(452): n is a, c, g, or t
  misc_feature (478)..(492): n is a, c, g, or t
  misc_feature (501)..(520): n is a, c, g, or t
  misc_feature (525)..(540): n is a, c, g, or t
  misc_feature (548)..(570): n is a, c, g, or t
  misc_feature (575)..(581): n is a, c, g, or t
atatctactataactatcagagaactattgttgcagcaatatgagcattgatatgttgtccattttataccaggcaaattggggagatgaatatgtccggttaaaatccaaacttgatgcacttcagaagagtcaaaggtaccccagacttgctcaagaggacccttattctggttatgataatgtttactgacactgacttactgtatctgtctatcctaacggaaggcagctgttaggagaacaattgagttcactgaccataaaagaactccagcaactggagcaacaactggacagttctttgaagcatattaggtcaagaaaggtgaataaattgggtttaaatttgttgttcggtgcacagctagtttggttatttactaacgtcttagtcaattattatattatagctctatttttttttnnnnnnnnnnnnnnnnnnnnnnnnntcaatttccgcgcttcaaaaaaaggnnnnnnnnnnnnnnnattcccttnnnnnnnnnnnnnnnnnnnngttannnnnnnnnnnnnnnnaaattatnnnnnnnnnnnnnnnnnnnnnnnttggnnnnnnnaagcaaacgtta

SEQ ID NO: 209 - DNA, 504 bp, Zea mays
agcttcccgaggcttcccgatgcacagagtgttttgatggagagagaattgaggagcactccactaccacctcaccagacaactgttgctcctatccgtggtctgtttcactccaatactggatctgttggtcctttgtgctcacctccgtctgtaaggttctcttcgcattcaaatcctgagcaataccccaaccacaattcatacaattctcaagtaccaagcactgcaagttcctcaacgctgaattatgggtcacaatatggaggctttgaaccatccataaccgatttcccaagagacattgaaccaacttggtgccccgatccagttgagagcattcttggatactctggtgatgtccctgctgggaataatttgactgggaccacttctattggagcttcagatgatcttactaagcaaactgaatggtggacagagtttatgaatgaggattggaaggacatggttgataacccgacttccacagaaactcaaccg

SEQ ID NO: 210 - DNA, 759 bp, Zea mays
  misc_feature (238)..(238): n is a, c, g, or t
aagctgcatccatgaaaaagactctctttgatcaggcatgtattatactcgttgtggatatttctaatcaatactttatctttatgcttgcacaaggacctttttcatatgtataagcatgcctgcttgtggtcccatccatggcagacactgctacatgctgtcttatggttttcaatgtttttctttgatatgtcgaatgctgactcagttttatttcgtcgacaggggtacctanatgagcaattttgccaggtggaagacttgcaggatgaagctagtcctaatttcgcggaagaggttgtcactttgtttttcaaggactcggccaggctaatatcaaatgctgaacaggctctgtaagtaaaacatgcagagcaagggagaagtgatttcttgttcagaaaataaagaaaatatgatgcaagcagaagtgttggacttgactgattaaaattttgtgacactgctgcagggaaaaataccccaaagatttcaatagatgggatgcatacatgcagcagctaaaaggcagctgttccaggtatcttggtgctgcatctggatattttttttagttgcatacgatccattctgtgtgactgattcattacagcacacagaccttactttatagttctgtgaacaatgaggactactgagtttaactactgaacatcctgcaaagctgacactatcatttttgaaacaactactgcatgcttcaccttcttaaaaaaagtggggaaaaaaactgaa

SEQ ID NO: 211 - DNA, 780 bp, Zea mays
  misc_feature (724)..(724): n is a, c, g, or t
gagtacggacaagaagaaatttttagctcttcttggcttcgaggttgcgcgaacatattctcgtatccctttatactgctatatatcttacccgttgcgacggcgcaacgccgtggacacaatttcacaaaatcttctatcttccaggtccttgtggttgctttctcctccgttctctggtttatgttcaaagatggctatgttgataccagcggatccagctttgaatcttggacgttcgggatgctttgggataccacagtttcgtttccttggataccagcattgtacactggggttctttctacggtgttatgcatgtgggcagaggtcagtttacttctctgagtgttcttgtagtgctcctctcgttgaaggctcgcttgttctaagcttgtggactgcttgcatgtcctccctgcagatggtggcgatgggcgatgtttcagcaaccgaaactgcagttgtttacgggttggagccagtttggggagctgcttttgcttggttcctccttggtgaaagatgggatgacgctgcatggaccggagctgctctcgtattatgtaaagcttgtgttccctttccttagttctttgccttctttgtgaacgacggagtgcccgaattaagtattccttggagctaacaggatacacttgcttttcatcaggtggcagtttgacagttcagctatttgggtcagctcctgagaagtccaagnaagtcaaaaaacgcagcagcaatgctttagaaactccggtgaaacgacgagactac

SEQ ID NO: 212 - DNA, 869 bp, Zea mays
  misc_feature (743)..(743): n is a, c, g, or t
  misc_feature (757)..(758): n is a, c, g, or t
  misc_feature (804)..(813): n is a, c, g, or t
  misc_feature (819)..(819): n is a, c, g, or t
  misc_feature (835)..(860): n is a, c, g, or t
atcatgtactcctttccagggaatgaatatttatgttttcttctcacttagaattgaacataaaatagtcctcgtcgtcaaagtaccagtccactgtttcagaattgttgttcattaaggaaatcaggagtgtaggtattgtcatttgttataatataggttaaagtgtttaaacagatcatttaatagggtgaagcatggttggttctgttaactattatttggaccgtctcattgtgtgcatgacaccatgagctagttggacaactattgagggagtttttttttcaattccaccgcaattattgttaaaagtcttgtctttctggagtctactattgatgtattattaaggcatggatgagcttatcccggattattcttttgaaaggttttgacagaatatgtccttgtttctgtgactagcgctgtcacagtgactgtagcaggaattgtgaaggaagctgtcactattctggtataactaaactttgattttgctttccatgttagtttatacaaagttcatctatgctagttcattcatgtgattgtgaccctgcaataaaaaataaaacaggttgctgtgctattctttaatgatccatttacatggttaaaggcgcttgggctggcaataataatatttggtgtcagtctattcaatatttacaagtgagttgaaacatttacatttcatttttcatgttattattggtacagaaacacaattggtaattcancacacaggtttcanntttgaatctttaaaatagcaagcatatgattatttctaatgcatgnnnnnnnnnnactaanacttgtttgtgctgcnnnnnnnnnnnnnnnnnnnnnnnnnnaagggcatc

SEQ ID NO: 213 - DNA, 666 bp, Zea mays
cttgctcttgccctgtgagcagcggcgtgcgatcgatcgaggcagtcgtcgtagtaacaagccaacaaattaacaaccggccggaacgccatgctggaggagtacaaaccgtgtgcggccatggtggtgacgcagtgcatctacgccgctctagcgctcttgtccaaggcggcgttcaccggcggcatgagccccctggtgttcgtcgtctacaggcaggccgtcgccaccattgtactcgtccccgtcgtcatcgcggccaacaggtgcgcgcgcgcgcgtcgtacgtcgttcgtccgtccctatagctagctctagctgctgctaccttgacaacttcttcttcgatcggcgcgccacacagctgtgtgcctgtgtctcgtcaccctctggttcttagtcgttgtccgtcgaccgtcgtcatatgcatggctctccgtgatgatctatctgcgtgcaggaagaagatgaaggagatgacgacgggccttggactgacgggcttctcgctggtcttcgtcgcctcccttgtcgggtatgcaagcgccacggaagatcggtcgcagcaaccgattcagcagattcttgttatcttgtatgtgagttctgacatgaagttttacgctatgcatgctccacgcatgcgatcgacagggcaacggtgaa

SEQ ID NO: 214 - DNA, 827 bp, Zea mays
attgcttttgtgcttgagaggtaaatcgatacgactcttgcttgtttacaactactactacatagctgatgctgctcacaccatgacagaatgaattcaggcttcttcttttttttcaggaaaactgcccctccactgtcattcagagtctctctgaaattgtttttccatgcactatacgggtaggtgaaagtagtggttttgtctcttcatgcatgtttaaccacacaggtttcgtaatcttaagttttggaagctcctgtcagacacctatgctttgacttacatatgacttcgttcgagtgcataccttgtgcgaagctatcaagttcccagtgaattgttatacttaatattttctataaatctaatcaaatctgagaaactttgaccggtcatattatatcgatgattattttagaacggagggagtatatgatatgcgcagaatttatcaaaaaagtttgctatttgagcccagcagtgaattgttctgttagtaaatggtagtactgtgtagcgagtttttttcgttcagtttgtgtcctttgttacgcttgcatagtcactaataattgtgattttttttgtatgaaaggatttaattgattcacaattactacatgatcgagctggtacaataaaagtgaattcacttcctgcatctacctaaacacaaagctgaatatctgtttttttcttcttattattttaggatctctggagcaataaacatatacggcctcggtctcagctattcttcagcaacatcatcgtctgcgatatttaacctcctgccagctgtggctttctttctggctgttctt

SEQ ID NO: 215 - DNA, 912 bp, Zea mays
  misc_feature (780)..(810): n is a, c, g, or t
  misc_feature (837)..(851): n is a, c, g, or t
  misc_feature (873)..(878): n is a, c, g, or t
  misc_feature (907)..(907): n is a, c, g, or t
gtggggttctccgggatgtacatcgtctccgtcgcctccctcaagcgcggcatgaaccacttcgtcctcgtcgtctaccgcaacctcgtcgccaccgtcgtcatggcccccttcgccctcctcttcgagaggtacgtacgtcctactacctgtatgtcgccggctcgccgcagatcagcgatcaacctagctgatgacagggcctagctaattaacacttgaacactggctgatttaactgccgcacctgagaagcatcctgctgctgcacgtatagaacagaaaatcatgcatgcatatgttgcatcgctgttggttctttttctcgtaatgaagtcatcgttgctagtagatatggtgaccaggcttatcatcaatttcattgcaggcgagtgaggcccaagatgacgccgctcatcttcctcaagatcatggggctcgccgtgctcgagtatgcatgtattcatttttattttatttttgcttcttgcaacaaagctgcagtgaacagtacaaaagaaaatctgctgttccactaacgacgtgcatataatccgtttgatcaggcctgtgctcgaccagaacatgtactacctcggcgcgaagctgacctccgcgaccttcgcctcggcgctggtcaacattctccccgccatcacgttcctgctggctctcgccctgaggatggagaggctgaggctccggagcctccgcagccaggccaaggtggtcggcacggtctgcaccgtcgccggcgccgtcctgatgatcctctaccannnnnnnnnnnnnnnnnnnnnnnnnnnnnnngcgggtcgtcaccaccacgccgcgacnnnnnnnnnnnnnnngagccagagcagcgcctcctgnnnnnncggcatctgcatgatcatcggcagctgcntgtgc

SEQ ID NO: 216 - DNA, 562 bp, Zea mays
gtcggcaaggccgaggtggaaaatttctggaggaggtgctcatcgtcggcgggctcctgctggtgcagtgcgtgctctccggctacgtggtcttcaccgaccacctgctcgccctcggcgccgacccgctggccgtcgtcgtcgtcgccggagccgcctacgccgccttctgctttcccttcgccgtcgccctcgagaggtacgtgcggtctcggtttcctccgcagcatgaatggatggattatattatgcgtgaatacgatacgtacgattacaattacatcatgctacgtacgtacaggaagcgatggccttccacggtttcggggactctggtggcgcaatacctgctcattgctcttggagggtacggtagccccatcatcggattcatccatccatcacatctgcttctgctgctgctgctgattctgtaattcaattcatacatcactcatcaggacaaccgcgttccaagcgctgatgctgctggggatcaagaagaccacgccggccatcgcatccgccatgcccaacctcagccccggcctcatcttcatcg

SEQ ID NO: 217 - DNA, 732 bp, Zea mays
  misc_feature (665)..(668): n is a, c, g, or t
  misc_feature (712)..(714): n is a, c, g, or t
  misc_feature (727)..(727): n is a, c, g, or t
ttatactgggcccctttgtggactactatctaaatgggcggtcattgttgaactaccctttttcaggaggggcaactgtaagttatcctagtcacaattcttagttcttgagagcattgctatctttatgaccgctagttgtcctgagttatctatcttctactttaaattcactggcagtgctctcatctcttcaacttatatgcttaactatattatttttgccattctaggttatgtttggatccagcccaggatcagcacgcacacggtcttcatgtggcccaggacctggaacgaggtcgctgagaaccgcccgatgcagaggtattggctcatgttgcagaacacggccagggagcaggaaagcagtatgaagaactgcagaatggataaaaggtaagcggttagatcatactcactgcgtcccaaaacataattcgttttagactaaatatgcatctacgttcattatcattcgaatggatgcggactgaaaaatttggaacggagggagtaactggtagtccgcccacctctccagtatccagttagtacgaagaatgcaaaatgagtagggcatatagcagcatgagcaacttcattcgtagctgcaatcaactgctaatgacattttggtaacatttggcaatcataaatttaannnncaaaaccaagaagaaaatccatatattcaaatcaaccaatatgnnnattctcattaagnatatt

SEQ ID NO: 218 - DNA, 631 bp, Zea mays
  misc_feature (168)..(168): n is a, c, g, or t
  misc_feature (170)..(170): n is a, c, g, or t
  misc_feature (294)..(294): n is a, c, g, or t
tgtcgtcgtctgaatgattcaccactattcctttttttttgtgccccagcgccgctctctcccagtacaccttcttctacgggctgcagtacaccaccgcgacgttcgccataactttcaccaacgtggctcctgtgctcactttcctcattgcagtcttgctaaggngnggggtggtgccttctttccggtctccctccgatcccgatcccggcagctaatgagactgtctgaaaccggccctctctgcttcccttcccttcgtcggccagggtggagtcactgagcatgaanaacaaggcaggagcagcgaagatcgccgggacgctgacgtcgttcgccggcgtcatgctcctcaccctctacaagggcgtctcactgacgcaccaccaagctggagaagcgagcccggaggatcacagcctcggagcagcagcagcatcgccgtctgacaggaagagctggacgctgggcaccctggcattgctcgccaactgcctgtgcttctccttctggctcctgctgcagtccaggctgaccaagaagtacccggcgctctactccagcacggcctacatgttcctcatcagctcgatgcagggaggggccctcacggcggccattcagaggc

SEQ ID NO: 219 - DNA, 794 bp, Zea mays
  misc_feature (756)..(759): n is a, c, g, or t
ctgtgctagctctcctctgaccagtaccacgaagtagctcctagaacactggagcttgcttttgaatcaagtatcttaattatgttttgttgtctggtcactcaaaagtcaaaactgttgcaggccgccacgctgaagaggtacgacgcgccgctgtcgctgaccaccctcatctgcttcgtgggcaccctgcaggccatcgtcgtcaccttcgtcatggagcgcgagccctccgtgtggaggatcggcttcgacatgaacctcctagccgccgcctacgctgtcagtataccaaaccaaaccgcatctgctgctctccgaccggcaaagaagcacatcatgcgtgatgcgtgtcctcctgagtcatgacgctgaccacgcatgtatctgtgtgtgtgtggtgcagggcatagtgacgtccagcattgcctactacgtgcaagggctggtgatccagagccggggccctgtcttcgcctccgccttcagccccctcatgatgatcatcgtcgccatcatgggctccttcatcctcgcagagaacatctacctcggcgggtaagtgctctgactggccgccatgcatgtgtgtcgtgcaaaagtactaccataccagacagcacaagcagtaacctgtcccccatggcatgccatttcttgttcccaggatcatcgggtccgtgctgattgtcgccggcctctactcggtgctgtggggtaagcacaaagagaacgaggagaaggagggagaggcgnnnntggagatccccgtggcgatcaaggccgtcgacggc

SEQ ID NO: 220 - DNA, 829 bp, Zea mays
atgtaccaatcgtcctgcgtcgacggcagaagctgcaagtaagagtagctgcatcagctaacccaggaaactgttgcgattcatagctcactgtcttgagttgtcttgcagatagcttggtactggtacctagctctggccttctttgatgtacaggggaactatcttggtgagtagtacagacacgcactacacagtcacaagtcaatgaagttttgttaggtctctcttgctgctactgagtagtacagacacgcactatacagtcacaagtcaatgaagttttgttaggtctctcttgctgctgctgctgatcgacatctaatgtcccagttgtgaaggcgtaccagtactcatacattaccagtgtgactttgttggattgctggactgttgtatgggtcgtcatgctcacctggtacgcactgggcacaagatactcactctggcagttcgtgggggcagggacctgtgtggcagggctcgcccttgtgctgctttcagatgcaaaatctcaagatgagcaaggtaagctactccaggcatcctacagttcaattagaaagtcaacaacattcaacattttgagaactcggaaatcatagtgctagtaggactgtccataccatctcccttaaaagaaacggtagcagaacaatcaagaataccgatactagcggtgcataagattgcaatgcaatagctgtagatgtaaacaaggctttatgaacgatatggtcgaaatatacctttttagtttctgtagttacagaattgtttacttcacatgtaaatctttttttttctgcagatccgaaaaaaataccac

SEQ ID NO: 221 - DNA, 717 bp, Zea mays
  misc_feature (711)..(712): n is a, c, g, or t
tgtacatgttgataggatgaaggtgtacatatcttattaattgtgattcatagtttctgggtttttttggggggtttgtaggacattgctcttgcagatctggctccaacccaccccatcaggcttggcctcgctctcaacttctcagtgttctactacgagatcctgaactcccctgatcgcgcctgcaaccttgcaaaacaggtttgcttctcttctccttttatccctcctttgtgacttgctttcattttgagaccctttgtgatttgttttaattttgagacatgatgtctcctagattgtgtgtagcttctgggcaacggattgagtgtgcataaacagctcctgtctccatcagcttatgtaggggtttggttgattcaattaaaaaaaagatggtgcaaaggaaatagttcacttgcctccgtctgcatgcctattcactgaaacaatttttttcttacattaggcactgtgtaagtgatggatctaattactctgggtgctaacaaaatgcttcttttgctaccacccacggaggctgttgtttattttcactcaatctgtcacgtcttcttgcatacatgttctactacatattgaacattgacaagctacaacctaatgattacaagtcacctagagaattctcaatttcccttgtatgatggttgcactgtctaacttgtctgcaatccatgaagttgnncatga

SEQ ID NO: 222 - DNA, 811 bp, Zea mays
  misc_feature (753)..(755): n is a, c, g, or t
  misc_feature (775)..(779): n is a, c, g, or t
  misc_feature (788)..(808): n is a, c, g, or t
gatctattccccatcttgtcctccctttgctaaaaataacgaggcagaggcatcttcgttttgacgtgcgcttcctcttcctcgctcgctctcggtcgcaggtacctacgtcctgttcttcatcgcttatggatttctttacgcgtagtaggtagtagatctctctttgctcgatctgttttcgttttgtaagattcattcacgtctgcgctgtggctctattcagatttggtcgtgatttctgggtttgaccagcttaagcatcggccccgatctggattctggagcttgactatatctccttttattttttttttattttgtactatctaacatagattttgcttctaacaatcattaagttacacgcacgcatgattatatttgaagtttaaccttgccgtgttgtggttaagtgcacttctgagcacattatgtactgaattctgcaaattagtaaaggattataaactgtagagtcaacttccgttagggtacgctaataacatgcccgagaacgtgtatttccttaagaggaatttcttctgcttataaaatactctttgtgcctttgtttctcggaggtgctgcttttctaaaataaatatcacagctttagtgatcagcgattattgactaggttacctgtaaccaccacagaatctgcagtgatctctcttggtagctctagctctggcttcctgcaaccctacttacttataaggtgcatatatttgtttatctgttctagtnnnggctgatgtcgatgagtacnnnnncttcattgnnnnnnnnnnnnnnnnnnnnnctg

SEQ ID NO: 223 - DNA, 691 bp, Zea mays
  misc_feature (624)..(624): n is a, c, g, or t
  misc_feature (626)..(626): n is a, c, g, or t
  misc_feature (673)..(677): n is a, c, g, or t
  misc_feature (681)..(687): n is a, c, g, or t
tgctgcacggctcatgtctaccaagctatttattggtggtgagtttttgttgtcttgtttccttcaatataccagcaacctttcgtttaatgcttattagcgttctttggttaggtcttgactggggtgttgatgacgtgaaactaagagaagcatttagcagctttggagaggttactgaaggtttgtatacaaatttgaatgctattatgttgtgtgttaatggctcactgaatcatattaatccattttcctctgctgttgtcttgtggttcacgttccgttttaaaatggcaaatattcatgttgcagcgagggtgatcacagacagggagactgggaggtcaagaggctttggctttgtgaactactccgacagtgatgctgccaaggaagctatttctgcaatggatggcaaggtgggttgaacattttccttatatgtttcaagcagtaccatgtgaaagagttcgttttgatttgtgctagttttccataaagttttatttgacaaatcctgtactctttggtgatgtcagtgtattcacattcatgttacttgcaggaaattgatgggcggcaggtacgtgtcaacatggctaatgagagacctgctgggaaccntngtggtggtggctatggcggcggcggctatggaggtggtggctacggnnnnngcgnnnnnnncgga

SEQ ID NO: 224 - DNA, 719 bp, Zea mays
  misc_feature (83)..(85): n is a, c, g, or t
  misc_feature (655)..(655): n is a, c, g, or t
  misc_feature (672)..(686): n is a, c, g, or t
  misc_feature (707)..(707): n is a, c, g, or t
cgctcttacttttatcagtcctaaattcttctgtttttttcctgtagagtatgctgccaagcgtcctatttgcaagagataannngcttaagcccgggggtcttattcttccttctcatgctacggtataattagcacacaaaaacgtcatacctcacctatttgcttgttcaagtcatttactattttttagtttacataggcagaagtaatatctctgataactcaaaatactacctgttttaaattgaagggtctatcatgtgagccgttaatggttttccagatcaaaatcttgatttaccattttattgaatgagacaccaatggtttatcattgtccaaagctgaatagtgaatacttatccatgattcttttccatagctcttcatggcccccgtaacaaatcgtgagagatatgaagacagcgttgatttctggcgtgacgtctatggcataaacagtaagatactgccctatgtattttagagtttcagtatgcattgtgggtgctgtcatatagtcaaatcctgtatggtggcttctgcatgctatagtttgatcagaaacctaccttttctggtgcagtgtctgctcttgtgccacttgccaaaaagtttacatctgaggaaccctccattgaaacaattggtngagagaatgttataagnnnnnnnnnnnnnnngagtctcggcgaagcttctgngtatcacaaaag

SEQ ID NO: 225 - DNA, 930 bp, Zea mays
caggttggtttcctggaatctgttaccagctatagcctgtagttactaaattttcgatcttctcttctcccgcgacctctaaacattgactgctaacaaaagaaattttgcgaatggagggaaaagaactatatattttcccttttgaatttatataggcagagggcaaagcttctcttaaaaaaataaaagagaaggggaaaaaaggaactttaaaaaaacatgttgatttcaccagaactgctctacaaatgaatgcttttatttgaggcgttaacttttgcaaaacaagctactctttcagctggttttgccgttattgaaatgcacactgctcatggaacagttaactggtctagaaaacttgatcagaacattgttatttttttccttctcaaggtattcttgctgactccacctctgagtgtgactaaaggagacaacgttaacgtttccttctcgatggttcgctcgaaggaaaaccatcggcttatggatatggagttcacatatgaattgcacgagttatctggcaggaagcacccagcagtcaaaaccaagatgtacttagagtagaacaaggtaaagactataatatgcttacaaatttcgcacattcaaatttttagtagtagtatcatacagaaattggagatatgccacagtatttactattgcctgagaaattacctcaggttcgccagcataatgatctgtgacacagatgctcacacatgaagcatgctgcattgctttagttgataacatggttcaatcttacccttgttcatcatcaatcagatggaaagacggaacctcacgacgccgttgctgaaacctttgctcagaagctgagcatgtagtgtgcttgttacacccatgatgggtacattgagaccatttatgttgtattagtaatatattgttgat

SEQ ID NO: 226 - DNA, 551 bp, Zea mays
tctgacggttggctggttgtgctttaagtgttcaaggggtggattaggaccgggaaactctgtactgaagggaaggtcaaaagtgtcaagagagcttgttccaagatggatgaaggtcagggagttaggtattggtgccacatgtgtcaggaggtgatagatcccatgccccagatgaagtgcccaggctgcgagggcgggtttgtggaggagatggactctgaagactttgagccagctgcgaacgcgaggtctgatcgctccgtctctctcttggctccactgctgcttggtatgatggggggttcgtcgcgcagatcaagactcaggagggaggccatggttgaagctgatgccgaccaggatgacgaagaggatgattcagatcatgagcttgaactttccaggaggaggcggaggaggaggcgctcatcagcgcttttcagtgtgcttgaggctatgcgtgaccgtgatgaagtaaggggctcggatgacaccgacagtgatacagagagagacctggagagagggagaagggagaggatggagag

SEQ ID NO: 227 - DNA, 550 bp, Zea mays
acaaattcgaggttggagcagaggcacgggagatgccatgcaagcacctgtaccatactgactgcatcatcccctggctggttcagcacaattcttgccctgtttgccgccatccactgccatcacagagatcaggcagtaccagtagcgcccggccttcagcttactacaacgaagccgctgatcctcctggggtcaccagagcagatcttgaacctgctccaagagacggtggcagggaaagccaggaaaggcgccgctccttctcgtttctgtggccgtttggcccgtcgagttccagatccagttcttaccagtacgaacagaatgttgatgagcctgcagtatacgatccaaaccagatagcatattctgagtggcactatgaccactgactgaaaccctgcagcaagtgcaagctatctgcaattcgtgccttcaaccctcagctttggagaggcattcatcagctgtaatggctgcttgccgtataaaaaaaggatggttcttgcctttatattgtgttcagtgcatagccttgctccgtatg

SEQ ID NO: 228 - DNA, 535 bp, Zea mays
tgccttcaccaagccctcgctttgcaacgctcagtgcttgatgctgatgaggcccgagatgaccaaggtggatctagcaatgatgatggcttgatggaagaatatgtcctgggggctgggctaaccctgctgcttcaatatttgactgagaatgatccaagccagtatggcacccctcctgcaaacaaagaggcggttgacgctctgcccactgtccaaatagcagaggctgtcagctgttcagtctgccttgatgatcttgagctagggtcccaggcaaagcaaatgccttgtgagcataagttccactctccttgtatactgccatggcttgaactccatagctcctgccctgtgtgccggtttgagctgccatctgaagagacagaagatttggatgagcctagcaatgtggacagaacagagaacacccatgaggaagtcagggccgatggccctgaagatgacagtgagagcagtaacagagcgtgggcccttgttccttggttcagtgggctattctcaacacctgaac

SEQ ID NO: 229 - DNA, 234 bp, Zea mays
  misc_feature (219)..(227): n is a, c, g, or t
gtcggcgcagtcctccggtagcggcggcagcagttcgcatcattgggagaactaagcaatattgccatggttgctgccgcttgaaagcttggcccgttggttggtcccaatgtacataggaaggagcaggagcatgccgggttggtgccatgtaaaaatctggagccttttttcagtttggctcatgttaatggtctctgatatgtatcatggctgaannnnnnnnngctcgtg

SEQ ID NO: 230 - DNA, 812 bp, Zea mays
  misc_feature (710)..(712): n is a, c, g, or t
  misc_feature (717)..(720): n is a, c, g, or t
  misc_feature (750)..(757): n is a, c, g, or t
  misc_feature (775)..(791): n is a, c, g, or t
gtgctcagtggtcagtgcgaggtgtccacgagtcaattaaagttggtttcttattcgtacaaagcatgcaactcttgaacagtttaataactacatatttgtcggatgatcctttcttctctcttagctttggcttgtcttgggagtcttcctaatggccacgagcctcagaatgtatgccacgtgccagcagcttgctcatgctgcagctgccaacagttttctcggccacactgagctgcgtgtgcatgtaccgccgtccattacccttgctacgagaggccggttacagagccttagacttcaactggctcttcttgatcgtgaatttgacgatttaggtgtgccaatacattccattcgactcatttgatggtttatagtgtttcctgaaaacttagtgccatggaaattttttgtttcagattatgacactctgagagcattggatgctgacaatagcccacatgctccatctatgagtgaagaagaaataaattctcttcctgtcttcaaatataaagttcaggcacaacagaggcatccccctgcccgaaaaaggtaaagccgaattgtcctttgggttgatttgttcatatcaccatatcgagttggttccagtatttcccatcaacacatgaccaacatttaattctgaaatggagacatgaagtaattttttctaatgtttgttttccaatagtgatggnnnatctnnnntatcagtttcttcaactgggtccggcaatnnnnnnnntgataaatactgacttgnnnnnnnnnnnnnnnnnttgaaaagtatcttattatca

SEQ ID NO: 231 - DNA, 363 bp, Zea mays
  misc_feature (331)..(334): n is a, c, g, or t
  misc_feature (345)..(349): n is a, c, g, or t
  misc_feature (357)..(360): n is a, c, g, or t
tgttccacgtgccgtgcatcgacggctggctcatcaagcacggctcctgcccgctctgcaggaggaagctgtaggcggatcgaccggacgacgccatgaacgatgttcttctctgcgatcgagccgatgatgtgtgtgtgtgtgtgcccccgccgccaccaccgatagctgctgctagggtcggaggagggaggaggaagaagagactgacatctatagaacccttaatttatagagagggcttttgctttgctacttgtacgtgctctactacgtacctattgcatctttttttctttttttgatccaccatgatcgacctccctcctcnnnnccatccatgcnnnnnatataccnnnnacc

SEQ ID NO: 232 - DNA, 366 bp, Zea mays
  misc_feature (99)..(99): n is a, c, g, or t
  misc_feature (145)..(146): n is a, c, g, or t
  misc_feature (180)..(180): n is a, c, g, or t
  misc_feature (191)..(191): n is a, c, g, or t
  misc_feature (290)..(290): n is a, c, g, or t
  misc_feature (295)..(295): n is a, c, g, or t
  misc_feature (299)..(299): n is a, c, g, or t
  misc_feature (301)..(302): n is a, c, g, or t
  misc_feature (334)..(337): n is a, c, g, or t
  misc_feature (348)..(352): n is a, c, g, or t
  misc_feature (360)..(363): n is a, c, g, or t
tgttccacgtgccgtgcatcgacggctggctcatcaagcacggctcctgcccgctctgcaggaggaagctgtaggcggatcgaccggacgacgccatgnacgatgttcttctctgcgatcgagccgatgatgtgtgtgtgtgtgnncccccgccgccaccaccgatagctgctgctaggntcggaggaggnaggaggaagaagagactgacatctatagaacccttaatttatagagagggcttttgctttgctgctacttgtacgtgctctactacgtacctattgcanctttntttntnnttttgatccaccatgatcgacctccctcctcnnnnccatccatgcnnnnnatataccnnnnacc

SEQ ID NO: 233 - DNA, 390 bp, Zea mays
  misc_feature (39)..(39): n is a, c, g, or t
cagcgcacgtctcgcgctctgcctatggatctcccagtngttacgtaagctcgtcacacatgtcccgtggatctccgagttgctactaccttggatcttcttcagggcagcagcatccttacctgaggcactgcaccttgtcaggcacgagcctgttcaccatggtgccccaatcaccgcaacagaaccagctgcagcacggtggagactcggaaaaagatctgtcagctgctgcatcaactcggccattccgtcagctctactacctgcagcattgtccagattctggcacgtcgtctcagtcgcttccagggtgctgattcttcattctcgctgcaaaattcaccattttaacattgatggtggctccagtaaagctcccggccgtga

SEQ ID NO: 234 - DNA, 828 bp, Zea mays
  misc_feature (722)..(725): n is a, c, g, or t
  misc_feature (738)..(738): n is a, c, g, or t
  misc_feature (800)..(805): n is a, c, g, or t
  misc_feature (809)..(821): n is a, c, g, or t
tactctgatttagttcccccgtctgtagtagacccgagacgtttgctgccagaaccatctaattggagttctgatgtccgaggcactgcaatatcaggaagtattcctcctgtatcaagagctaataacagtgcaactgttaatccgccagcaggattcagtcaccaaaacctcacccggcgccatcctcgaaatttatcagaggtatttttttcctccatttttcgcatttggttttctctatttttggattttggttttcagtttgattgctcatcttcccaccaaaatatcaagtgacgccatacttaaaatttggtttgatcatcttctcgatttgatcttttattttcttataggagattggtcggctatctggagcacttcgcggccatcaacccccacgcttaaggccggggtttctgctggagcgccagggcgatggtgtttggggtgttcctttatcaacaaggggtagagaaggaagaaggttaatggaggtaagacgatcggttctgttcaaaaaatggtttttagcatccacttggaaacataaaagtccatcattattagttgttttttgtgtggcagcaaagattacactaaatcatcctctaatttatgaatttctgcttgcaaaggtcccccttgttttctgctatcctctttgtgtttgcctatctaagcaaattaccctattctattcccacaccaaattggtnnnnctgctctactcgnaatgctttatttcattttgtttgtgcacttcatattttctaatttgatctagcatgcttctnnnnnncccnnnnnnnnnnnnnatactga

SEQ ID NO: 235 - DNA, 577 bp, Zea mays
tgctaatattcaaggtaaggagttcatggacaaatgccagtttttttttaatcatgagacatctataaaatctactttctgttatctaattgaacaatcgatcttgatacatataaaattgttgccaagtgtacatgattagtcaactcatacttgattagctttgtttgttaaaattacaaaaactaaaactctagtaagtagtcttctgagttgtttactggggtgatatgatctgaaatgttttgcttttaacaggcagatttgcccattcaggagccacagaaatcgcaaatgttggttttcatgaatatcagaatggcccttcaactatttgtcggggaccagtaccttatttccaccagcatgcgatgcatggcatgcaagctcttgatcctactcaaatgcaagttccttatcaacaatgccacagtaatggtttcttgcatggtggtattaattaccctggaaaccgtctccaattaggtccacgaaatccagttctcttcaccagttctgaacgtgcttttgggcttccacagcatccgttcctggcaaatccagttaaccaccgcaa

SEQ ID NO: 236 - DNA, 897 bp, Zea mays
acgagcacccggcaggtatgcccgccccatcgcttccctttctcctctgcgaaaccgagcagcattcgaagcctagtctaatctaatctatttggctttttgtaatcgggcctgatctaatcgcaagtgtatatgtacgtgaattatgcctactaacttcgatttctttttgtttttaccaaaaaaagtaccgatcgggtgttcttcactgggtccgctcctgcgtgctagaactagaagaatcctctgctcggctcgaacttgggaaggggagacgagggatggggtccctgctttgctgcatgcggggctcggaggacgtctcggcagcgccgcccgtgagctgcttgtgcctactatggcctttccattattaccacaatttgaactcggtatgcttctactactgctacgtatctatcacctatccttttgtcattgcaaatactgttgttttagggtgttagcgtgctgcggaggtaatgactgaatggatttgtggtgcgtttagattactgtctgtgttcttcggatgatggatgcttcttggatcctgcaaaatgtgtgatacaatttggggatccatgcgggcactgacagatggtcctcgtctatatgttcttggctcttgcattgcatgcattaggccgtttctgaaatcacattggtacaaagttgcgatagactccatggcgtttgagggttatatgttgatttttaataaatcgctctgaagtaccataattcaatttgcatgaagatcattcgattcttatcgatgcctgactctggcaattactgcgtattgtgattggcttattttagaagtttgagctcacacagtaactgcactcttccaatttcttccttcccagggctctgctgcttgtcacagat

SEQ ID NO: 237 - DNA, 669 bp, Zea mays
  misc_feature (28)..(28): n is a, c, g, or t
  misc_feature (125)..(126): n is a, c, g, or t
  misc_feature (627)..(666): n is a, c, g, or t
tccatctccaatgcattcttgaatggtntgtttctagctctaatatatccatcctacatgttacaatttttacaattttttatattattcccacctttcacatgaacagtacctagttccatcannaattcatctgggtgcatgagttatggttatcactaagcacacattttagaacatcgaataccttaggtatttgtgttgtttagttaaccatatctgtcaccttagactgtaacatctgattgtgactggaaaggcttcagtatgggttttgcacatgaaaattttgtccctgaattgatgtttgacttctctatcgtgtgcagctttctggacatgggatggtatattattgaactgtactgtcttggtactgagtactgacaaaatttagtgataacatcatatgctcaacaagcattttccttgctggcgttatgaacagttgtagtcaaaatgcttggacttttaattatcatatcagttgttgttggagtgctctccttatttctgtctatcaatgttgctagtcatatccatgccgaatgtttagtagacctgtactactatatttggttattgctcaattttattcatgctaatgcttgttgggatttttatagnnnnnnnnnnnnnnnnnnnnnnnnnnnnnnnnnnnnnnnnatt

SEQ ID NO: 238 - DNA, 381 bp, Zea mays
  misc_feature (72)..(72): n is a, c, g, or t
gatgaagtcagagatcatccgtctcttgatcgaggacgactgcgccgacaacgccatcccgcttcccaacgnggattccaagactctcgccctggtcatcgagtactgcaacaagcacgtccacgccgccgccgccgacgactccgccgccgcggagaccagcaacgcttcatcagctgggggcggcggcgaggtcgacctcaagaagtgggacgcggagttcgtcaaggtcgagcaggcgacgctcttcgacctcatcctggctgccaactatctcgacatcaaggggttgctggacctgacctgccagacggtggccgacatgatgaagggcaagtcaccggaggagatccgcaggacattcaacatcaagaacgactt

SEQ ID NO: 239 - DNA, 745 bp, Zea mays
  misc_feature (282)..(282): n is a, c, g, or t
  misc_feature (705)..(715): n is a, c, g, or t
  misc_feature (731)..(733): n is a, c, g, or t
cggttgtacgcgaagaagcggaaagagctccaggagcgccagaagctgaaggtaactatgatggactgtacatgttgtgtttggcaacattcattttccgacttcattcagtcatgctcactgtatttcaggatgtacaagtacaaaaggaggaaaaagatgagagatctttggatgagttactttgttttattaatggggatggaggtataattacagtgagttatattgactatatgacttatgttattctgttcactgtttgtttctgaaactctttanatgacttaaatctgacgttttactgaggccagatattggtcaattttactccctaagattctgttcttttgaagtattgactatctgttaccttggttcttagttgattttcatcattgtttcatgttcaaccaaagtctaaaggctgaaacatttgcttaattagtgttttgtttaaataaaaacattcttaggctccatataaaccatttgacaggttcaggaggtggggaaagtagtaccaagagtaagaaaaagaataaaagaaggaaggatcatgctaagaaccccgcaaaagctgactctgagtctgtaaatgtggttaggtttcctgactgtttctcctgctgtgtattccatataggatatgtatttcttacatgatctatctggggagtttaggagggagctgcttgtgtggtnnnnnnnnnnntggatagcagtaatgnnnctagacttccat

SEQ ID NO: 240 - DNA, 472 bp, Zea mays
  misc_feature (464)..(469): n is a, c, g, or t
ttatatttcctttttctgctatactaaagaagctggatttgcagtacactttcctcaccaccgaagaccattgccagctcattgcaaaatgcccgaacttactagttctcgcggtaatatctcctgctcatgtaaattatgaagatactcacttgttgatctttttttatcataattgtcattatatttttcgataggtgaggaatgtgattggggatagaggattaggagttgttgcagatacgtgcaagaagctccaaaggctcagaattgagcgaggagacgatgaaggaggtgtgcaagaagagcagggaggggtctctcaagtgggcttgacagctatagcggtaggctgtcgtgaactggaatacatagctgcctatgtgtctgatataaccaatggggccttggaatctatcgggacattctgcaaaaaactctatgacttccggcttgttctgctnnnnnnaga

SEQ ID NO: 241 - DNA, 388 bp, Zea mays
tgtgacggaggaagggttggtagccctatcttcgtgtcggaagttacagcgtgtgctcttctcttgtgttcgaatgacaaacacggcgctgatgacaatagcaaggtactgcccacggctaacgtccttcagactatgcattcgcaagcccaggtcagcagacgccgtcacaggacagccactggacgaaggctttggggcgatagtgcggtcctgcagaggcctgaggcgtcttgccatgtccggcctcctcacggacagcgtgttcctgtacatcggcatgtacgcggagaagctggagatgctctcggtaacgttcgcgggggacaccgacgacggcatggtctatgtgctcaatggctgcaggaacctcaagaagctggtaatc

SEQ ID NO: 242 - DNA, 789 bp, Zea mays
  misc_feature (734)..(771): n is a, c, g, or t
  misc_feature (775)..(780): n is a, c, g, or t
gagcctactctgagacagttttggttatggtaacttctatctgtgtttgatgctacagatacacttgtccaatatgctctaaaacagctcttgatttgacacatcattgggaaatgttggatcaagaggtatcaaatttctttctcgctggtagcagcatgcatactgacagagaaacaatgtttggtggtaacttaagattcaaaatctaggatgtgtattcctgtctatcaccttaaataatttggaaccaatttgagaagaagaaaacctttcagcaatcatgaaacattctttccagatgagatgatattgtagtaaaattagtaatatcatttggttggatatgaaaagggccactctagaaatatacttacacctgtgtgctgaatatgttttgttctgggcagctatattatgttgtttcctggtgcttgctgattgactgatggttagttccttgtcattttgtagatcgaagccacgatcatgcctcttgtgtatcgctacaaggtattctttctggtgtatgtatgcagcccaactcctagctagcttagtacattaacccaaggataataagttcatgacttggttatttgtgatgtaaatcagaaaccttcaccgttaggcgtttttcataacctacctagaaaacctctctagtcttttactggtgaatcatctatggtatagtggaataatagccacctttaactttatatctacgttcnnnnnnnnnnnnnnnnnnnnnnnnnnnnnnnnnnnnnntaannnnnncatgctgat

SEQ ID NO: 243 - DNA, 373 bp, Zea mays
  misc_feature (363)..(370): n is a, c, g, or t
aatcgcaagtcacacaacaccgtcagatctgaaatagcaaatcctgtgggggtttctgcatttcttcaagaagcgtgatggactgatggccccttcccgtgagctgctgagcaccgggatatctggcaagacactcatcactgtatccactccactgggtcctgcggaggcaaacagctcgagattgtatatctgctgctagctgccgcccttcgttatgcataagcctactcttgccgttttactcctgtcgctccgtgattctagtgtaataatgtcatatttactgttgcttcaagtatggcccgtacggctgcggttgaacggcggcgggggctgctgagccacagtaccttgctgtgnnnnnnnnctg

SEQ ID NO: 244 - DNA, 367 bp, Zea mays
tcgccatgaccggggtggtcgtcgacggcggcaagaccaacaaccaagccggcgcgggccaatactgaccgacgatcaagtgacgatcgacaccaatatgctcaagcaagaagccagcggcaaatcaattatgtcgccgctgggttttatgtattttgtgattctatatgcacgctagctgcttgtccgtcccggccaatggaaaaaaaaggggggaagaaaaaatgtctgtcggtatatgtgttctcgccgaataactctcgcgcatagctagctggtggggctgagtcactgccttcgctatatgtatacgtgcaaaaattagaggtggagggttgttttagctaatcccaccttaattccaagg

SEQ ID NO: 245 - DNA, 805 bp, Zea mays
  misc_feature (753)..(758): n is a, c, g, or t
  misc_feature (767)..(770): n is a, c, g, or t
  misc_feature (775)..(789): n is a, c, g, or t
  misc_feature (795)..(798): n is a, c, g, or t
cccgctctgctgccccaagggccacacattctgtaaggagtgcatcctcgagtgcctcctctaccagaagaaggacatcaagcggtaggcggcaacagttcacgctctttaattacttctctgtcttgttaattgcgtccttgctttagggggtggttggttgggccattgggggagtagagtagggtgcgccatggcagggaggagagaaggctgcatactttgagtatttgtgggaagaatcgtcaggctagtttatcactgctgtaaggctcaggcggctaatgattttttgtgcggacattaggggtgtttggttactttagtcacccttctaagctttagagactaaatttatttctatgcgggagatcttatttatcagtcatacagtttggtaatttaggcactaaaaattgactgtcactaaagtttaggaggtgggaaccaaacaccccctaacgccaaaggtgtccattatcaaacacttgacccttgccattactcactgtacctgcaaatgtatgtttgtttttctaaagtacatattaccagcaaccatgttcattagccactggtcattaaaatagtacgcctcttgtagttgccttacctagaattcatattgttcgtgacagacacacacaaaaaatttatgtatttggtcttaaactatctgcttttctaatacccttgttcttccagcaagctagcaacacatgaggcccagaaaaagcaagagaaagaagaggnnnnnnagaagctannnntgcannnnnnnnnnnnnnnggatgnnnntgatcag

SEQ ID NO: 246 - DNA, 835 bp, Zea mays
  misc_feature (812)..(820): n is a, c, g, or t
aagagtgaaaccaaggcaccagcaccaccaagcagtagtaaccacagcaatatcaaaccgaagtccaacaacaaaaaggtgacatctgttttgaaatatgcctatacggacggttataccatgagtttgactaatcttgaaatccttcatttaaaaaatatctctttgctatagttagttatccataaagcggagcagtgtgacatttatttttcatccatttcttatttatttcttgctaggggtggtaatagatcacgatctagatgtttcttcataattcgtttgagaccttagttaattttagtttaaaaatgaatgaaaatagatcatgatcctaacccgatcctatctttaaattttatagtgtaaaatttagagtcttaccaccacaatttcttgcatctcctcaatccatttgtcatatagtgtaaaatttagagtcttaccaccacaagcctcttgagtggtatttgttgtcgctaaccttaaccttagttcctcagtgtgtaaaatttatgtcatggtttccaacacgttagttgataaagctgtgaaacttcttttctgatttctacaatcacaccctgtcagcattgcttccacccaatctgtgttagtttgctgtctgtcgaaagctcatgaccttgtaagttatttatggaagctcaatttagttgtcgaatttctacacctagcgttctttacccaaacctaaggtcgaggggagcattcagaacactacccatcctctgcataaatgtatgttttaccctcttcccctctgaaacgtgcagaaaccaccggagccnnnnnnnnngcagccaaagccgcg

SEQ ID NO: 247 - DNA, 333 bp, Zea mays
gcgagtctacagctcggagcacgtccacggctgggacatgaagccggtgcgtttccagatgtcgacctccgacggacagcatgttcagtccaagtgctacttgagcgatcccggtatctggatcaaccaccatgtcggggacttcgtcgtgaaggactcgagcaggccagtgaacatcaggttcgcgatgattcagatagactgcacgcacacgaaaggcggcctctgcgtggattcggtcgtggtgaaacctcagcacctctcgcagaaaaaagcgccctggacttacgtgtagactcgtcgaacaagttgctgctgctgtctagggaggag

SEQ ID NO: 248 - DNA, 654 bp, Zea mays
  misc_feature (472)..(472): n is a, c, g, or t
  misc_feature (539)..(547): n is a, c, g, or t
  misc_feature (552)..(552): n is a, c, g, or t
  misc_feature (570)..(571): n is a, c, g, or t
  misc_feature (582)..(585): n is a, c, g, or t
  misc_feature (595)..(608): n is a, c, g, or t
  misc_feature (618)..(619): n is a, c, g, or t
  misc_feature (625)..(631): n is a, c, g, or t
  misc_feature (643)..(648): n is a, c, g, or t
ttatgccagttttctgaaaacaaagatggtctgttggcattaattgcgatggaatgggctgaagatatttactcatggtgtgattgatctgttccttttctttcttaacttagcacgtcattgattttatattcagctttcgaaagtagtgttactttctccctataatgatttatatggatgaatacctggtctcataattgtaggtatttattttaagatctgcataagcttttttttaccctggaacacaatagatgtgaatgcatacatgttgtcaaatgttaggattgagtaattgagctgattgtctctcttgaacaagagaagtagcttcctgcctcttgcacaagaggcctgcatctgttttgcaatattcatctatagaatgtttagaagtaatccaattcaatatttctagttcaaagtataggtgatatcatattcttggaagtcaaatatctgaccaatngttattgtttcttatcatgcagattccagtctgtagcctaccttcagcaaatctggtggtttgaggnnnnnnnnnaagtngatttctgcttccctgtnngaacatatagnnnntacttcaggnnnnnnnnnnnnnngttctacagnngatttnnnnnnngccagtgcaccnnnnnncatgtt

SEQ ID NO: 249 - DNA, 567 bp, Zea mays
  misc_feature (37)..(37): n is a, c, g, or t
  misc_feature (96)..(96): n is a, c, g, or t
tcttggcgagcatcagtttgcagtggcgaacttctcnaaattcgtaaccagattggtacgacagaagagctcttgtgtgtgttggcgtttgaaccngaaaacatgtggcaactttatgatcccctacgagacaagtggataactcttcctgtcatgccatctcagattaggaacatagcccgctttggcgtggcctcagttgctggcaagctctatgtaattggtggtggcagtgatcgagttgatccgcttactggagatcacgacaggatctttgcaagcaatgaggtttggtcttatgatccgctgcaccgtgtgtggtcccagagggctcctatgcttgtggctcgagcgatgtttgcttgttgtgcactggatgggaaaataatcgttgcaggaggcttcactaactgccgcaaatcgatatcaaaggctgagatctatgaccctgaagctggcatatgggagcctcttcctgaccttcgtctggctcatagctctgcatgtactggacttgtcatcaagggtaagatgcatgtattgcataaaggtctatcgacagttcag

SEQ ID NO: 250 - DNA, 381 bp, Zea mays
gatgaggaaacgtcacttttttggttcttgtgtaataaacaattgtctctatgttgctggaggagagtgtgaaggaatacagaggacgctgcagtctgcagaagtttatgatccaaataggaacagatgggcctgtgttactgaaatgaacaatgggatggtgcctttcattggagttgtatatgatggcaagtggttcttaaaggggctagattcccatcgccaagtaactagtgaggtctacttaccatcatccaatacatggtcagcaattgatgatgagatggtcacaggctggcggaacccaagtatttctttcaatggccgtctctattcagctgactgccgggatggctgcaagcttagagtctatgatgagaa

SEQ ID NO: 251 - DNA, 765 bp, Zea mays
gagagctctgttatgcagtgaagaatggcacttgtgccgcaagaggaataacttggacgagccgtggatctacgtaatctgtagggaagcaggcatcaaatgctatgtgttggctccagatcctccaagccggtgctttcgaatcatgcatgtcattgaacccccatgctcagggaggaaaggtgttaccattgaagctttagacaaaaagctatttcttctgggtggctgcagttccgtgtatgatgctacggatgaagtatattgttatgacgcctcctcaaatcgctggagctcagctgctccaatgcctacagcaaggtacttaatcggcaaagtccattgacatctttatattcactctcgagatcgagacatacctgtcaatctataattatagataacatgacacatgtactccattaatctgtgcctgtatatgtagtgcctcatgttttccctagaacagcacatatatgtagcatgtcatattcgtccttaggcaacaccttatatactatatctattggaccagttccttatgctccgccgcctccctttcaggtgctattttgtgtctgcatcccttaaggagaagttgtacataactgatggatacggcttgacggacaagtcaccaaattcatgggacatctatgacccggccacggactcgtggtgcacccacaagaacccgttgctcacccctgacatagtgaaattcgtcgcattgggcgaggagctggtgaccattcaccgagcggc

SEQ ID NO: 252 - DNA, 529 bp, Zea mays
aggctctggaagaagaagagtttctccaccagcagtaccaatacgatgatgacgaagatgatcttgacgaggaattttattacatgaacaggtccccaagcatccgtattggtaacaggagatggggtgacaatgggtacatcaggggaggcaggaaagaggcgaggccagtgaatactgatgtggctgctggtccatccaggactccgaagaagaaagagaaagccgcatcgtcttcggcgtcggtgtcagtgtctggttcggggtcaggatcggggtctgtatccaaggatgtcgctggaaggcgggcgaagagggcgcagaagcgagaagctgcagataaggcagctgcagagaagcacctgaagcacctgcagaggttggggctgaggaaatcgccagagcctgtagtgcccgcggaggttgggccacaggtgaatgagtgacttaagccgccgccgagtgctatatggtgctgctaaaaacactgcagccctttgggccacaaaataatcttccactgtgaaga

SEQ ID NO: 253 - DNA, 755 bp, Zea mays
gtgtctcctcggagtcgggcctagtgggttgatcaacatggttgtttgttagttggtcatggtgcgtgctgtcggtttacttggtgaggaagcataacatctatggagcaatgccaaactttgtattaaggagatctacatggccctgagagcgtgaaaccagcccgatctatgtgcgaacgtaggcttggcgctggaggccagcactgaattggcccagtaattaccacttaccagggatactagctttagcccaatagtgcagtctctcatccggtcatcccccttcccctctcccctccctccaagccagtgagcacggggtcttataccagccgctgctcccacatcccacaccaccaactttcatgacctctcggatcatgccatatgctccagtgcctctgccttattagttggctccccttctctggcttccactgtgctggcggatgcccagtctgtgcatgtcccttctctcgttcttgctcccagattaagaagttacaaagttattgattcccaaataactggagagaatcacaaattggtaatgccattttcacgacttcttggtctatttcagtctaatgttagttgttgcgtcggttatgatgtcagttatgatgtacgatgatactatgatttagcttgagtttatttaaacttatctcgtgtaacagttagcaatcctgttgatccagttccggcgcactgtttcttatgtcgcatccagcaactctgaaggatctttt

SEQ ID NO: 254 - DNA, 558 bp, Zea mays
gaacatgcccgagggtgagattcctcaccgcccaactggtcagaggcctgccccagccccccaggccgatgctaacaacaactttgccaatgccaatccaaatgcgaatccatggttcatgggcacaggagtccctttggctaatgcgcgctgggggaactacgcattctcagctgctttcgggggactattccctatgcttagcttccaagttcatgggtttccagatgctgctgcttatgcgcagcctgctgggttccactatgggtatggccatgggcatggattccatggcggccatatgggacacgcccatggcgtccaccgacaagcaccattggggcaacagcagcaggcagatatctacttgaaggccctgctcttcatgattggaattctagtgattgcaagcctcattgcgttttaaaataaaatttgttggcaacatctaccaggaggcctgctcgtcacggctgggacgtggaattctgggaatgcaatcctcctgacatgtcagagtccgttgatagcttgacatttgtgatggcatattggccc

SEQ ID NO: 255 - DNA, 509 bp, Zea mays
tggtcacccccatcccgcctcggccacaccatgtccgtctacggtacgactaaactgctcatgttcggtgggctggcgaagagcggctcgctccggctgcgctccagcgacgcctacacgatggacgtcggcgaagatagtccgcagtggaggcagctggcgacgaccggattcccaaacgtcggcccaccgccgaggctcgatcacgttgcggtgagcctgccctgtggacggatcatcatattcggtggctccatcgcgggactccactccccggcgcagctgttcctggtcgatccagcagaggagaagccgacgtggaggatcctgaacgttcccggcaaaccccccaagttcgcctgggggcacagcacctgcgtggttggcggcactagggtcctcgtcctcggaggccacaccggggaggagtggatactgaacgagctacatgagctctgcctggcaagcaggcccgacgacgacgacgatgaccgctactgactagtttc

SEQ ID NO: 256 - DNA, 246 bp, Zea mays
gttctctacgcccttgtcacgtttttgtttgcactgccctcatttttgatcctctactttgcctaccccagcttggattggcttgtcagagagatcttcgcttaattcgtgctgtctgaaatgtccgcgcagtttgtatccctgcgacaaatgatatatattggtatatgtattccatgggccacctgccctcgtaggccctgtatagtttcttcttattctctgtccttgtagcactctatttct

SEQ ID NO: 257 - DNA, 331 bp, Zea mays
aggctgttcaaatcccacaagacgccaccttccgctgccaccgccggttgacactacttcgcccaccgatgcaaatcatgccaaccatggggtccctgtccctctgctgaacgcagagagggtacaagcttcgctgcgcaagtccttgtcgttcctggttcacctgaccgccaagtttcccctggtgttcatcttcctcctgatagtgctctatgcgatccctgccagcgcagcagtcttgctactgtacatccttatcacggtgctgttcgcgctcccctcgttcctgatactgtatttcgcgtatccgagcctggactggcttgttagg

SEQ ID NO: 258 - DNA, 374 bp, Zea mays
attcgagggagaggcttctggttccgatcagcaacccagaaatccttcttggcagcacctgctacatcgagatggaccataacgctaagagagaggttgcaatcttttaccccgagggacgcccaggtggcaaaactgactctgtggcaagcattgtctctgcggagaggagaaacaaaaggattctcgagtcggtgaggcggagcctgcacgtcgatgatggcactgctgcgtactacttatctgttactgagggtgatccgagggctgccatgacggagtactccgaggacctgaggtgggagcagcaacgcgcaggtcggtagattcatatatattccaatggcatatgttaagatcatggtgcttgatcc

SEQ ID NO: 259 - DNA, 336 bp, Zea mays
gaaggagcagcagaatcctgactcaggagcctgcattcccaatttgttcagctgagctcagtaacaagaggatggatccaggtgtatattgatacggccgatgtgtttgtgtgagcgtgtgcctgtgctttgcgttttgtcctgccaagctgccattgcagcccgccctaaattagtcagggcgtatttactgttggcaggataatgaaaatactggcttactccttttgtgggctgtgactaagctcccatgaatctcacgataagcatttttctcgatccaatggtgtatactgtatcgttttgggctgaaggctgcagcttttttgctgttat

SEQ ID NO: 260 - DNA, 279 bp, Zea mays
  misc_feature (38)..(38): n is a, c, g, or t
  misc_feature (75)..(79): n is a, c, g, or t
  misc_feature (259)..(263): n is a, c, g, or t
  misc_feature (269)..(269): n is a, c, g, or t
tgccaaaggagaacagacaaccgaagaatttaacggcntgcagggtctgtaaatcaagtgaggcatgcatgctcnnnnngccgtgtcggcatctttgtctatgcaaggagtgcgagagcaagctgagcatctgccccctgtgccagtcctccaagatacttggcatggagatatattatgcatagaatataatttatgtatcacattagtatcgtacgagatactgctatgttaatacgtcaatctattgccgaagttnnnnncctatntaccactatt

SEQ ID NO: 261 - DNA, 480 bp, Zea mays
ggccattgttcccgcagctctcgcagcactcaccggcacaggtgctcaggaacttcacgcacgtcaggaaccttcggatcgagctcccctctggggatgtgggtactgaggagggagttctcctgaaatggcgagcagagtatgggagcacacttgagaattgtgtgatcctggggggtacccgggttgaccgcaagcctgttggtggagagcatgagccagctttggaggacaatggaagcatgccagagtctttctataccaatggtgggctgaaacttcgtgtcgtctggacaatcagctctctaatcgcggcatcaacaaggcactatcttctccgctcaatcatcaatggccatcccacactacagagcttggtactgacagatgctgatggccaaggcacattgtgcatgggggcaaagcagctggaggagttcagagagaaccagttgtcggcctcggcatgttccaacagga

SEQ ID NO: 262 - DNA, 342 bp, Zea mays
attagagcagaactcggatgctgcttgctgcatcgaggcggtagattgaccatccaggagtgtctgctgcagtgcgagcaaaaccctttggaccacctgtccttcccaataatcagcacagcgatagagtacgatccattctcatccctcaaggagcaagggcacggagtaacggtcgtccgcaccaggatcgaaggaggcgcgagggccgtcaggacgaacggcacactcgcgctgcgccatgtgcgggccatctattcccgcagctctgttttcttctggttcgaagtaggagagaaagtagaagcgcctgtacactagcaaaaaaacccgtgttcgttc

SEQ ID NO: 263 - DNA, 782 bp, Zea mays
  misc_feature (205)..(205): n is a, c, g, or t
  misc_feature (716)..(716): n is a, c, g, or t
  misc_feature (742)..(756): n is a, c, g, or t
  misc_feature (759)..(769): n is a, c, g, or t
ttgactgttgcagtcaccttggctgatagagcttgctgctttccatcttaactgcgatgattcagatgctgatgaacctagagctggagagttcttcaagaatggattcttcaagaatttttcctgtgacctgagtggagcacagccactactaacaatgaccatttctgaaactctgaagtatgagtacagcctaacttgtccnatttgcttggtgagatattctttaacttctgttttctttggctcataaatatctaaaaggatagcctttgttggtagggaagattgctgtgaaaactttgcatgttgtctctgcagggtattttttttctttcttcagtttgcttgaatatatgggggctgattttaacatccatttgtgatgattttttccacttgcaatgtgtacaggacactttgttcaacccttatgcacttagctgtgggcatctgttctgcaaagcctgtgcatgtggtgctgcttctgtctacatcttccagggtgtcaagtcggcacctccggaggccaagtgccctgtctgccgagcggtatgtgcgcaatcctacttgctgccagagatcattcttgttcagtctccttgacctccttgctgtggtggaacgtatcttctgtttgtggtatcttccgtttgtgacatgttttctttaaccgtatttgctacatcacccataaaccatcggggcgaaaatantttctttttttcttcttaatatgcannnnnnnnnnnnnnntcnnnnnnnnnnnttgtttttttaac

SEQ ID NO: 264 - DNA, 470 bp, Zea mays
ttccccattccgcctctctagctggcctgtcgaggaccctcgccatcctccccaggcgcaccaccaaacggtccaaacccccagcggcggcgctaggatttgagtctcagcgcgccggcaccgccaccgccaccggcggtgatggcagggcaggagcgtaggacaatcgatctggaggagggatgggcgtttatgcagaagggtatcaccaagctgaagaacatcctcgagggcaagcccgagcctcagttcagctccgaggactacatgatgctctacacgtgcgcctccttctcctcttactcctcctcgccgccaccgtctcctgcgcagcggccgcttggtttcacaccgcgatccgcctcgatccggttctgatctaggttttggtcctcttgtcgcaggacgatatacaacatgtgcacgcagaagccgccgcacgactactcgcagcagctctacgacaagta

SEQ ID NO: 265 - DNA, 737 bp, Zea mays
  misc_feature (704)..(708): n is a, c, g, or t
  misc_feature (713)..(720): n is a, c, g, or t
cataatcgtagtcgggagacgctataactaattttctccccttgctgttcagggtcaaatgttgacgattgtggaatattttctacttttgtatcgtgcattattgcctacacctgtgtggtaccgttttttcctgaacaaggagtatggaagcctattttcgtctctaaccactggcttgtatctcactttcaagttgacatctgttgtggaaaaggtgctatacgttcacttatctaatcactgaactgatacctagcgaatgatctgacacataatgtacctttgtcaggttcagtcttttttgacggcattgagagcattatctcataaagacttccattatggttcatatgcaacaagtgagcaggtagctaacgtcacttcttcaagaaacacaaactgatgaaaaattctgagatatgcattctgcattagatccttcaacacacatctttgtgttctgtgctcaggtagttgctgctggagacttgtgtgcgatatgccaagaaaagatgcatgttcccatccttttgcgctgcaaacatatcttctgtgaagattgtgtatccgaatggtaattcacataccccctccctcgccgtctaccgtgcgtgtggcctttcccatgcactattcttacacatctttcactgatttcattacccatttctgctttcttggcgttgtttggactatggaannnnngagannnnnnnnacgtgcccgctgtgcag

SEQ ID NO: 266 - DNA, 681 bp, Zea mays
  misc_feature (635)..(640): n is a, c, g, or t
  misc_feature (656)..(659): n is a, c, g, or t
  misc_feature (667)..(670): n is a, c, g, or t
agtaattcaagtaaaccaaggtattattctgattcttctttcggagagaacatgttatcctggtttagcatcacaggctacaaaaatatgtttttacatagcaactgacaaccttcttatttttgtatataatttcccaacatatcttatatggcagaacaatttaaattcgtaatgttcatataatcacataaactgttgagttgcatgtgttttattttctgcagatcctcttggagttcaaggaagaaaaattttaggacaaggaaaatatggatgccgtgaggtgatttttactgtccgttttcccacttgttctagacaatgttgtagccatagggttgtcctattgtaaattgtaaaatataattaagaccacaacgcgtgagaaaaattcagtattgtagcctatgcatgatcaacttagatttagtaattcttttttatttggtaaatgtatagcctttacccaaccagcaacagcctagcaatgtgcatgcctgtaggttgtctgtttgatgtattaggcaaaagcttcatgtcgtattcaatgggatccaaatctgcaggcaatatttgattaaattttgcattcgtgatcaagtgaagcacaagcattttttagtagagtagtnnnnnnatgcctgtatggagannnnatcagaannnnacttttttgtc

SEQ ID NO: 267 - DNA, 825 bp, Zea mays
  misc_feature (753)..(754): n is a, c, g, or t
  misc_feature (762)..(767): n is a, c, g, or t
  misc_feature (774)..(805): n is a, c, g, or t
  misc_feature (815)..(818): n is a, c, g, or t
tgatcatagctgatggacaggtaacatgttcataatagcatcaaaatacttcactagaattatgaacatatttgacctgataaaaagttgtaggtgactgccgcgaatataaatgatggaagattaagtccacaggaacaagcaactatacaagcaattgtcgatgctaggtaaaattcagttcatcattccttagaactttggtcttgtggtattactgaagcctatttggttgtcagctactatcctctttcaatagtaatggttggggtgggtgatggaccatgggatgcgatgcagcattttgatgactgtatccctgaaagagcttttgacaattttcaggtgattataatactgctctatgatgttgaaattccaaagccttgatgttcctccacttatagcagtaccctgttcttgctatcgtacttgtaccagtcattgttttacataaagttgtaaacatattgattattccagtaagaaaaactatactaacctgaattaaacttattttctaccgatgccttttttagtagaatagacttcatgatgatgtgctttcagtttctggcctattggccttctgagaatctcattgatgaactattgcagtttgtgaacttcactggtattatgtcaacaagtaaggatatgtcaaagaaggaggctgcatttgcccttgcagctcttatggaaataccttctcagtataaagcaacgcaaggcctccgacctccagagtaccanntcttactnnnnnntttgtgnnnnnnnnnnnnnnnnnnnnnnnnnnnnnnnnttcttttttnnnnttgctga

SEQ ID NO: 268 - DNA, 602 bp, Zea mays
  misc_feature (272)..(272): n is a, c, g, or t
tttggttgagttgtcaccggtatctcaagtttgtcgtttgtggcgcttggcctgttcagatccacttatttggggcactcttgactttggattgttaaaatccaattttattcagacaagagcatcaccatatatttgggttgatgataggtctgacaggagacttgcaagaatactacgggtggctatggcaattagctgtgggaacgtcaactgcatgatatttcattacaatttgttcatgaaagatgagcaccttcatttcatctcanaaaggtaacagcaccttgtatgttttatcaatgctgtggttccacattcttatatattgatgtgtcatatgttgtgcaactttaaaagtttatttttaacacgatagttgaagtacatcttatggtttctatagaaatggccaaatgggtgtttgcatctagtggtgatatatgagctctcagttgaatcatgcataaacattaacacattatcacaagtaaatattctatgttttgtaaatagtaactattcttttgtacacttttgtgttagtaaatttgaatagctgctatttcatagccattcaaacagtgtgggtgtgtgcgttt

SEQ ID NO: 269 - DNA, 1426 bp, Zea mays
  misc_feature (546)..(546): n is a, c, g, or t
  misc_feature (567)..(567): n is a, c, g, or t
  misc_feature (584)..(585): n is a, c, g, or t
  misc_feature (1325)..(1325): n is a, c, g, or t
  misc_feature (1372)..(1380): n is a, c, g, or t
  misc_feature (1420)..(1421): n is a, c, g, or t
  misc_feature (1423)..(1423): n is a, c, g, or t
tttgaggattgggaatatctcttttcgcctatgttccttctttggacgagtccgtaaacgtgcatgaagtttgattttttcccctaggttccacatttacactaatttggtcatgttagcttatggatggcaaagtactatttctcacgggttctgaagcagaattccaatccggatcgaggggaaaatagttcattttatcctaaaccccctccaattatggataggatttaagtttccaaactagccctgagtgaatgttgaaactctgattgggaaacatgggaaatttgtttttagtgaaattatatttctttatgaagtgctgttttgttttgtttttctttttttgaaaattggtgtcgtgctttttttttttaaaggaaaaattttcagggggggttgggggttgggaccctttttaggggcaaaaaattggtcttttttttctaaacctttgacagaatttttgggtttttgatgcaagttgttcttccaaacaatttgccttgaaaataccttttttttgggggaaaaaaaaagggngttttttttcaaatcagaagnctgtttccaagttggannctgggaaccacaaggagcagttatggctggagcatcactttcattttggttgcatgatgactctcgtcagaacagcaaacccctgcattttttgtgttatactgcttccatcctttcatatatgacgccaaacagtacggaaatgaactacaaaacgtcaaataaaaaacaaatatggagggagtaccatgggtgcagcggtaatatttatcttgaccttgtcgtttaagattcaagttgtagttgtttttcttcttcacaggataagcttacctctttgttgaaatctgatgaaatctggtttaatgacacttccattcagctcacctctttgttgggtcaggataagcttggctttggctctcccttttccagtctttatcttccactggatattttgtgcttttactagagataatcttccacttccttgagccaatatttgactaccactagatattttgtgctttgcatgcatcatgcatcatcatcatcaagcctgacaaatctgacctttccattacccgtgctcccaacctatcatattcataccattcactcgaacaatctgtatcgaagctattataagcgatgatcctaccatattcaaacaatctgtatcataacagaagttcgttcgctctttgcactacaggaacgcgaaatagaagtcctgccccttctgtcgcgcctgcctggaagaggtgaagccgggcagcctgtggatataccccgacganctcgcggagggggacatggataccttgactagggagaacatcaggcnnnnnnnnntgtacataaataagctgccacttgtagtcctacatgtagnngncct

SEQ ID NO: 270 - DNA, 422 bp, Zea mays
gagctcacaagccatacattgaaaagtctatttgcaaaatcggtaggtgtagataagatcatacttgatgcagataatttggaagttctgcacctgaatgctttaaatctcgatctgtttgagcttaacgggaaaggaacactaaaacattttaagattgatgatgtcagtgttactcatttggatattggggacaatactgatcatttagaggcagtagacgtgagcaacttcacaatagtctggccaaaattctatagcatgatatccagggcatctaatttgcgtatgctacgattttggggtgttgtgtttgatgacgaggatgagatcgtggattcagaaactatagctgtttcatttcctcttcttaggcatctttcattgagttatgaattacgagatgggttacttcactacag

SEQ ID NO: 271 - DNA, 766 bp, Zea mays
  misc_feature (696)..(701): n is a, c, g, or t
  misc_feature (716)..(721): n is a, c, g, or t
  misc_feature (758)..(760): n is a, c, g, or t
atggtggagctgctcgtcggccgcagcggcggctcgtgccgccggatcagcgtctccgggctgccctgcgatccgctcttctcgttcatcgcagacaagtaagtgtgagatctggcaatgctctctgttttttattttatgttattttattttgtcacgattcctgtgggcagtgaacagaacactgaacagttctgtcaaattcttgtgttgttcatctgcagtagattagaattctagctcatttgcgtagagcaatagattagaattctaagcctatctgtctggtttcgtttcaggctgtcggttgtctcagtcagaacaagcctttctattttgaatttctgatgtgcgaattcaggtccattttatttgtctaggctggcttagggatcgttctgattgattgattgattaggaggctagaagtgggcctagtgggatttgatgcattccaaggcacgccttctggtcttgaatcttacttgtaggatataacaagttgagcaatttgatgtatattgttctgaattgtttgcattgtgaactaggattagaccttttttttcttcgaattgtgtccattggatttgcaagtacacacacaagtactggcacacactcatcaggctctcacaattacaccacgtcacgttgcctattggcagatgaggacagtcatcagttggtccgcannnnnntgctgtcattcattnnnnnntttgcactataactgatccctgcttcatctttttttnnncaatct

SEQ ID NO: 272 - DNA, 391 bp, Zea mays
gcacactgatacccatggtttgcagatatcagaaactgttgttgaacctcaagtaggtagatctgagggagacttgttgcctacaagttctacagatgatctacatatatcagtggggagaacaaaacaatctgatgcaggtgaattacgcaaaggaaatagcatagatgatagcactccaacttatctagatatcacgataggacatttacctgaacgcaaaactgcatccaggatcacaacagagggttctggtgagtttattactgggaaaggaatgttagctggcacatcttctgtgaccatcagtgcaatggaagctggtcgcagtgaagatggagctgattcgatatatgatccttcaggtgctataactccttatcatgatcct

SEQ ID NO: 273 - DNA, 505 bp, Zea mays
  misc_feature (492)..(502): n is a, c, g, or t
ggggcgaggctaagcatgaccagaagcagagcctgatggacaaggcgaaggggttcgtcgcggagaagatcgcgcacatccccaagcccgaggcgacgctggacggcgtgacgttcaagggcctgagccgggagtgcatcacgctgcacagcagcgtgaacgtgtccaacccctacgaccaccgcctccccatctgcgaggtgacctacacgctccggtgcgccggcaaggaggtggcgtccggcaccatgccggaccccggctggatcgccgccagcggctccaccgcgctggagatccccgccaaggtgccctacgacttcctcgtctccctcgtcagggacgtcggccgggactgggacatcgactacgagctccaggtcgggctcaccgtcgacctccccatcgtcggcaacttcaccatcccgctctccacctccggcgagttcaagctccccaccctcaaggacttgttctgatctagtagtagcnnnnnnnnnnnttc

SEQ ID NO: 274 - DNA, 888 bp, Zea mays
  misc_feature (770)..(776): n is a, c, g, or t
  misc_feature (827)..(833): n is a, c, g, or t
  misc_feature (848)..(863): n is a, c, g, or t
  misc_feature (879)..(881): n is a, c, g, or t
ggtagccattcgcggcgcaaagtacgcgttagaagaccaaggaattgctccgacagtagaggtagggcgaggctatactgttcaagttcccagccatccaactgcgtagtatttcaagacgcaatttttccgatctgttgtctcggtgatatggctcgtctttcagttagtttcctatcgatttcagtcctaatcaaataacagagagttctgaaacgttctgatgttcttgtatcaccttgcttctggcaaaatcctctcagaacatagcggagtcgctcaacatatccgagaagaaagtgcacaacgctacagaggtaaaaacaactcaatcttgcatgttagaatttcttctggtttgacatctctgccaatctcaaaagcattcgcatacgcaggctgtgcacaaggttatttcactggatcaacaggcgttcccctccttaaacggcctacctggggatacactccatagtgtaagtagagacatacgaagcgttctatctttctttttttaaccaagtgacaggagctctgtctttcaattaagagatggaaaagatttagagtacacagggccggcgatactcaggccaaaggatcagacacctaagaaggaacacaacagacacatgggtatgctggaaactaactttgttccttttctcctcatgtttttcagtacatagaggatcaaaacgttgcaaatgatccgtggcacggatttgaggaaaggtacctcaaggtatgcacaccaatgttcttccgannnnnnnactaatgcatactgatttcttgtgacgacgatacgccattagtatcaaacnnnnnnnatagcttccaatctnnnnnnnnnnnnnnnncatggccctatcacannnatcactg

SEQ ID NO: 275 - DNA, 366 bp, Zea mays
ctattagataactcacaaaaaagaaatatgtaagcattgaggagtttgcagcagatgtgaggctaacattttcaaatgctatgaagtataatcctccaggcaatgatgtgcatatttttgctaaagaattgaatgaaatgtttgattcagaatgggaatcagtagaaaggaaatttagaggccgaaaccttggtcaagaccagcagacaatgaaggccataaaagttcgagctatcatggattcaaagtctacagttgctagagggccggttgcatgctcaaaccctaaaactttggttgctagaggtccagtagcttgctcaaattcgattgcaaagaagacactgacagatgcattatcctcca

SEQ ID NO: 276 - DNA, 789 bp, Zea mays
tatgaggtagagggagttccatacgagcgaggtaacagatccattgagacgaagcgaataagaaggtacgaatagatcaagcctgtggcaaaattatgcaagtttccaacaaatgtctgagcagagaggtcactttttgttgtggggtgcattgctcctgtaaatttcaggatggtgtccaatagggagtctgcgcggcggtctaggaggaggaaacaggcacagttgtctgaccttgagtcacaggtaccataaccacctcactcacctggccaggaatgacttccaaccaatgatgtatactgcaagtttgtaggatgcgcactgacatgttgcctcgttatcaggttgaacgactcaaaggtgaaaacgcaacactgttccagcaactttcagatgccaaccaacagttcagtactgcagtcacagacaacagaatcctcaaatccgatgtagaagcgttaagaattaaggtgaccagttcgcttctcacagctgccacaaccactgaaagatcacaaactttgcagctctctaacagtaaccaacccgtttgaatttgcaggtaaagatggcagaggatatggtagcgagaagtgctgtatcgtgtggcctaggcgaccttggcctggcaccatacgtgaactcaaggaagatgtgccaagctttgaatgtgctcacagggttggatttactagggagtgatgcgttcaggggtccaaccgcaggtacacgagtacagaactcaccagtacagagcactgcaagcctagagagtctggataaccg

SEQ ID NO: 277 - DNA, 821 bp, Zea mays
  misc_feature (771)..(773): n is a, c, g, or t
  misc_feature (802)..(803): n is a, c, g, or t
  misc_feature (811)..(812): n is a, c, g, or t
gagccgtcccggaccgggacgccggtgagggcgacgagcccaaactgctcccagccaacgactccacggaggacgctcggcggccccagcgcagtcggctccttcatcagccacggaggagaatgcagcagctcggagctgagcgagcaggagctgcagaccaaaaccaggagggagatcatgctccttggcacgcagctaggcaagaccagcatcgcggcatgggcgagcaagaaggaggaggagaaggacgcctcgctctcgctgaaaccggtgcccatggaccagtcgacgcagaacataaccgcgatccgcgcggctgcgtgggaggaggcggagaaggccaagtatttggcgaggtgcttatgtctgattgtcttttatagtatctatgttcgaatcctctgcgtgctcggtgacgggtgactttgatattatcttgtgcttttctgctctgcagattcaagcgagaagagatcaagatccaggcttgggaggaccatcagaaagcccagatagaagctgagatgaggaaaatcgaggttcgcagactgtttcctgtcaattttcctgttaataacgatgggcgataacgatccctgatggattctccacgttaccgagacacgcatgcattttcacctcttgagttttaacttgtaaaagcttaaaacacagaggcgaaacgttagcagcctagatcccacacctgctgcggctactattcatctgaactcaataacttacagccatgaagatgcaatgcattcnnnaatttagcatgagatataacttacagccnngacactanntttcgactg

SEQ ID NO: 278 - DNA, 374 bp, Zea mays
ttatatggtttattcatgttcaggaacaactggaaaagaagaaggctgaatatgcagagaagatgaagaacaaggttgcaatgatacacaaggaagccgaagagaagcgagcgatggtggaggcaaaacgcggtgaggaggtcctgaaggccgaggagatggctgccaagtaccgggccaccggccacgctcctaagaagctcatcggttgcttcggagcctaagaagccttccaagtcagaccgcgagcagaaagtgaaaaacgtgtgaaaaacgtcagccagtgattgcttggtcctctcgctctatcaagtgtgtagtgtgtcttcgaaagtttgtaaagcctactgctgctgctgtatatactgatatcg

SEQ ID NO: 279 - DNA, 373 bp, Zea mays
tcctagagagcgcatgcaagatggttactgaacaatttgcttcgagtggcttcagtatctccaaccctgatctcccggagatatcccctggaggggtcatgtgtggctccacggacacgttgggctcgtcggtgttgaaccagctttctgtgagctccatcgactcgcacagtccaggaggcaaaccttctccatcaggcatggaaggtccgacactgctccagaaatcgcctgagctcaagcggaggtcctcttgaactgtgacatcgaattctgaggttggtgatgatggctgtctctgtggagtgtctgaatatggtggtgacaatggaaatggtggcccagtcttgtggtagctgactctctctccagg

SEQ ID NO: 280 - DNA, 779 bp, Zea mays
gaggaaggcaggcactgatggcggcgggcggcggaggcggctcgccggcgccgttcgtgtggaagacgtacacgatggtggaggaccccgggacggcaggggtgatcggctggggcagcggcaacaacagcttcgtcgtcgccgaccccttcgtcttctcgcagacgctgctccccgcgcacttcaagcacaacaacttctccagcttcgtccgccagctcaacacctatgtcagttaaatcacacactccagctagctaaattgattgccgtctctcttctacgagctgaaccctgctcttgggagagcgctggatctgtataaactttggcgtgtgtaccgaatgctcttgctgtgctgtaccaacacaaatttgtaaattggtttttgttggagaaaaaaaaaggaaatatgtaagcttgctacctgcagcgacgaaattcttcaaaacatctttggagatcgaccattcaaaattcgtagacaaacatatggacagagatggagccgcgtatatatatgcaacgaaattctgcagacagttcggtgaatatatgcacggagaaaaattggtttttttgcgcaatttacctatggatttctgcaagaaccgaacacaccgccgtgagaactttataaatcgcgagagccaagagctgcacagctagtactagtacttcccttgccctgacttggtattttcagggcttccgcaaggttgatccggaccggtgggagtcgcccacgcgtcgttcctgcgcggccagacgcacctcct

SEQ ID NO: 281 - DNA, 494 bp, Zea mays
tgataaagagaaggaagccaccatcagctgtggcaccattgcgacagcaacgtgcccctgcttcttgcctggaggttggtgagtttggatttgaggaggagattgataggctgaagcgtgacaagaacattttaatcacagaagtagtaaaactaaggcaggagcagcaaagtactaaagatcatgtgagagccatggaggaaaggctacgagtggctgaacagaagcaggtacagatgatggggttcttggcaagagcaatgcggaacccagagttcttccagcagttggcccagcagcaagacaagaggaaggagctcgaggataccatctcaaagaaaagaaggcggcccattgacaacacaccattctacagtgatggggaaagcgaacagcttgattcacagttgaaaatgttcgagtcaggtgttctcaatgggctcaatgaacctgagctggagaatttagcagtgaacattcaggagcttgggaag

SEQ ID NO: 282 - DNA, 369 bp, Zea mays
  misc_feature (362)..(364): n is a, c, g, or t
ggcagcgattacctgcagccgccaccgccgtacgtgttccccgtcaacagcggcggctactgactgatggcggtctggtagtccagcatctatccgagcgatgtggcgtgcttcgtcgtcgctagttgccccccctcccgagtgacgtgttggactgaagtggcaacggcgccggcggacggtgagcaaccaacccaagataattagctaggaggtggtacaaagtgtaaagcctttggtttaggcaggtctgtggtgatctttaatttgcttgttgcaatgttttccttccctaccctgtcaagtgaatgctacggatcagcggcggcaaaagccgttagctgcagctagtttgccgctgnnnttcat

SEQ ID NO: 283 - DNA, 504 bp, Zea mays
cgtcggcactgcgaggagctcctgggcttcctctcgcgcttcctcgacgtccggcagctcgaccttgggctgctcatgcaggaagacgtgcgagcgggtgccggtgacgacgccgcgccgcgccgcgcaatggtcagccagctggagcgcggcggcgaggaggggaagagcgtgaagctgttcggcgtactcctcaaggacgccgcaaggaagagggccaggtgcgaggaggcggcggccagcgagcggcccattaagatgatcagaatcggcgagccgtggatcggcgtcccgtcgtcgggcccggggcggtgcggcggcgggaattaagtaaggtatggttggaactgatgcgccacggccggccgtgtgacagctttattacagcgagcgcatgttcgagtcgtggatgctttttgtgcgtgtttgtatttgtcatccaaggtgaggttgatggcaaggataattccagtgctgtggtaaaactgtgaaggcagaacacag

SEQ ID NO: 284 - DNA, 655 bp, Zea mays
tcttgccggcgacgtcccctgggagtaagtggaaaccggcaccagcatcccctcctccctcccattcgcagcttcgcacacacaacaacacgtccgcgtcaccccggtcactctcatagaattcccgtctcacgtgcccgggtgccgtcccgcccctgtccgccgcaggatgttcgtggccaccgccaagaggctgcgcgtgctcaagagctccgacgtgccggcctcgtcggtgacggtgagtccccgtgggggccctgaccgtccgtttcgcgagtgaagctttcgctcgggcatcgcaggtcccgttcccgtcggtcgattgacacgcacttgtttttgcagctgggagctgggggcccggagaggtctgcagccgactgctgctgctgaaacgtgctctgcttcgtcagctgcttgtaaaaagtcccgagtggaggagacgaggagtggccctatccctggcctcttttttgtgtgttgctcttgctgcctttctgctagtggtactagtattgggtgccagtaaaaagtaggagaacaaagtcatgacggtattaaggatgtaatgtgcaagattagcagtggtagtagtcgtaaggtgtttaatgaatctacggtctctgttttggggcatattcgaccgtttaaagct

SEQ ID NO: 285 - DNA, 917 bp, Zea mays
  misc_feature (728)..(728): n is a, c, g, or t
  misc_feature (758)..(768): n is a, c, g, or t
  misc_feature (818)..(818): n is a, c, g, or t
  misc_feature (846)..(854): n is a, c, g, or t
  misc_feature (859)..(865): n is a, c, g, or t
  misc_feature (873)..(879): n is a, c, g, or t
  misc_feature (888)..(892): n is a, c, g, or t
  misc_feature (902)..(903): n is a, c, g, or t
tcatgatcgaggaggcacttgataatggactgacgaacctgaatgagaaactggtaacaaatccacccagtcagtcgatatcaatgcggttgacgctgcaggtattgtcatccgtgtaataaattctgatatcggttgctttgctgatgcagatggagcactgggaaaggcgtgtgacaaacgtacgagcgtaatctggctaatgattctgtacttgtgaattttatttgaacatgtgtatggttcttttcagttctttccctcatccactgctttgttgcttgttggtttgttgtagactaagatgatggaagacgagaacaaattgctggccttcaaactcgtaagtgtccttgcagagttgaatcccgcgagctgaatttgtacttgaaagttgaaaaggctgaccactctgtcactctgaaaaaaacattttggaatttaagactacctttactttgatgcttaaatgacgcgtgccgcatacagacatacagttttcagagaccaagttaattcactagttaccgctttgctgctgtttaactgtctgacacttagaatgcttgcctgagccaccgttttccttggttgtctgcagcaccagcaagatatcgcgctgagcggcagcatgagagagcttgagctgggttaccatcctgaccgggacctggcggcccagatgccaatcaccttccgcgtgcagcccagccatcccaacttgcagnagaacaattagactgctggatgccctcgtnnnnnnnnnnnaggatttcacccacccaccagcgctggcttgtatgccctcgtgcgctgcnaactgtatctttatctttccggtatgtnnnnnnnnncgtannnnnnntgtcagtnnnnnnngcatgacgnnnnnatgtcgtgcnnctctctctctctct

SEQ ID NO: 286 - DNA, 564 bp, Zea mays
  misc_feature (553)..(557): n is a, c, g, or t
gctggcctcccaccacaacagccactattcccaattcagaatgtgcctactcctatgacatcagcagctgctaatgtacttcaaacatcgtttcctatggcccctccaggagtaccttcacctgttgcccctcatgtttcccagcctttgtttcctgttaacacttcagctgtcaatggagctgtaaattccccatttttagcatctgttgcacctggaaccattccagcaagctctccagcagcagtcggtgttgcaggaattggatatggaaccaataaccaaggtatgttgatcttaaagctcttcctatgtcaatgcactgcaatttggtatattttcgcgaaagggcctctagcgtaatggttaaggcttccgagtagcacctccaggttcagggttcgttccccctctggggcgaaattctggcttggttaaaaaaaaacccttgctatgccccgcctgctctcgggttacgtcctgtgcgccatgctccggctgggctgttgcagagtgggcggtgacgacccgctagtgatggggggcagggttnnnnnattttct

SEQ ID NO: 287 - DNA, 839 bp, Zea mays
  misc_feature (771)..(777): n is a, c, g, or t
  misc_feature (787)..(795): n is a, c, g, or t
  misc_feature (804)..(833): n is a, c, g, or t
ctcgatcgccatgtctttcaccggcacgcaggacaagtgcaaagcctgcgacaagacggtccacatcatcgacctcctcaccgccgacggcgtctcgtaccacaagacatgcttcaagtgcagccactgcaagggcgtcctctcggtatgcatgcgtggcctgagctcaactccgcatgcgcattcgccctgcttgcgatgtgtgcggcaatgcgctaatgctcatttgcatcgaaagaaacgaagctttgtttgattcggttcagatcatctcgacagatgaacatgtagaaatacggtctcattttttcatttctgcatgcgtctcctccagattagcagctactcttccatggacggcgtcctgtactgcaagacgcactttgaacagctcttcaaggagacagggaccttctcaaagaactttcaaggtaatctacagctgaatactgtgccccctatgtttctgaacccgtccacagcgcgtgatgctgtaacgctcaactctggtgcctgatgcaatgcaatgcaattcggaccctttaatttcgttgtgttaattactcaggtggagcatcttcaaacaagaacgaccaggtgcggttcctcaaatcttctacacaaatatggctcaaatgctcaataagttctaaaactttattggccatgccatcatcggtaatagctgactacttacgcacgatgccaatctgaaaatctctgcaggcaaaggctccaagcaagctatcatctgcattctctggaactcannnnnnntgcgcggccnnnnnnnnnacagtgtannnnnnnnnnnnnnnnnnnnnnnnnnnnnnctctgc

SEQ ID NO: 288 - DNA, 800 bp, Zea mays
  misc_feature (652)..(652): n is a, c, g, or t
  misc_feature (686)..(687): n is a, c, g, or t
  misc_feature (702)..(702): n is a, c, g, or t
  misc_feature (768)..(769): n is a, c, g, or t
  misc_feature (779)..(788): n is a, c, g, or t
ggagcagtcagcgtgagagatggggaggcagccgtgctgcgacaaggttggcgtgaagaagggcccgtggacggcggaggaggaccagaagctcgtcggcttcctcctcacccacggtcactgctgctggcgcgtcgtccccaagctcgcaggtgagaatttcccgtcaccatgtatgcatgcgatgcgatgtgtgtgactgctgggcggtcgtttctgcttcgccgcgctccggttccctgaccttgactggcatcgtgtgtgtgtgtgcatggttcgtgcgctgcagggttgctgaggtgcgggaagagctgcaggctgcggtggaccaactacctgaggccggacctcaagaggggcctgctctccgacgacgaggagaggctcgtcatcgacctgcacgcgcagctcgggaacaggtgcgtgcgtgcgtgacttgttggactgcgaaattctccatggttttcttgggctctcttctccatcaagcggcctcgggtcgggtctcatgcgacgcggacggactggtcctctgttttcacgcgcctcacaccgcacgacgcaggtggtccaagatcgcggcgcagctaccgggcaggacggacaacgagatcaagaaccactggaacacacacatccgcaagaagctcgnccggatggggatcgaccccgtcacccacctgccnntgcaggaaccgccgnctcctgctcctgctcccgccgagcagcaggagcagagccacaggcagcaagaagaactgcaactgnnagagctgcannnnnnnnnngagcttatcatg

SEQ ID NO: 289 - DNA, 800 bp, Zea mays
  misc_feature (167)..(167): n is a, c, g, or t
  misc_feature (177)..(177): n is a, c, g, or t
  misc_feature (226)..(226): n is a, c, g, or t
  misc_feature (238)..(238): n is a, c, g, or t
  misc_feature (489)..(489): n is a, c, g, or t
  misc_feature (500)..(527): n is a, c, g, or t
  misc_feature (529)..(534): n is a, c, g, or t
  misc_feature (536)..(538): n is a, c, g, or t
  misc_feature (552)..(553): n is a, c, g, or t
  misc_feature (652)..(652): n is a, c, g, or t
  misc_feature (686)..(687): n is a, c, g, or t
  misc_feature (702)..(702): n is a, c, g, or t
  misc_feature (768)..(769): n is a, c, g, or t
  misc_feature (779)..(788): n is a, c, g, or t
ggagcagtcagcgtgagagatggggaggcagccgtgctgcgacaaggttggcgtgaagaagggcccgtggacggcggaggaggaccagaagctcgtcggcttcctcctcacccacggtcactgctgctggcgcgtcgtccccaagctcgcaggtgagaatttcccgncaccatgtangcatgcgatgcgatgtgtgtgactgctgggcggtcgtttctgcttcgcngcgctccggttncctgaccttgactggcatcgtgtgtgtgtgtgcatggttcgtgcgctgcagggttgctgaggtgcgggaagagctgcaggctgcggtggaccaactacctgaggccggacctcaagaggggcctgctctccgacgacgaggagaggctcgtcatcgacctgcacgcgcagctcgggaacaggtgcgtgcgtgcgtgacttgttggactgcgaaattctccatggttttcttgggctctcttctccatcaancggcctcgggnnnnnnnnnnnnnnnnnnnnnnnnnnnngnnnnnngnnntcacgcgcctcacnncgcacgacgcaggtggtccaagatcgcggcgcagctaccgggcaggacggacaacgagatcaagaaccactggaacacacacatccgcaagaagctcgnccggatggggatcgaccccgtcacccacctgccnntgcaggaaccgccgnctcctgctcctgctcccgccgagcagcaggagcagagccacaggcagcaagaagaactgcaactgnnagagctgcannnnnnnnnngagcttatcatg

SEQ ID NO: 290 - DNA, 1245 bp, Zea mays
  misc_feature (750)..(1025): n is a, c, g, or t
  misc_feature (1031)..(1242): n is a, c, g, or t
ccacggacgaggagctcatggtgcactacctcatgaggcaggccgcctccatgccgtgccccgtccccatcatcgccgaggtcaacatctaccagtgcaacccctgggatctccctggtacgtgattctttatttctttcttccctctcttattcgttcattgtcacttgagttgagtcgttcagactagttgtgttattcctagctaatccaaatctgcatcgatcagttgaatctcatatgatttaattattctttcttcctcctgtggtatcgtgttcgttcttcagccaaggcattgttcggcgacaaggagtggtttttcttcagcccccgggaccgcaagtaccccaacggcgcccgccccaaccgcgccgccgggtccgggtactggaaggccaccggcaccgacaaggccatcctgtcgtcgtcgtcgtcgtccacgcccacgagccacggcggcgccaacatcgtcgtcggcgtcaagaaggcgctcgtcttctacggcggcaggccgcccaagggcaccaagacggactggatcatgcacgagtaccgcctctcgggcgcggcggacgacgactgcaagggcagcagcaccaggcgcagagtgtcttcctcctcgtcgtcctccatgagggtgagtgagactttctttttctttttcttcttttttttaattgcacttgcttgcacggctccagacctgactgaagcgtttcgcatggtttcagctggacgactgggtgnnnnnnnnnnnnnnnnnnnnnnnnnnnnnnnnnnnnnnnnnnnnnnnnnnnnnnnnnnnnnnnnnnnnnnnnnnnnnnnnnnnnnnnnnnnnnnnnnnnnnnnnnnnnnnnnnnnnnnnnnnnnnnnnnnnnnnnnnnnnnnnnnnnnnnnnnnnnnnnnnnnnnnnnnnnnnnnnnnnnnnnnnnnnnnnnnnnnnnnnnnnnnnnnnnnnnnnnnnnnnnnnnnnnnnnnnnnnnnnnnnnnnnnnnnnnnnnnnnnnnnnnnnnnnnnnnnnnaaaaannnnnnnnnnnnnnnnnnnnnnnnnnnnnnnnnnnnnnnnnnnnnnnnnnnnnnnnnnnnnnnnnnnnnnnnnnnnnnnnnnnnnnnnnnnnnnnnnnnnnnnnnnnnnnnnnnnnnnnnnnnnnnnnnnnnnnnnnnnnnnnnnnnnnnnnnnnnnnnnnnnnnnnnnnnnnnnnnnnnnnnnnnnnnnnnnnnnnnnnnnnnnnnnnnnnaaa

SEQ ID NO: 291 - DNA, 1245 bp, Zea mays
  misc_feature (167)..(167): n is a, c, g, or t
  misc_feature (185)..(186): n is a, c, g, or t
  misc_feature (190)..(190): n is a, c, g, or t
  misc_feature (195)..(196): n is a, c, g, or t
  misc_feature (222)..(226): n is a, c, g, or t
  misc_feature (241)..(243): n is a, c, g, or t
  misc_feature (250)..(250): n is a, c, g, or t
  misc_feature (255)..(255): n is a, c, g, or t
  misc_feature (258)..(258): n is a, c, g, or t
  misc_feature (268)..(268): n is a, c, g, or t
  misc_feature (343)..(343): n is a, c, g, or t
  misc_feature (422)..(422): n is a, c, g, or t
  misc_feature (433)..(441): n is a, c, g, or t
  misc_feature (453)..(453): n is a, c, g, or t
  misc_feature (456)..(466): n is a, c, g, or t
  misc_feature (470)..(470): n is a, c, g, or t
  misc_feature (593)..(593): n is a, c, g, or t
  misc_feature (597)..(599): n is a, c, g, or t
  misc_feature (622)..(622): n is a, c, g, or t
  misc_feature (625)..(625): n is a, c, g, or t
  misc_feature (644)..(644): n is a, c, g, or t
  misc_feature (650)..(650): n is a, c, g, or t
  misc_feature (656)..(656): n is a, c, g, or t
  misc_feature (750)..(1025): n is a, c, g, or t
  misc_feature (1031)..(1242): n is a, c, g, or t
ccacggacgaggagctcatggtgcactacctcatgaggcaggccgcctccatgccgtgccccgtccccatcatcgccgaggtcaacatctaccagtgcaacccctgggatctccctggtacgtgattctttatttctttcttccctctcttattcgttcattgtcanttgagttgagtcgttcannctanttgtnntattcctagctaatccaaatctgcannnnncagttgaatctcatnnnatttaantattnttncttcctcctntggtatcgtgttcgttcttcagccaaggcattgttcggcgacaaggagtggtttttcttcagcccccgggaccgnaagtaccccaacggcgcccgccccaaccgcgccgccgggtccgggtactggaaggccaccggcaccgacaaggccatcntgtcgtcgtcnnnnnnnnncacgcccacganccnnnnnnnnnnnaacntcgtcgtcggcgtcaagaaggcgctcgtcttctacggcggcaggccgcccaagggcaccaagacggactggatcatgcacgagtaccgcctctcgggcgcggcggacgacgactgcaagggcngcannnccaggcgcagagtgtcttcctcntcntcgtcctccatgagggtgngtgagnctttcnttttctttttcttcttttttttaattgcacttgcttgcacggctccagacctgactgaagcgtttcgcatggtttcagctggacgactgggtgnnnnnnnnnnnnnnnnnnnnnnnnnnnnnnnnnnnnnnnnnnnnnnnnnnnnnnnnnnnnnnnnnnnnnnnnnnnnnnnnnnnnnnnnnnnnnnnnnnnnnnnnnnnnnnnnnnnnnnnnnnnnnnnnnnnnnnnnnnnnnnnnnnnnnnnnnnnnnnnnnnnnnnnnnnnnnnnnnnnnnnnnnnnnnnnnnnnnnnnnnnnnnnnnnnnnnnnnnnnnnnnnnnnnnnnnnnnnnnnnnnnnnnnnnnnnnnnnnnnnnnnnnnnnnnnnnnnnaaaaannnnnnnnnnnnnnnnnnnnnnnnnnnnnnnnnnnnnnnnnnnnnnnnnnnnnnnnnnnnnnnnnnnnnnnnnnnnnnnnnnnnnnnnnnnnnnnnnnnnnnnnnnnnnnnnnnnnnnnnnnnnnnnnnnnnnnnnnnnnnnnnnnnnnnnnnnnnnnnnnnnnnnnnnnnnnnnnnnnnnnnnnnnnnnnnnnnnnnnnnnnnnnnnnnnnaaa

SEQ ID NO: 292 - DNA, 703 bp, Zea mays
  misc_feature (555)..(555): n is a, c, g, or t
  misc_feature (561)..(565): n is a, c, g, or t
  misc_feature (567)..(573): n is a, c, g, or t
  misc_feature (607)..(609): n is a, c, g, or t
  misc_feature (638)..(653): n is a, c, g, or t
  misc_feature (677)..(678): n is a, c, g, or t
  misc_feature (683)..(692): n is a, c, g, or t
gaggcctccccgagctgcgtgcgtcgtcggataaggcagccggcacggcaatgccggttccgcttgctccgtacccagctcctccggcgccattcacgccgcccaatggtaaataataatccttttttttatatatatatcaagagaacgttgggctgtgagaaaaccgtataaaatcaaaccacttttgttcctttttcatcaaggcgtgttgattttcaggggcccagagccagctcgtctgcaccgggtgccggaacctcctcatgtacccagctggtgcgacgtcggtctgctgcgccgtctgcagcaccgtcaccgccgtgccggctccaggtacgccgtacgcgcatggcatgaatcaataatatcacctttgtcaagaacttgcgagcaaataaacacggcgccgtggagccacatttgtgtgtgcagagctagcagtgcaacactgtccctttcgtctctctgttctttttaaccagttaagaagtagcatttgctgcatccataaagttttgtttgcctttttttttgagatgaaggctttcattngctacnnnnncnnnnnnntaggttccatgatagttcaaggggacaactttgnnngtttccctctgaacctcttgcagttctgnnnnnnnnnnnnnnnntggttactggcctctgaaacgtgnngctgnnnnnnnnnncttctgcagga

SEQ ID NO: 293 - DNA, 701 bp, Zea mays
  misc_feature (48)..(50): n is a, c, g, or t
  misc_feature (106)..(108): n is a, c, g, or t
  misc_feature (128)..(133): n is a, c, g, or t
  misc_feature (150)..(157): n is a, c, g, or t
  misc_feature (159)..(165): n is a, c, g, or t
  misc_feature (196)..(197): n is a, c, g, or t
  misc_feature (300)..(301): n is a, c, g, or t
  misc_feature (642)..(647): n is a, c, g, or t
  misc_feature (676)..(678): n is a, c, g, or t
  misc_feature (684)..(690): n is a, c, g, or t
aatttctgctatcatggattgactggccattgaatggaaatctttagnnngagattagtaatacttggctggattactgttttttattacattcactaatatgctnnncagtaaatttctgctaccannnnnnttgaatggaaatctttnnnnnnnngnnnnnnnatgtacctggcattggcaactcttgattttnncttgtcttgtgaactgcagacatgtcaaatgggccactgcctcatttctgccagaatagtatgcaggcacctcaaatacaagtgccccatcaacagtccatcnntaacaatgtggtgcatggtttaaatccttctgccacaggtcttcctttattacatccaagaatgctggctctcccattcaatgctgagcacacttttgggcatccaatgcacccacctctgataaaccaagctaacaatggggctttaagaattctgccatatcaggtggcttcatatctgcaaattgttacccgttcgttttttatatgttcgtttttatatgtcgcccgttagtataaagttgaactgtgtggcgtcaaataaataaaaacggaggtggtatttgctaataacaatactggatgctgaaaaatatgtctacttgaatattttttacgcnnnnnntgcagacttggtaatccggtgcttatatnnnagtttnnnnnnnccattttgggt

SEQ ID NO: 294 - DNA, 858 bp, Zea mays
  misc_feature (752)..(756): n is a, c, g, or t
  misc_feature (785)..(793): n is a, c, g, or t
  misc_feature (800)..(820): n is a, c, g, or t
  misc_feature (827)..(832): n is a, c, g, or t
  misc_feature (838)..(853): n is a, c, g, or t
aaaggagcacctgaagacctgcatttcgagggcccgtgagcatcttgatgaaaaggaaaatgaggattctgtgccaagcaacagagaagcaggtacataacatatttttgttatgcacttaatgatgcaatatctcttaaaatttgttattaccaatatctatttgttaataagatgttgctttttcgcagacaccagatttctttttgaagggcaccttactgtgggacaggaacctccacctccagcatggcttgttgcccagaatttaacgagggaattgagcatactaactgaatcctctggtgatcaagatgggagcaacaacagaacagtgcctagagccgaggagattacacctgctataatgaacctcctagaaaccatatcaggcgacagggatctagaaactgctttggaagaatcactgcaggtgtgcatgaatacttaataatcatttcatgagaatctacttctttagtacattgctaggtcttttgtcagtgcacactgataggccttttaaccaactaaagaagggcgcacaattatatgcttatgatctttagtttatccaatctcatgacaaactagccttgtaaacctaatttgcctgcactcaagtgatagtactgatttgctcaaagcagaggtagtctcatcatgtttttgatggatgaggaaattattctctttaagtttattattattatcttaattggaccttgcatgtagtgggaaaggatctaagnnnnncaatttgtagtcaagcagcttctctatgnnnnnnnnntctaacnnnnnnnnnnnnnnnnnnnnnacatagnnnnnnctatannnnnnnnnnnnnnnnctgat

SEQ ID NO: 295 - DNA, 496 bp, Zea mays
atactgtccaggatcatggcttctctctgtgatttctgtgggaaacaaaggtcaatgatctactgcagatcagatgcggcatcattgtgcttatcatgcgaccgtaatgttcattcagctaatgcactgtctcgacgtcatacaaggacccttctttgtgatcgttgtggttcacagcctgcatcagtccgatgtcttgaggacaacgcatcactttgccaaaactgtgactggaatgggcatgatgcagaatcaggggcttctgggcataaaaggcaagccataaactgctactcagggtgcccatcatctgcagagctttcgagaatctggtcatttattactgatatcccgactgtagcagctgagcccgactatgaggatggactaagcatgatgacaattgatggcagtgacgttactaatcgtcacgatacttcagatgataaaagattgttggaaatagctaacacaacactcatgagcgatccacctt

SEQ ID NO: 296 - DNA, 505 bp, Zea mays
aaacaaggacggtcaaggacgcgctgccgcaggaggtgccgtcctcgccgttcctgccaccgtccggttgggccgtcgaggacctcctcgagctgtcggactacgaatccagcgacaaggcaaggacctaaccatccaaaacctttttttttgtcggcggtgatgatgatgagatcaaccacaagcttttcacgttcttattcttatctcagttttccttttccatctgttttgtgtttgctgttgcagaaagactcgtctcttgggctcaaggagctggagtggttcgaggacatcgacctgttccacgcccattcgccagctaaaactgccatggcggagttcttcgcctcgccgcagccagtgagtaacgccgggttctacaaggcgaacggggcgcgcctgttcaagaagtcacggatggaggtgcctgacgacgacgacgaggactacttcatcgttcctgatcttggctgagaatgagagatctctgcatgattctcca

SEQ ID NO: 297 - DNA, 801 bp, Zea mays
  misc_feature (737)..(746): n is a, c, g, or t
  misc_feature (752)..(753): n is a, c, g, or t
  misc_feature (758)..(758): n is a, c, g, or t
  misc_feature (785)..(796): n is a, c, g, or t
gacactttcagcatttgatgaagataatttgattccctgcttcggatttggtgacggtaatcatttagttgcctttgtctgatgatcacctgatgggtttataataacatgtttaaagcacagtgttgatccagtgcttctgttttcttctgagcagcatcaactcatgatcaggaggtattcagcttttacccagagaaccgcccatgcaatggatttgaagaggcgctagacagatacagagaaatcgttccaactcttcgattagcaggtttgtttagtgaagatttaatataaatgcttttttctatctcttttgtttttctgaatcgaaataaaatttgttctttcataaaagagagaaaaggagcagaattgctattttacatcatattataactagctctttattacatagtactgtggtagctaaaattttagtagttcatcagggagagaagtgcatgctaaagtctgcagttatatttttgtaacaggacctacatcctttgcgccgatgattgagacagcaattggaattgttgacagcactggtggtcaatatcatgttcttctgataatcgcagatggacaggttggtgaacacattgtcattttgtctttgccttcgttttagtcacctgttatttcttatcattaagtggttgtcagcaaagctcttttctagtgcaacattttgtttgtctatccttttttcacttggataaaacttctgnnnnnnnnnnacccgnngtgtngatacacaatctggacagttgagtccnnnnnnnnnnnntacta

SEQ ID NO: 298 - DNA, 403 bp, Zea mays
tcttcggtacctgatgctcagccatcaggttgcccatctgagtctgttattagtaggaggaggtttgagttcatgagaaagagggcctttgaccaggaaagctcttccagatcagtgaacttaagcttaggtcattcaactcctacagatattcgcagaatcagaatgaatgaacaatcactttgtcaacaaataccacgaagcagcagcagaagccatcaggaatcggcaggttcagttaggacaagacgaccttctcctcatgccactaggatgagtgttcctgatggaagagcagatggcgtgctttctctgcacgagtcatccacaaaggatgtacagccagctcaggaacatctttcattggaagaagtctccactgagagttcaataaggccattat

SEQ ID NO: 299 - DNA, 377 bp, Zea mays
cgtcgtcagcgaggcagcaatgaagatcccatctgatctatcgagaggacctgcatgcctgcccggcaacgttgaacaacatgtcgatcgattgtcatggccttggccttattaattgtttctttcttttcttttcttccttttgtttaattatttttgctgttctggttggcgccgccgtggatcggagggatcccccaagccgaaggatgagcttggctggcgcatcgaagcgcatgcaacggatgtgtgcggctttggttctgtaataggacaaccaggggtccttttttcgatctgttattagcggcacaaaaggagctagatgcatgctgaggttgtttcagttcactctccatgtgtgtctgtacaaacga

SEQ ID NO: 300 - DNA, 674 bp, Zea mays
  misc_feature (569)..(570): n is a, c, g, or t
  misc_feature (596)..(599): n is a, c, g, or t
  misc_feature (626)..(634): n is a, c, g, or t
  misc_feature (645)..(657): n is a, c, g, or t
  misc_feature (664)..(671): n is a, c, g, or t
agaagtcctagtccaatgtcttctccaaaccctagagctaatctccctggcaatgggttcagtccttggagcggactacaagaggtaacactaaagaatatatttgcaatcaagtgggtgactcttctgtacttcatacacaaatggatgtgccttttcctctgggagtcctgtcccttaacattgataaaccacatatcttcttgtaactggcaatgctatttcagagtcatgatgaattaatatgaaaagtacattcaaggtgcactggcattcatgttcacatgtgttaatgcgtgcgtgtgtgtgtgtgtgtgttttgtcacaaacactgatgaagtatatatgcttttgcctttatgaacaattcaaaagagattaggttttcctcaaggaaccagcatggactggcaaggagcacccccaagtcctagctcccatgttgtaaagaagattcttcgtctggaggttccagttgattcttatccgaatgtatgccctccaacttgtgcagtttctcttgaagttcacacaaaagaaccattgagctgttttaagtttttttttgnngatatattcttctcttctttcccagnnnnattttgtggggcgcattttaggacctnnnnnnnnntctctaaagcnnnnnnnnnnnnncactggnnnnnnnnttt

SEQ ID NO: 301 - DNA, 779 bp, Zea mays
  misc_feature (750)..(761): n is a, c, g, or t
tacctgctctctcttggtcattgatagaggaaaccaagcaattcgagaaattccactgaacgatgatgactgtgcatatcagtatgaagctggttttccactaggtacatgacacttagctctccactcgtattaattgaccatattttacttctgctctgtaaagccagtcatagggtcactgcattcagcgctcaaatgacagcaaaaatgacaagggacctgtaaaaattgactagtaattacttttgattttgaatgctcacagggtttgcattgctttgtgctgctggtttctttggttatatgcttgcattgctccaacaccggcttttaggaatgccgtcaacaatcaatgtaagtttgtggtacttttttagaatttataactagtgtttggaccacagtttgtaggcttgctctaagccagcactctgctacatgcatatttcaccatcaacctttggttacgctacagctaatattcttagattaatcttgtggctggctagctgcagcctgtgcactcgatatgtctgataccagtcctcacagctgctagaactggatgtgtgccataacatttaaaatgcaaaccttgtatggttcaagtaatagatgtttagatgatatttcagcttttgataactgattctgttagttagataattgaacaatgataatgtactgattctgaagtcaacctctagtctagtggttaaaggcttcggagtagcacctttaagtctnnnnnnnnnnnnccccgggggcaaattttt

SEQ ID NO: 302 - DNA, 629 bp, Zea mays
cgctgtctcgacgcatggcggctcccgtcctcgtcctcatgctcctcctcgtcgccacaggtgcccgactcaactcctcgttgctcgtcagtgctgcttgagtgacccttcaaagtaaagttcacagtaatgcgacgcgcttggtgttgtaatgcttaatttgagtgtggccggccggtgcagagctggggacgaccaaggtggcggaggcgaggcactgcctgtcgcagagccaccggttcaagggcctgtgcatgagcagcaacaactgcgccaacgtgtgccagaccgagaacttccccggcggcgagtgtaaggcggagggcgccacgcgcaagtgcttctgcaagaagatatgctagtagtagcctcggctttgcttgctggcacaagcaggtcgtcggcacgcaacgcaattcaagcatcatatcggtcctcctcccgcgttgctgtctactcgaccccgttttctctttcgatcgatttcgttgtttcctgttgctctcttcttttcccgcgaataatatgctccatgggatctcactgttgtactttctgcatccgttggtagtcaggacgatccttcttcccgctgtcacgtgtgattcaaaatggatgtactaatgcaa

SEQ ID NO: 303 - DNA, 264 bp, Zea mays
tgcagaaactggagactgactgcaccctggagtggatcgaaaatcacagtgcctgcgaaattcatactcagcaagaacgacgtcggcctgcagtccttcggaaccgagaagtacgtcaagagtggcgctctgaaggagaacgttccagaccttgaggtttcgatcatcgaggggcaccatttcgtccagcaggaagaggccgggacagtgaattcggaaatactctccttccttgacaagtttcccagcgagggaggatcagcg

SEQ ID NO: 304 - DNA, 407 bp, Zea mays
gccgccaagaagaggcgcgcgaggaagctcagcgacgagttcgaccgcatcgccgcggagcagcagcagcagctggtgttggagagcaagcagaagccgggtgccgcgacgccggcgacgacgtcaacaaagaggaaggctaccgtgccgagggcttcgccaaagaggaaggcttctgtacccgctgctggggcgccggcgaggttgtcgccaaagaggaaggctgctgcaacagccgcggcgcccttgtcggcggctgggtcaaggaggacctcgccgaggaataagcactgagtggtggtcgccgtatgtgctgctctagttcctgatctgtttcttggcgatcgtggagtcctgaaaatgtattgtgtggttgggtgtctactgctggattgaaacgatgatga

SEQ ID NO: 305 - DNA, 512 bp, Zea mays
atgttctatcactagaagaggggaagtctttccctccagatgcattgctgaagaaaatcgagggaatgagaactgaccaggctattgcagaagtcttatgttggtcagaagatccagcagaaatccaaaggttggcaacacacaaggaggttatatatcaaaaactccaaggtggatactaccagctgcgaccacatgtgcttgatttcttgaacacccttgtgggttttgacattccaatagcaattgcagctcctcgctcaaggaagagccttgaagaagggatcaaaactgttggtctgcaaggctacttcgatgctatagtggcattggaggacttctgcctagggaaacctgatggtgagatgtttgaagtcgcagcggagcaacttggtctggagccagatgcctgtgttgtgtttggcaactcaaacttgacgacggaatctgcacataacgctgggatgaggtgtgtggcagttgcaggccgacaccctgcctatgagctccaa

SEQ ID NO: 306 - DNA, 622 bp, Zea mays
ccctgtttggaggtaacacatctgcgttctcgcgttgcttgtattgttttcctggctcggctgggagagagatcgtttggaggttgaaattcactcgagccgaagcccccgattgctttgaatggtgtaatcgccttcttggggggtctgaattgtggttgtggatcgatgtttcctctgcttcccgcagcaaattccgatggcgaccggcgagaccgccgtggatcgtcgcgaggaccaccgcgacatggatttgtcaggggaggagcacgtgcggcccaaggtacagcggcggcgaatcgcgggccgcggccgcagattccgtggcgatccgcgtgttctcactcttccttccttccacgcttgcctgaccaggcgcggaagccgtacacgatcacgaagcggcgggagaggtggacggaggacgagcacggtcagttcctcgaggccctgcagctgcacggtcgcgcctggcgccgcatacaaggtacccagccgcggagccgcccttctcgttccttcttcatcaggacgaggagaggcactcacactcttcttctctgctcgtgcgtgcgtgcgtgcgtgcgtgcagtgcacatcggcaccaagactgccgtgcaaa

SEQ ID NO: 307 - DNA, 1247 bp, Zea mays
  misc_feature (1225)..(1231): n is a, c, g, or t
tggatacttcgaaatgacaaatcttcctccaaaggtatttgttattgcagtgcagcatttatcagaatgtcacttgtcccaagtaccattgaaaagttcataggtaggtaaagtcaactgtagtgtaattgtaatcaatagggtctactggagttatgccaccacgatgtgcatttacaactgatttcatttctagtctaaactgtagagtagtggtaaacgctctaaaaaacctttaaactttgccagttaagatttcccctttaaacaagctaggcacttaaataaggcttatgctagattctattgtgacactttgaatgtcattttctggatacctgaatataattttttaaggtctgatggtagccattctttcaatttgagcttgcagacagtagatgagatctacaaggttgcatcaatagtactgagtccgaatgttcccgggcaaatctttgtaagtgaaacacggcttaatgttttattcttttgctcttccactgaacccggtactctgttttggaacaacatatgtttggaccacctacaccaattgttcttaaagctttgtttctttgctttaccaaactacagagcgtagttgcttaagtctgccttttacagatgggagtgatggttaaccctcctaaacctggagatatctcatacccgaagttcactgccgaaaggttaaacatactgcccctcagaggttttagtccgcgttcagcttcagtagaaaaacgaacatatgcgagatattgaacacttaatttttttttgtacatttgtaagtttgatgtttgatgtggccccaaatgattatgattatgatgttgcagcaagtccatcctcgaatctttgaggaggagagcgcgcatgatgacagacggtttcaacagctgccgaaacgtggtgtgcaatttcacagaaggtaagcatcaagatttctgttggtttgcagcgaatagagtgtggtttatttttgtgactggttgtgttgctgcaggagctatgtactctttcccccaaatacagctgccagcaagagccatcgaggcggcaaagagagccggcaaagcagcagacgttttctactgcctcaagctcctggaggcaacggggatttccactgttccgggatctggttttgggcagaaggaagggtatgagtatatatatatgatgatgatgatgagttatctgtgagtgctggatgaannnnnnnagtgatgggtttattt

SEQ ID NO: 308 - DNA, 1249 bp, Zea mays
  misc_feature (105)..(105): n is a, c, g, or t
  misc_feature (118)..(118): n is a, c, g, or t
  misc_feature (243)..(243): n is a, c, g, or t
  misc_feature (246)..(246): n is a, c, g, or t
  misc_feature (364)..(364): n is a, c, g, or t
  misc_feature (466)..(466): n is a, c, g, or t
  misc_feature (478)..(478): n is a, c, g, or t
  misc_feature (597)..(597): n is a, c, g, or t
  misc_feature (612)..(612): n is a, c, g, or t
  misc_feature (614)..(614): n is a, c, g, or t
  misc_feature (617)..(618): n is a, c, g, or t
  misc_feature (727)..(727): n is a, c, g, or t
  misc_feature (730)..(730): n is a, c, g, or t
  misc_feature (778)..(779): n is a, c, g, or t
  misc_feature (785)..(785): n is a, c, g, or t
  misc_feature (807)..(813): n is a, c, g, or t
  misc_feature (833)..(838): n is a, c, g, or t
  misc_feature (1177)..(1177): n is a, c, g, or t
  misc_feature (1179)..(1179): n is a, c, g, or t
  misc_feature (1186)..(1189): n is a, c, g, or t
  misc_feature (1199)..(1199): n is a, c, g, or t
  misc_feature (1227)..(1233): n is a, c, g, or t
tggatacttcgaaatgacaaatcttcctccaaaggtatttgttattgcagtgcagcatttatcagaatgtcacttgtcccaagtaccattgaaaagttcataggnaggtaaagtcaantgtagtgtaattgtaatcaatagggtctactggagttatgccaccacgatgtgcatttacaactgatttcatttctagtctaaactgtagagtagtggtaaacgctctaaaaaacctttaaactntgncagttaagatttcccctttaaacaagctaggcacttaaataaggcttatgctagattctattgtgacactttgaatgtcattttctggatacctgaatataattttttaaggtctganggtagccattctttcaatttgagcttgcagacagtagatgagatctacaaggttgcatcaatagtactgagtccgaatgttcccgggcaaatctttgtaagngaaacacggctnaatgttttattcttttgctcttccactgaacccggtactctgttttggaacaacatatgtttggaccacctacaccaattgttcttaaagctttgtttctttgctttaccaaactacanagcgtagttgcttangnctnncttttacagatgggagtgatggttaaccctcctaaacctggagatatctcatacccgaagttcactgccgaaaggttaaacatactgcccctcagaggttttagtccgngtncagcttcagtagaaaaacgaacatatgcgagatattgaacacttaatnntttttngtacatttgtaagtttgatgtnnnnnnnggccccaaatgattatgatnnnnnngttgcagcaagtccatcctcgaatctttgaggaggagagcgcgcatgatgacagacggtttcaacagctgccgaaacgtggtgtgcaatttcacagaaggtaagcatcaagatttctgttggtttgcagcgaatagagtgtgtggtttatttttgtgactggttgtgttgctgcaggagctatgtactctttcccccaaatacagctgccagcaagagccatcgaggcggcaaagagagccggcaaagcagcagacgttttctactgcctcaagctcctggaggcaacggggatttccactgttccgggatctggttttgggcagaaggaagggtatgngnatatatnnnngatgatgatnatgagttatctgtgagtgctggatgaannnnnnnagtgatgggtttattt

SEQ ID NO: 309 - DNA, 594 bp, Zea mays
tgtcgctgccggtgggtcacaagtgtatcctgcctctgcctatccgcctgcagcaacagtagctcctgcttctgttgtatctgctggtttacagtcagggcagccattcccagccaatcctggtcatatgagtgctcagcaccagattgtctaccaacaagctcaacaattccaccaacagctccagcagcaacaacaacagcagcttcagcagttctgggttgaacgcatgactgaaattgaggcgacgactgatttcaagaaccacaacttgccacttgcgaggataaagaagatcatgaaggccgatgaagatgttcgcatgatctcagctgaagctcctgtagtctttgcaaaagcttgtgagatattcatactggagctgacacttaggtcgtggatgcacactgaggagaacaagcgccgcaccttgcaaaagaatgacattgcagcagcgatcactaggactgacatttatgacttcttggtcgacattgttcccagggatgagatgaaggaggacggaattgggcttcctagggctggtctgccacccatgggagccccagctgatgcatatccatactactacat

SEQ ID NO: 310 - DNA, 512 bp, Zea mays
acgatgagcggcgccggtccggatctgcagctgccaccggggttccggttccacccgacggacgaggagctggtgatgcactacctctgccgccgctgcgccggcctgcccatcgccgtccccatcatcgccgagatcgacctctacaagttcgacccatggcagctcccaagtacgtcccgtcgtcctcggtcttcttgcagcagcagtagcagccgtgaaccaatttcctgtgcggccgtgacgatggcgagctaatcgatcgattgctaactctctgtgtgcagggatggcgctgtacggcgagaaggagtggtacttcttctccccgcgggaccgcaagtacccgaacgggtccaggcccaaccgcgccgccggggctgggtactggaaggccaccggcgctgacaagcccgtgggcacgcccaagccgctggccatcaagaaggcgctcgtcttctacgccggcaaggcgcccaagggcgagaagaccaactggatcatgcacgagt

SEQ ID NO: 311 - DNA, 1271 bp, Zea mays
atcactcctgtgcgcaaaaatggatacagaaaaagaacaaggacgctgtcattacttgaaggtggcgaggggagatcctgctgtcgtgaagtacgaagcaagatctacatgcaggtcatcatacatgctcaggaacggatggtcctgcatcgaagatggcaggaagggaagggcaagataagtgccttagttttgcagacgattcctgaaatgaaatgaagatgtggagctgtttttcggcttaccaataaggcttgtgctgatgacctgtcattagcatccttctggagactgcaaatcgcaatgaaaacatatgcatcagatagtagtaaccttctctggacagattacatagttggacagactcgcagattgagaataccaagacacatcaattatagatggaaacatatgatccaaactttcttgatgttacccttctacatgcttctccgtgcatatgtaatatacaaagcaggcattttgacttgagcaataaaaccatgaacaaggaatgcaagcacccctatgatggcattttaaaataggagtagatcaaaattgccgatgccaaaacaattgctaacatgtggagtagcttaaccacaggtaagggtgtccataggccggcaagaactcctgccacttgttcaaggaaaaagggtgtctataggcagcgttggtataaagcagtaagattaccatgcagaaatgaacccacagaattctggtgaaaactgatccggcggcgcagaaggtggcggttgatcaacaacagccacgagaagttcgtagaagctttcacaaggaggaaatggaaagatgccggttgcacattccagtatcactagtcccaaactccagatatcactcatagaaccatgtttctttccatcgattctttctggctgtcaagaacataaaaaaatgctttaggccatcagagctaataaaatacaatttatttcactccaagctaaaaaacacatttgtgagctgaaaatcttgcactaaccgccatgtagttgcgtgtgccaataaatgtatctcgttgcgaagaggaactagatataatggcactcacaccaaaatctgatatttttacttcacccctatgatttatcaatatatttgatggtttcagatctcggtgtataacgcgcttctcgttatgcaaatagatcagtccttttagcatctgcacaaggaaggcgcaatttcaattataaggttcatgtaatgatagtgtagcattttagttttagcggaaa

SEQ ID NO: 312 - DNA, 790 bp, Zea mays
gtcttcacaagttctgctgctcttgtatttcagaaagcaagcgtgaatcttgaggggatgcagctattggcttaggatgtttttctctgtaagcgtgcttgagttctgaaagcctcgtaagctcctctatgacaagtttatcagcttcctggatcttgtcagggtcatatggggtgtgggcttcctgcagctgaatgtaggcggattttaaagaggatatgttgttgaatatcctcccgatcacagtgtccattgagtccccgttctgattcatgttatcgtcgattggttgaggatggactctttgattattgttatcataattttgcgagtcctttgagcctgggcggatcattacttcttgccctcaggatcatagaagttagtaatcttcaaattgtcaaccaaaaaatcggcatcaacctgcaaagcaactactcggttcagctcgcaaatttttagaacaagagatacagatttgatggtagtagttcagcctgtgttgtccggccaacgtatggattgtttgaaagatcaaagctatccaattcccttccctctatatatgcaggtagatttcccagattgacaagcttccctgttgcacacatatcacagacacatggtactgactagagagtggtcccaaagcgaagcaaggaccacgtgaaacctaagcatacattgattacatccgaagtatagtctacagcagcctgcagctctagtgctaatcaacagcggcacggatgcacaaaggagggaacccaggatgtgtgcacccgatgat

SEQ ID NO: 313 - DNA, 785 bp, Zea mays
  misc_feature (724)..(726): n is a, c, g, or t
gagaaggtctccagagggcagggtctcctgttaaagctcagccgagttcatctcgagctgcatcatgtaataacaagccaagactgaggtggactctggagctccatgagcttttcgtgaaggctgtcaacaagcttggagggccagaaagtagggtgatccttctttgtactccgatttaaatagatccacacagttttggtgtccaagcaaactgttaatgtatgggtggtacaaaaccaaatcttgcagaggcaactcctaagggcgtgttgaggcttatgaaggtagaaggcttgaccatctatcatgtgaagagccatttgcaggtattttgggtggagtttcttcactttcctcctgtatagtataaaacagccatcgtttctgaattctgatggactgtcgtccattttgtcctggaatgcagaagtatcgttttgccaagtatcttccggagacaaaagaaggtacattttcagaagcttaaagttgcaattcatgcctatctttaattaagtgctggccatcgctttgtgttggaaattcgccctgatgaacttgcttgttggttcttttgcatgctcgatgaagacatgaagtcctcttcagaagacaagatatccaaatcagagatgcctggaagcaacgctggcagaaagaagtaagcatcccacccctacccctagtacaaacatctcttttttgtgtgaatgaacaaacnnngaacaatttaaatccacatctttttttttaggattctcaaaagcttacaagtagcagaa

SEQ ID NO: 314 - DNA, 712 bp, Zea mays
agcacttgccaccaaggtttggttctagtaatctgttcttgtaccatttttattattgtttgttgttatgctgtacatacttcacctttatgtgtataaactatgaactggtcattaaacttcgaattggacagtaggtcatcttagatatatttgtgaaacaatcattaacttagttttgttaatttgacaggctgcccgtaagtctgcacccacaactgggggagtaaagaagcctcatcgttaccgccctggaactgttgctcttcggtgggcgatacatgattcttttgattgtttactgtttattacacttcaaataagtgtgccctactgacaagatcacaattgttctccctgactttgcagtgaaatccgcaagtatcagaagagcactgacctgctcataaggaagcttccgttccaaaggcttgtcagggagattgcccaggatttcaaggtgagatttcattttcataccgtcatgtaatctaggaattctgaagtaaacgtagaagtgcacttctcaacccgttgtatttgtgcagactgatcttcgtttccagagccatgcggtgcttgcgctgcaggaggctgcggaggcgtacctggtgggtctattcgaggacactaatctgtgcgccatccatgccaagcgcgtgaccatcatgcccaaggacattcagctggctaggaggatccgtggtgaaag

SEQ ID NO: 315 - DNA, 485 bp, Zea mays
ctatgccgcatctgtgatgtatggctatttcctgaagagagttgatcagaggtttcagctcgagaagacaatgaagagcctcccttggggatcagaagaggaagacggcgctttgtatcaagttatgacgaccgactcgatgccttcagctcagtcttctagctctcacccagagatgggctcctggaccgccgcgcctgacttcaacgcaggaggtcctagcgaatctatcaagccttgtcgccttaggtcgtatgtcatgtcattcgatccagatacgcttcagaggtatgcaacggtcaggtcaaaggaggcctttggtatcatcgagaaacacacagaagcgctatttgggaaagcagagattgtagtcacacctggaggcacggttggttcatccaaggatgagcacattaggataagctttgccgggctgagaaggctggtcctggaggctgttactttcggatcattcctctgggacg

SEQ ID NO: 316 - DNA, 806 bp, Zea mays
tgacgagaaatatcaaactagcttggatgacgtggatgctgcttttggagattcagaagtgagtcagatggaccaataaatctttagccttctgtggtagaaattaagtgagtaactgtgttttactgattcgtttaccaggaccggcatgtgaaagaggaaactgaagatcagccaacctcaatgaatgcattcgaactgatttctctaaaccaggcactgaatctggagaatttgtttgaagcaaaggaggtcagtcatagctctcctgtcttcttggccaattttaggtttccaaattttattaccttactgttatttgaaatgcactataaaaagtataaatctgcaatgatcttatttctggttaaaaatggcaggagtataaaagagagacaagattcacctcacagtgccccccgaaagagataatcacaaagatcgaagaagctgcaaagccgcttggctttgatgttcagaagaaaaaatacaaggtatttcctactgaagtttgttatgtacaatattcctcttgttgctttcgacctatgttgtaaaattttggcttgaatatctagatagtaagtagaactcttgctgccatcttccacatacctcagatcctaataaggctgtgctgtgtctgctctttccagatgcggatggagaacccgaaagcaggtagaaagggcaatctgaatgttgcaactgaggtagctgaaaacatcaacttgacaaaaatcaagattgctgaagcatcgaaagagaataactcaattcctttctgtttgtgcatgccaactctt

SEQ ID NO: 317 - DNA, 623 bp, Zea mays
agtccgctgccaacgccggcggcaacggctccgccttcgtgaaggtcagcatggacggcgcgccctacctgcgcaaggtggacctgaagatgtacaacagctacacggagctctccgttgctctgaagaagatgttcagcaccttcaccacatccggtaaatcacatttaccccgttggcgtaggaatctgcagagcatacagtttgcgaactcatagaagctgcatccatgatccatcttaccagggaacaacatgaatgagggaaaactggttgatccggtcagcggtgctgatgtggtcactacttacgaagacaaggatggcgactggatgctcgttggcgacgtcccgtgggagtatgttctgcattctagtgtgccatcatctaggatgtgatcaggcaaatgttcaggcttcagcttcttatatgctgccttgttgattgttgtccctgcaggatgtttgtcgagtcatgcaggcgtctgaggatcatgaagagttctgaagccataggtcttggttagtgtctccagataaaattatcttccatagttccattataagatttacatgtcaactctaaccgcctatgttttcttcatttttttaaaaaatacagca

SEQ ID NO: 318 - DNA, 566 bp, Zea mays
aaaatcaccaagtagattctgggagacacggtaggggacatgacataacaccaatccagctacacacggatagattattgcttctggtccatgaacgagttgaacaagacaggtctccctccaactagtagtaattaaaacgcgttatatttctagtaggaaaaaaaacggcagcgcactgcaaggggaccattcttttgatacaatgggcaacatctttaacactgcatcttcttcagctcttgttcttgcacttgtccttcgttcttggtgctgtatttttttgcaatgaagaaaaacttaggcggttagagttgacgcattaaaaatcttacaatggaactctggaaggtaattttatctggagacactaaccaagacctatggcttcagaactcttcatgatcctcagacgcttgcatgactcgacaaacatcctgcagggacaagcaatcagcaaggcggcttacaagacagtactggagtctgaacatttgcctgatcattcacgtcctaatcatgggtcagtaaatacgaaagcagacgatggcacgctagaacggaga

SEQ ID NO: 319 - DNA, 480 bp, Zea mays
  misc_feature (466)..(471): n is a, c, g, or t
actgatgatgagacgtctatcgcatgcttgtgctgtgcgtgcgtgcatgcgccagcaaattcttttgttcttttggggtcttatttcttctccaaggcgtccctgcatgggtgtgggcgtgtggtgttgagtattatgtaccttctcccctagcattgtctgtgccaacaatggagcagcagctagcagcaaaccagagacatggcgaggcgaaatatgaagctgcttgcttggaacgagggggagagagagaggaaagctttgtgcatgcgtggaatgatgtgtggtcgctttgttctttttcttttgtgcccctagtaggggtgtgtgtgtgtgtgtgtgtgtgtgtttagcaagacatgcaaaaggagtggagagtcgagttgaatctccatgatgcgtggttgtacaaagccaaagatcactcttctttcttgtctatcagtctattgtctatctatcgatnnnnnncctggtcgt

SEQ ID NO: 320 - DNA, 480 bp, Zea mays
  misc_feature (13)..(13): n is a, c, g, or t
  misc_feature (25)..(26): n is a, c, g, or t
  misc_feature (211)..(211): n is a, c, g, or t
  misc_feature (216)..(216): n is a, c, g, or t
  misc_feature (236)..(238): n is a, c, g, or t
  misc_feature (241)..(243): n is a, c, g, or t
  misc_feature (251)..(251): n is a, c, g, or t
  misc_feature (254)..(263): n is a, c, g, or t
  misc_feature (265)..(271): n is a, c, g, or t
  misc_feature (317)..(317): n is a, c, g, or t
  misc_feature (329)..(329): n is a, c, g, or t
  misc_feature (333)..(333): n is a, c, g, or t
  misc_feature (340)..(349): n is a, c, g, or t
  misc_feature (408)..(408): n is a, c, g, or t
  misc_feature (466)..(471): n is a, c, g, or t
actgatgatgagncgtctatcgcanncttgtgctgtgcgtgcgtgcatgcgccagcaaattcttttgttcttttggggtcttatttcttctccaaggcgtccctgcatgggtgtgggcgtgtggtgttgagtattatgtaccttctcccctagcattgtctgtgccaacaatggagcagcagctagcagcaaaccagagacatggcgaggngaaanatgaagctgcttgcttggannnagnnngagagagngannnnnnnnnngnnnnnnngtggaatgatgtgtggtcgctttgttctttttcttttgtgcccctngtaggggtgtgngtgngtgtgtnnnnnnnnnnttagcaagacatgcaaaaggagtggagagtcgagttgaatctccatgatgcgtggttgnacaaagccaaagatcactcttctttcttgtctatcagtctattgtctatctatcgatnnnnnncctggtcgt

SEQ ID NO: 321 - DNA, 371 bp, Zea mays
agctgcttgcttggattggaacgagggggcggagatggagagagatagaaaagctttagagggtgtttggtttctacatactaatttttagtccctacattttattccactttagttacaaaattatcaaatatagaaactaaaactctattttagtttctatatttatcaatttatatactaaaatggaacaaaatgaaggaactaaacattagtccctagaaaccaaacacctccttaatttgtgcatccaaccaagtggagtggagtggaatgatgtgtggtcgctttgttcttttgtttttttaattattttgtggtactagtaggaggggtgttagcaacacaaaaggagtggagtggagttgaga

SEQ ID NO: 322 - DNA, 374 bp, Zea mays
  misc_feature (78)..(78): n is a, c, g, or t
  misc_feature (178)..(182): n is a, c, g, or t
  misc_feature (187)..(188): n is a, c, g, or t
  misc_feature (197)..(198): n is a, c, g, or t
  misc_feature (200)..(202): n is a, c, g, or t
  misc_feature (206)..(209): n is a, c, g, or t
  misc_feature (212)..(212): n is a, c, g, or t
  misc_feature (214)..(222): n is a, c, g, or t
  misc_feature (226)..(227): n is a, c, g, or t
  misc_feature (229)..(229): n is a, c, g, or t
  misc_feature (231)..(235): n is a, c, g, or t
  misc_feature (237)..(237): n is a, c, g, or t
  misc_feature (242)..(242): n is a, c, g, or t
  misc_feature (254)..(254): n is a, c, g, or t
  misc_feature (257)..(261): n is a, c, g, or t
  misc_feature (329)..(329): n is a, c, g, or t
agctgcttgcttggattggaacgagggggcggagatggagagagatagaaaagctttagagggtgtttggtttctacntactaatttttagtccctacattttattccactttagttacaaaattatcaaatatagaaactaaaactctattttagtttctatatttatcaatttatnnnnnaaaanngaacaaaannannnaacnnnncantnnnnnnnnnaaannanannnnncnttaanttgtgcatccanccnnnnngagtggagtggaatgatgtgtggtcgctttgttcttttgttttgtttttaattattttgtggtactantaggaggggtgttagcaacacaaaaggagtggagtggagttgaga

SEQ ID NO: 323 - DNA, 397 bp, Zea mays
  misc_feature (389)..(391): n is a, c, g, or t
attgctggattttcttcagcagttgcagaaaagaaagcaagatatagccgacagtttgcagggcactattgctttcctctcttctgacatcaatgaggtaccccaccagcaatctacaattggccactgtgagaacttcttatccgatggggataaagaggtgtgctctggaactgttgaagagcagagtgattgtggatccaggaagcgttttagacctgagctgcaaggtgttgatatggaggaaaataatcgtagtgttgaagaatgttccagaacagtaccatcctctgagttaatccaggaaagtgttctgtctaaaagctccaggttgatgaagaacttcaaaaaacttgaaacagcctattttctaacaaggtccaagttgnnngaagca

SEQ ID NO: 324 - DNA, 957 bp, Zea mays
agctgtcttgaaggcggaaccgagttttgatgaggccccatggcccactctcacggctgaagctaaagattttgtaaaaaggcttcttaacaaggattaccgcaagagaatgacggctgcacaagctctcagtaagtgcaagattagcttcgcactgcactgtcgcacgccgctatcctgctgcgaagatgcctaacacctttctcgaataaatgacaactgcaggtcatccatggatccgtaattctcaacaagtgaaggttcctttggatatgataatctataagctaatgagagcgtacatcagctcgtcttcgctgcggaagtctgctttgagggtatgcacataatcgaactttggaaagagtatatatgcctaggaactagggttcctttttctggtctgtagtagatgaatgttcccttagcataccttgagctgatggtatatgtatggcttggtaaaccgtacattgctaattatttctatgaatttcgcaggtcctagccaagacgctgacgacagaccaactcttttatgtgagggagcagtttgaattgctgggcccgaacaagaatggttacatctcattgcaaaatctgaaatcggttagtaactagtgtaaccttttgcagttcactacatatattatctctctctctctctctctctctctctctttcaccgtgcaattgctgaaaggtaaatggaacgtgcaggctctagcgaagaactccacggatgcaatgaaggactccagggttgtcgattttgttaacaccgtaagccgccactggactaccttctagtatttgctttagtgttggtaatgagataatcccaaaccaacttactggggggcgcctgtcacgatgctctaggtgtgcgctcttcagtacaggaaactggatttcgaagagtttgctgcttccgccatcagcgtctaccagatggaa

SEQ ID NO: 325 - DNA, 358 bp, Zea mays
cgaagatgctacttcatcacaaattagtaacatcctttcccctcatatagttgataaggtttgagtgtactgagcactaacaaatgcagctcgcgaaagtaagaccctttttcgtcatagaacaagacagctattttaattgcagcactcgtgtgaaaatagatctactctgcatggtggggattggggcgattgaagtgtgtggccttcagctgcacctagttgggcatcccaggaacctagtcaggctcactacagcaagaggcgcatcctttgactaaacatgttggttttatttcttgtggtttgattcttcacttctgttcattgtgttctgccttcactgcaccctattgga

SEQ ID NO: 326 - DNA, 862 bp, Zea mays
  misc_feature (800)..(803): n is a, c, g, or t
  misc_feature (810)..(827): n is a, c, g, or t
  misc_feature (842)..(851): n is a, c, g, or t
ttcttgacttcagcagctaatccttggacaacaggtaaacttcaattggaaagggtaaatggttaatataacagcaaatgccagggccagtgatgcaattatgttatacagcatactctgggtgcaacttcgatattttgctcacaaaagcttctagatcaagtgcttcatcatagttcccattccgtatacacctacaagcataagcctaatgattgtcatgcataattcagcaataatacaacagctgaaactatgcattatgaaaaacaaatgacattgtcattaacagccgactcaaacataaagtaaagagacaagggaatggtaagataaaagttccatacgtgtccatcaatggtgggatttcaagcaagtcaagcaatgtagtgtggttggctagtaatgtttggttaagcttcctctcctccagaatttgttgtgcagactcaacaaactcagtgcagccagatgttaagtttggtatctcctctatctacaatggtgcatgaacaacatggtaaaacatttcaaatcattcttcgaaggccgcatgaacaatagaagtctataatgttagcatatcatatagaaagaaaaaaggaagtgtaataatgagcactgagttaatcctttcatgaagtgtgtttaataaacatactgttggccataacaggtgctcaagatcatctagttcacatcagaatgttgcaaggttacttctgtcctgatacgcatatttgaagatacaggcactgtatttttttcacgaaataattaggctaactatatggaagctnnnntccacannnnnnnnnnnnnnnnnngtcatttttttattnnnnnnnnnnatctatatgac

SEQ ID NO: 327 - DNA, 1144 bp, Zea mays
caaacctctttttgcagttggggaatactgggatagctgtgaatatagcccccctgactaccgactgaactataatcaaggtaacagatttatagtagcattcttactgactacttgagctagtgccatatttttttgtcataagcactcttcagtcccttgattggcagcatgaacgatgaagattaaattttaactattttcactatctaaaacttatgcctttattctagttatagcccccctgactaccgactgctatgtaagttgtctgacatgtgaggggtaatttacagttccaaatttaaggcagtttatttgatttctttctcatatgcttatggatgacactgactagtgtcaaaattacatcctcaaatatgcctagccttcttttgataatgcatgcttgttggtaccagacgttttggtttctttttgtctgccagatatccataggcagaggattattaattggatagataacactggaggactttgtgccgcatttgatttcacgacaaagggcattcttcaggtcagtaatgaattactactgtatgagcaaatatttgtcttaagtgatctttttgagcagttatttttttaccaggaagctgtcaaaggagagttgtggcgtttgcgagattcagaaggaaaaccacctggtgtgatgggatggtggccttcaagatcagttacatttattgaaaatcatgacactgggtccactcaggtataatagtcattctcatccttctttggccgagaccagtagtagctgtgttaatgagctggaatattcaccttttagatgtgctaaaagaatcacaatttcagggtcattggccttttccgtcagatcatattatggaggtactatactttattgactttgtagttctaaattaatttccatggccttggttgcatcagaatcctataatatgtactgttcaattgttctacataaatgttgcttttgtgatcttagaaaacttgatttctttgtaacgactgtagcaccttataaaatatcagaaattatttattttttagactaccttgctattgtgtttttgtagaagtccatttgttgatctgacacatttaagatctttagggatatgcttatatactcacc

SEQ ID NO: 328 - DNA, 520 bp, Zea mays
tgttggtccaccaaactactgcagtgctggagggtttttgttgaagtcctcttcatgttcaccatttctaaattgtcataggctcatagcattgtagctgatcagtcttcaagatcttcctatgagtacatagataaatcatcatcgtatctgtgttaagtatgccaccatggtggggaaaatcttcatccaaagaagtgaaaaagtctgccaaagaaaacctcatcgacacatttcagcgtctcataagttcaaatgagcaaaagggaagcagaaaatcacgaagtagtcgtagacatggtaaagacacagctggtgacaaaggttgctggtccactgcccaatcccgctcaacatccccttcaaaagaggtctctcgatgtcagagctttgcagcagatagaccacatgcacagccacttcctcttcccaaatcacgtgctaaggtgacacgtacttcttctgatattaccaactcaaagtccactttggaaaagcatggcaaaggacaactgcttcc

SEQ ID NO: 329 - DNA, 370 bp, Zea mays
ttttttttcattatttcatttgacactagtgtaagtaaattgggatagtggcagcttagagagagagagagattagtagaaaggcgcccagctcgtagcttttcagctggtggtgcctctggctagtatagagtacatatttttttttcttcttctttgctttatccctttttttttctccctttggatgacatggatgtgcatccagctccagttgttgtcacccagtccagtggactggggtgtctgggatcttggttgctgctacttgctcgccattgccacccagttgctgccgctgctgctgaggtgttgctggcttagtggcttggcttgtatactctgtgttccctgtggctatcggtgcgtg

SEQ ID NO: 330 - DNA, 819 bp, Zea mays
cgcccaagtgcgcacaccacaacaaccactacgacggatccatgaacttcatgcaccgcaccgaggaggtcgactacttcccctccaggtacgacgccgtcaggaacgcgccgaggtacccgatcccgaccgcccacatcgccggccgccgagagaaggtactggtactgcatatcatcaatcaatcaccctgtcgatcatcgtcatcgatcgatagtaataagtagccgctcatcatcgatcacctgtcctgtccgtcgttgctgcagactgtgattagcaaggagaacaacttcaagcagcccggggagaggtaccgcgcgatggacccagcaaggtgcgtgcagtggcgccgtcatcccaattccttcctttctttgccttttcaactggactgtacaacccgtggtcgatataatccgtgctcaccgtcgtatctacactgcaggcaagagcggttcataaccagatgggtcgacgcgctctccgacccccgcctcacccacgagatcaggaccatctggctctccaactggtctcaggtaggtgtaggtgacaacccgcagcttaattattcaggcgatgatgtcatttgctcgctgaactgaacgagctgcactctgaatcgcgctggttgcctcgtccatggatgcaggccgacaggtctctgggccagaagctcgcgagccgcctcagcgccaagccgagcatgtaagatctaccagacaagggcgccgcgcgggggaggacggagctctctgtctgctttcgctcatgcatcatatgcatggaaccaagacaaattactctagcagacta

SEQ ID NO: 331 - DNA, 819 bp, Zea mays
  misc_feature (100)..(100): n is a, c, g, or t
  misc_feature (113)..(113): n is a, c, g, or t
  misc_feature (122)..(122): n is a, c, g, or t
  misc_feature (140)..(140): n is a, c, g, or t
  misc_feature (165)..(168): n is a, c, g, or t
  misc_feature (189)..(190): n is a, c, g, or t
  misc_feature (192)..(193): n is a, c, g, or t
  misc_feature (196)..(196): n is a, c, g, or t
  misc_feature (201)..(203): n is a, c, g, or t
  misc_feature (207)..(237): n is a, c, g, or t
  misc_feature (251)..(251): n is a, c, g, or t
  misc_feature (364)..(364): n is a, c, g, or t
  misc_feature (373)..(373): n is a, c, g, or t
  misc_feature (381)..(381): n is a, c, g, or t
  misc_feature (387)..(387): n is a, c, g, or t
  misc_feature (398)..(406): n is a, c, g, or t
  misc_feature (410)..(416): n is a, c, g, or t
  misc_feature (418)..(424): n is a, c, g, or t
  misc_feature (427)..(433): n is a, c, g, or t
  misc_feature (437)..(442): n is a, c, g, or t
  misc_feature (464)..(464): n is a, c, g, or t
  misc_feature (546)..(555): n is a, c, g, or t
  misc_feature (568)..(568): n is a, c, g, or t
  misc_feature (570)..(571): n is a, c, g, or t
  misc_feature (586)..(588): n is a, c, g, or t
  misc_feature (642)..(642): n is a, c, g, or t
  misc_feature (720)..(720): n is a, c, g, or t
cgcccaagtgcgcacaccacaacaaccactacgacggatccatgaacttcatgcaccgcaccgaggaggtcgactacttcccctccaggtacgacgccgncaggaacgcgccnaggtacccnatcccgaccgcccacatngccggccgccgagagaaggtactgnnnntgcatatcatcaatcaatcanncnntcnatcannntcannnnnnnnnnnnnnnnnnnnnnnnnnnnnnntcgatcacctgtcntgtccgtcgttgctgcagactgtgattagcaaggagaacaacttcaagcagcccggggagaggtaccgcgcgatggacccagcaaggtgcgtgcagtggcgccgtcatcccanttccttccnttctttgncttttnaactggactgnnnnnnnnntggnnnnnnnannnnnnnctnnnnnnngtannnnnnctgcaggcaagagcggttcatnaccagatgggtcgacgcgctctccgacccccgcctcacccacgagatcaggaccatctggctctccaactggtctcaggtannnnnnnnnnacaacccgcagcntnnttattcaggcgatgnnntcatttgctcgctgaactgaacgagctgcactctgaatcgcgctggttgcctcntccatggatgcaggccgacaggtctctgggccagaagctcgcgagccgcctcagcgccaagccgagcatgtaagatcnaccagacaagggcgccgcgcgggggaggacggagctctctgtctgctttcgctcatgcatcatatgcatggaaccaagacaaattactctagcagacta

SEQ ID NO: 332 - DNA, 872 bp, Zea mays
gcttccggaggcattctcttgtggaaaatctggaggataaaacggaaagtggaacaatcagtcagtaactgatgcattctgagctcaaattttcgataagatctgcaaacaagttctttaagtgcccttcaaaaacattttggacagtgggctacaagtatacaactacagtagctgctggtgaaatggaatcatagatgtggacagaaacatgattttaacataagaataccttgtgccacggatgagcctttatctgaggaaacctgaactcagtatagttgggattcatgcatcgtatctcctcacgggttggagtaccaagaacctacaggcacatcacataacaataagaaacaccctggcagaagaatagaatgtctacttcggaacattttgcagtaccttgataatctctaccaactgatcaacagcactctctcccggaaacagtggctgataaataagatccaagaccccaagaggttagaatcacaccatacatgatttggtcaaatcgagatacaaaaatattaggttaatcattatatgaatgcaaccaacctgaccaagaagcaactcagctagaacacaaccagctgaccatatgtctattgaagttgtatactctgtcgctccaaatatgagctctggagcacgataataacgagagcatatgtaagatatgttcggttcaccaggaatctgacaaaacaacatatggaactgattagtatgtggataaaaaaatacagcatacaagtaaagaatctaattgttataacacatgaattacagtcaattccaagattggaacttcggatagaagcaaaagaatcaatgctattacatacaaaagacagccccagaaa

SEQ ID NO: 333 - DNA, 1225 bp, Zea mays
atctgagttgcagcaacttagggatttgagcagggtcaatcaggaactacttgtccagactgaagagcttctacagaaggaggcgaatgaagacgctcaatttcgtacacaatttgggagtcgttggactagacctcaatcaagcaccctaacaaagaatattcaggatagattgaatctgtttgcttctaatttgaagagagctgctgatagtgattctctgattgaacgaggcgtgaaggagaactattcattgatgtctatccttgacaaaaggccggtgagagttcaacattagtatataacatgaaactagaagtataattaggatttaacatatgagtggattacttatctttatttgcttcccaatgaaccgtacctctcttctgtgatcatcattttattcttcatatctagatagttacatgtacctgttgtctgttgcagatagagtctgcacttccaagtatttccaggcctatcatgtccttggatggaaatgaagatgccattgttggagccctgaaacaaagcttggtaatgtacagtagtttctatagctagtagaacatgcagtaaaacttcttttttaacttggcaaaacttgcttttatttgtcaacagagacaactggagtctcttggcgcacaaagggcaggtcttgaagacatgctcaaagaaatgaaaagaaaggtgcaactattgttcctgtatctttcactataggtctttttgcacaagatttttcttggtcttacatgtagaatacattcgtctggtgctagcactgaacagtagctatgggtctgttttaccttcttagcgatcatgcttaaagttccaagttttaatgttcttgacttcttggagtgctgtattagtactaattcatcatgggctcctatgactgtgagtgtctgtgttctgttttgcgttgccccttccaaattacacttgacgattgttcaagaaaaaacccacttgacaatattttatggtggtcctgatggattgcttttcaagtttgttagccattaaactagctgaaattcatttgtcgtctttcattacttagaaattagtgataaataactgatgatgtggtcatatactatagtatcttagtgcattgagaagatccattttggccaggatgatatattgcctaagttgatggttggcgtgggatcacatgatgatctttcaagaaggagatgctaag

SEQ ID NO: 334 - DNA, 1225 bp, Zea mays
  misc_feature (277)..(277): n is a, c, g, or t
  misc_feature (584)..(584): n is a, c, g, or t
atctgagttgcagcaacttagggatttgagcagggtcaatcaggaactacttgtccagactgaagagcttctacagaaggaggcgaatgaagacgctcaatttcgtacacaatttgggagtcgttggactagacctcaatcaagcaccctaacaaagaatattcaggatagattgaatctgtttgcttctaatttgaagagagctgctgatagtgattctctgattgaacgaggcgtgaaggagaactattcattgatgtctatccttgacaaaagnccggtgagagttcaacattagtatataacatgaaactagaagtataattaggatttaacatatgagtggattacttatctttatttgcttcccaatgaaccgtacctctcttctgtgatcatcattttattcttcatatctagatagttacatgtacctgttgtctgttgcagatagagtctgcacttccaagtatttccaggcctatcatgtccttggatggaaatgaagatgccattgttggagccctgaaacaaagcttggtaatgtacagtagtttctatagctagtagaacatgcagtaaancttcttttttaacttggcaaaacttgcttttatttgtcaacagagacaactggagtctcttggcgcacaaagggcaggtcttgaagacatgctcaaagaaatgaaaagaaaggtgcaactattgttcctgtatctttcactataggtctttttgcacaagatttttcttggtcttacatgtagaatacattcgtctggtgctagcactgaacagtagctatgggtctgttttaccttcttagcgatcatgcttaaagttccaagttttaatgttcttgacttcttggagtgctgtattagtactaattcatcatgggctcctatgactgtgagtgtctgtgttctgttttgcgttgccccttccaaattacacttgacgattgttcaagaaaaaacccacttgacaatattttatggtggtcctgatggattgcttttcaagtttgttagccattaaactagctgaaattcatttgtcgtctttcattacttagaaattagtgataaataactgatgatgtggtcatatactatagtatcttagtgcattgagaagatccattttggccaggatgatatattgcctaagttgatggttggcgtgggatcacatgatgatctttcaagaaggagatgctaag

SEQ ID NO: 335 - DNA, 643 bp, Zea mays
  misc_feature (592)..(594): n is a, c, g, or t
  misc_feature (602)..(607): n is a, c, g, or t
  misc_feature (614)..(628): n is a, c, g, or t
gcttgatgctaactctcaagtacttcttcgagagaaacgttacagtgagtggtgaatttggtttatgacattatatgtactgtagttgcatgcttccgttgactgttttaatctcaccacattgcagattaactatccgtttgagaagggtcctctgagtccccgcttccgtggtgagcacgctctcagacgttacgaatctggggaagagcgttgcattgcttgtaaactatgcgaagctgtaagttgtacttatgtttaaagttttcttacttcagattatgaacatcaaatacagccaggaaccagttgtttttctatctttcctgagtagtggttgtcaaatcaaatatctattgtcaaaataccagttacctactggtatttgtgctgccaggatctgagatttttagctgagttggaacgcaaaaccctgattgtgggtccttttgagtttataagagttactatgattttaatattttaatgtatcttgtcttaaaaatatatttgaaacataagtcacttgaaagcaatttttttatcatattgctgcccagtgttttaggtgctccttatcatctttctgttnnntatggagnnnnnncatatannnnnnnnnnnnnnnttttgaagggggcat

SEQ ID NO: 336 - DNA, 777 bp, Zea mays
  misc_feature (768)..(769): n is a, c, g, or t
  misc_feature (771)..(774): n is a, c, g, or t
gcgatggggaatgtaaggatgattcgtcctctcgattgattctgacttcagtctagcctgtttactgataagcactgctgtttgtcatgttgtcagattctcttcgtttctggcgtcttactgaccattgggttgaagccaactgtgcagttcttcaccaagcctaagaatcacaaggtactgatcttctccctgcaaaacccgagctgtttcagttccatttatatttctagctgacaaatgagcctcaaactatgcagggttcaatatttttcgggtttggctttttcctggttctcattggatggcctgtctcaggaatgctggtggagtcgtatggcttcatcacgctcttcaggttggtagtttctttcctgttgttcttgcatgatctacttctacctggcagctgtttctctgttagtatcgtgaaatagaaacatgtgggcattgcatctgactgctgcttaatttcatcacagcggcttctggccaacagctgctgtttacctgcaaaagagcccctccttcggttggatattccaccaccctcttgtgacttcggtatgatcatcatataaactcctaaattcgtcagcttttctttgttccccgtgcttttcttttcaacgctgtttcctgcctgttggaatcttgcagctgatcactcggttcagaggaagacgggtcccggtgtgagtggataggatcaccccgagtccccgagggcatgcgaaatcgcctctactgtacagaagtaggccaatnnannnnatg

SEQ ID NO: 337 - DNA, 514 bp, Zea mays
aaggtcgtgcactactgcgcggcggggtccaagccgtggaggttcacgggcaaggaggcgaacatggacagggaggacatcaacgccctggtgaagaagtggtgggacatctacaacgacgagacgctggacttgaagggcctgccctcgctctcgcccgacgacgacgacgaggtggaggcggtggccaagaagccgcttcgcgcggccctggcggaggccggcacggtcaagtacgtcaccgcgccctcggccgcgtgatcccgtgctctggccttcccccaccgcgcaccgtaccggtggccgcgcgctatagcttgtgtgtgtgtggccatcgcggaacataagaagaatctctcactataaaggccttcgttctgtgtttgcattttggttttggattagggtgtctaatttttcaccagttcctttcccccttgtgtaagtgtggagcttactgtatagcgcccatttcaaggtgctgcaagcgttggtcaggaattgggctagagtg

SEQ ID NO: 338 - DNA, 424 bp, Zea mays
gtctcccgagatcttctccggctataaatttccgccccaattccccaatccagatgcgcaaacatcgaatcgtctcgctcgtggctgccctgctcatactgcttgccctcgccgtatcgtccacccgcaacgcacaggaggattccatggccaacaacaccgggacgttggcgggcggcatcaaggacgtgccggggagcgagaacgaccttcacctccaggaactcgcccgcttcgccgtcgatgagcacaacaagaaggccgtaagccctcaaccccctttgcctgtttgctaccccttctctgtgacgtgcccgtgttctgctggtattgagatcctctgcagttacctcccctgcagttgggtcactgatgtgtgggcccggccatggcattgagcatttgcgatacagacacaaacaaa

SEQ ID NO: 339 - DNA, 605 bp, Zea mays
agagattggaagcaggacttgggggatcatgagaggagttatggcgctggcctcacaaaaggtagaggaatatgccaaggaaggaggagtgggtggctggggagaggattggcaacacagcgagcagaaaagtgagccttaccaaaggtttgagcatgagaccaacggcaacagttggaattcctcccaaaattcttcatcgaagaacaattccagttcttgggacgactgggacgacccaggcaagaaagatgagcctgcgaaaccgcaccagagcagtgactcctgggctggctgggatgatgggaaggatgatggttttgatagccctagttacaacaatcacagcacctccaacaaggggagcaaccaaaacgggacatccggtggcacattttggacagaaggcggcttccgctgaaaccagtctcttttccatagagctatactttcagagttgttacatgccaggaaacgtgagggtccagtggttggtattatttgggatacttaaacagtcgggtgaaagggtttgtgtgttttgtaccatgtctacaactgttattatatctagtgagatatatttctgtggtcagatgccattc

SEQ ID NO: 340 - DNA, 895 bp, Zea mays
  misc_feature (883)..(890): n is a, c, g, or t
caccagaagtggatccagaaagcacatcgcctgtgacattgaacatttgtatgtcagtaggaactaatatccttcaattggggaaacattgaagtagtatcattttattgaaattgaattatataaagtgcagactgaaaatgtaaaaggcgttctggtcggccacaagtgaaacaaactcacatttcctttcaaatcccatggggtctcagaccttatacagaaatagaaaatacatatactgccaattaacaaacatgttttccagtaatgagcagaaatttattgaaagcacaaacagtcaattgcccaatatttcgttttcattcggtgtatgctgcacaggaagcaacatctgctcctaaatccacggtcaagactcaagaataatccgaaaagtgattgagctactacttgcagtataatatataagtccaatttctcaaatcaatggccaagagatcacaatcctaaggtgatgttacctataatgatcatgtacacaatcatgacgccgacgttgttgatgacgacgcagacctggagcagcctcctaccccaccatccgaaggcgtcggccatggccgcgctgtaggagcgcgcgcccgcggcccggctgaaccgcacgagcagctcgatggaggcgtcggtgaggagcgcggcgagcactatcatgacgagcccagggacgagaccgagcaccttcatggtggccggtagcgccatgatgcccgcgccgacgatggtggtggagaggttgaacaccgcgccggcgaaggaggcgccgtcgaactcgtggaacgcggaggcacctgcgtcgtcctcgtccccgtccccatcccgcttcgtggggagcagcgggtcgctggcccccgggaagtgnnnnnnnngaaca

SEQ ID NO: 341 - DNA, 612 bp, Zea mays
actggctctcttcctgatggccgggagcttgaccgcatcgacaacccccaggtgcgtgcgtgcagcctttttttttagcttctgaatacacgacgccgcctagtaatgaataatgatagatagataatactgaacactgatgcactgtcatggcaatcaatgtcagtttgaaggctacaagttcgacccgcatggggagtacgtccggcgatggattcctgagctcgcaaggctgccgacggagtggatacaccatccatgggacgcgcctgtctccgtgctgcaagctgcaggaatcgagctgggctctaactaccctctccccatagtggagctggacgcggccaagggcaggctgcaagcggccctgtcagagatgtggcagctggaggcggcgtcgagggccaccatgaacaacgggacggaggaaggcctcggcgactcctcggaggtcctgttccctcaagagctgcagatggaggtcgaccggcagccagccccagccgaggcagcagccaacgtgcacgtgcacgtgccgatgcctgcccggaggcgcggggaccagatggtgcccaccatgacgacctcttcgctgaacagagctggaacaga

SEQ ID NO: 342 - DNA, 1303 bp, Zea mays
  misc_feature (1282)..(1298): n is a, c, g, or t
agggactctgggctactggttggacacataatcggataagagtgattgtctcaagtttcgctgtaaaatttctacagataccctggatttggggaatgaagtacttttgggatgtgcttctggatgcagacctagaaagtgatattcttggttggcagtacatatctgggagtttgcctgatggacatgagctcagtcgtcttgataatccagaggtatggaattgtaagaacaatgcattttagctcaaaatctccctcgaactattagttgatgtaaacctctgtgaactcagattcactgctgttatttgattacacaagcacacataaggactcgagtgttttagcgctgcaaagatgcagcttttgtgtttagctgcctgttatttataactgaaatgtttacaagaaagagtcatgctcaagtaaataacagctgcatgtagtggctcctagaaactatagctcacaaatgaggcaactgacccactaactaactacccttatgcctggaagccaggccaacactaactctgaatataagactcgacactaagctacaggttgacactaagttgtcacaaactgtaggattacacaagtttatcaggaacttcagttatgacataattcatagatttaccttgtgtgatgattgctggcactactctttttctgagaaaacatgctgacactatagattcttactcaatattgttcatttgttaacgaaaggatgctcaatagaaacagcataactattttctgcagagcttgatgaattctaaaagaagtgtaattggtagttaatgctaaatcaaggcagttgcaggttagcctcgtctgttgtatttattagtagacaggggttttcatcctagctgcctaattcttaaaagggaaaacaattggcgctgtccactttgtattttttagtgaaaagcgtaattaccatgttcgccttaaattaaatatattgcttcttgtaggttattaatctgacaggatgggttgcccctcggacatgtgtgatattgatatggctacattttttccattttgtcgtccacatattttttttacagtcaccaactccctccagtctaaaatacttcctacttttggctttgcgtagtctttaatgcttatttttgaccactagtttatagaatactagtgtgttctgacttgcattttgttgtatgtgaaagtaggttcagggtcaaaagtacgatccggacggtgaatatgtaagaacttggattcctgaacttgctagnnnnnnnnnnnnnnnnnccata

SEQ ID NO: 343 - DNA, 706 bp, Zea mays
  misc_feature (697)..(698): n is a, c, g, or t
ccgccgccgcgcggtggacacggaagaggccgccgccttcgcggaggagcaggggctcttcttctcggaggcgtccgccctcagcggcgacaacgtcgagcgcgccttcctcacgctgctccgggagatccacgccatcgtgtccaggaagacgctggatgcgtgttagcgacctggaggatgggagtatttcaaccatgggcgccaaaacagagaagaagcagtgaggagccaaaggacactacgacccaacaagcgcttcatagggccggaatggcgtaattgagagaggcccatgagaattagggacgctagctgctagtaaatacagagtctggtgagaggaggagggcatcgaggcacagaaccctgatcccggctgcgtccggtggctggcgctgcgtcgccgtgtacggattccagacattgataaaccacaaagctcttcgagagaggaccttgagcaccgggagcggtgctcaaccaccaaaactctgcttgtgcctacaatgcggcggcagaaaccggcggcaccaccgacgtcctggctctcaagggcaccaagctgtcgcttgctgatgagatatccatcatggagacgagcgccttgagaacagcaagcggcggcagctgctcgtgcacgtgatggtggtgcatgcatatacgattatacatgcatatacagctcatggaattnnaatccgga

SEQ ID NO: 344 - DNA, 649 bp, Zea mays
ccacaaactcatattactcgatacttggcactaaactcagccatatggtaaaatctcgatgaatttgctaatcttcgcagaagccggtgcatcaatcgaaaccaccactaagccagtagatctgtaggtacacgaagagggaagggcaagcaataagctactgctacaagactagatccacacaatttccagcttaatacgaacctgtcgagcccaagaaccctaccagatcttgccctccgccgcctcaaaccccagatccgggtccgccaaggaatgacagcagcccttgggccgcgctggtgccggggggcgcgttgggctcgtcgaggaagaggtcctccggcacccggaacgcgccgtgcgccgcgacgagggccccgccgacgagcagcccggagatgatgagcgacgcgacggaggtgaagaaaagcaggatgaaggacgcgccgacgagccccagcagcgtctcgcggtcggaaaaggttcggccgaagaggacaacaggctggtcggaggggcggaagaggtagaggaagcaccaggcggcgaggaggcccaggaggatgaggagcgagaaggggtgcgccaggagcgaggcccccagcgcgaaggcgaccacggcggcgtagttgacgcggaagtaagc

SEQ ID NO: 345 - DNA, 464 bp, Zea mays
cgaccgcgagacgctgcttggccttaccgtcgcttctgtgctcgccttcttcctcacctccgtggcttcgctcatcatctccgggctgcttgtcaggggcgccattgtcgcagcgcacggcgcctgccgcattccagaggacctcttccttgatgatccgagcgctgcgtccagtggaaacaccaccagcaggctgatctccttccttgcgtcgcccggatctggggtttgatgcatcaaggaccggtaggaaattcttgtgctcggcgaattcagttgaagtcaaatagagatctgatccagaagctgtataaaccagctccttgctcatgtggtacctcacctgcgagtagcattgtataagtggatccgatttttctgttctactttgtgtggaattacgcaaggatctgcaattgctgtacttctcttgcacttcaccagatctggtgacaatgaccatt

SEQ ID NO: 346 - DNA, 641 bp, Zea mays
gtggcccgagatggcgtcccgcaagcgcacctgggtgagtgagttagctgagttctcgtcctccgaccttcggacgcgacaccaccccccccccaatccccatgcatatctatctagtatatatatacgacatgtcatctgaccgtgcgctcgcgactggatgtggatggaacgcaggcaacggtgcagcaggcgatggacgggtgcccgcactggtggatgcgcgaggcgctggagcggctcgtcgcgcggcaagccgtgctgcagtctgccctctgatcgtcgtcatcgactggggtgacaaaagaggcgggaggcgcgagccaccatgtgcgcacgccgccacggctctctctctctctctctcggtgcagcggcaggccggccggcccggcgttccgggtctggaatttggtcgccctcaccggagagtcgaacggcgcgccgcgcggctcgtgtgctctggcgatgctttcttgtgacccatccccccctgaccccgaggcgcggagtcgtcgttggcaaataaaatcatcagatcgtttttagagggcggatggtttagacgaaatggaaaacaaaatctgaactggacgcctagtggaaggaaaagtaatagaacagcagcgcgaaacaattcg

SEQ ID NO: 347 - DNA, 495 bp, Zea mays
acaggatcacgatcgagaagctggtcgagcacccctggttcaagaaggggtacaggccggccgtcatgctggcacagccgcacggctccagcagcctcaaggatgtccaggtcgccttcagcaacgccgaccacaaggacagcagcagcaaggtggaacagccggcggacagctccttgaagccggcgagcctgaacgcgttcgacatcatctcccactccagagggttcgacctgtcaagcctgttcgaggtggaccaagagcagaaggccagcaactcgcggttcatgacccagaagccggcgtcggcgatagtgtcaaagctggagcagatcgctgagacagagcgcttcatggtgaagaaacaggacgggctggtgaagctgcaggggtccaagcaagggaggaaggggcagctcgcgatcgacgccgagatcttcgaggtgacaccggcctttcacgtcgtcgaggtgaagaagtcggcaggcgacacgc

SEQ ID NO: 348 - DNA, 531 bp, Zea mays
atatcttcctttccaagattcaaatttgatggagatgtacagaaagattggaaaagcagatttcaaatgcccaccatggtttccatctgatgtacgcaagttagtgtcaagaattcttgatccaaatccaaggactagaatgccaattacaaaaatagtggaatgcttttggttcaaaaagggcattgacaacaagctaatccgaaagaatatcgagatgaaagggaaagtttcagctctcactgatgttaatgtagttttctcatccacgggtattggtagcaacaataacaaattggttgatgtggaacaagatgtagcgaagattaccaacctgaatgcttttgacattatttccctttcagaaggctttaatctttcaggcttatttgaagagtccgagaaaagaaaagaggcacggttcacatctagtcaatcagcttcaactattatctcaaaactagaagatgctgccacctgttcaaagatgacaataaagaaaaaagaaggtggtgtgctaaaaatggaagg

SEQ ID NO: 349 - DNA, 539 bp, Zea mays
aaatcatggagaatccatggtttaggaagggtttaggtgcaaagctacttaggtacgatttacagaataagaatgcccctcatgtggacaagaatgcagattttgattcactgagcaccaacgtaacaactgagagcaagcaacatgaagaaaagaagcctaccaacatgaatgcatttgatataatctctctatcaactggcttggacctctctggtttatttgaagaatctaacaagaagagagaatccaaattcacatctaccaacacaagctcgacaatcatatcgaagatcgaagatattgcaaagaatttgcggttgaatttgacaaaaaaggatggtggcttgttaaagatggaagcttcaaagcccggaaggaaaggggtaatgggtatcgatgccgaagtatttgaggttagccccaacttccatcttgtggagataaagaagacgaatggcgacactctagagtatcaaaaggtcctgaaccaagaaatgaggcccgcactcaaggaaatagtgtgggcttggcaaggt

SEQ ID NO: 350 - DNA, 620 bp, Zea mays
ttagcaaatctacagaagctctgagattgctctgtgggtgttacagattttcaagggagactgtcagatccccaagtggctttcgcctgccgcgcaggaccttctcaagaggatcctccaaccgaatccgatgaagaggatcaacgtcgcggggatcagggagcacgagtggttcaagaaggactacgtgcctgctgttccgcacgatgatgacgaagacgtccttcccagtccagctccctcgataaaggaggtgtgtaaagctgtgagaggagagagaatgggaggaactactcgattcttttggtttcttgtcttaattaaagctgactgttttggtttcttcttcctgaagccaatcgatgagccggcgcaggagaagtgtactcctatcaacgcttttcagttgatcgggatggcctcttcccttgatctttctggtttcttcgaggaagaggtttgtgttttgttttgtacagttcattgaacgatgataaaaagtgagacatgcatgaaaagtcacctcacttctattctatggttcctggatccattgcaggatgcagcgcaaagaaagattcggttcacttcgacgcacccacccaaggatctatttgaca

SEQ ID NO: 351 - DNA, 334 bp, Zea mays
tcgtctgggcctccagccaggacacaccgggcgccgcttgatgtcgtcgctgtcgctcctgccaccattattgtccttgcccatcaattgctgttggtgtccgtgtagggggggtcgtgctcgtgcattattgtttggtgacgaagtgatgtttgtttgtcgtttgccactctcgtagttgatggtttctgctgtggtgcagcggctgctggcagttgcagttgggctgttgcccgcggggcgcgagcaaagcagaatcagcgggaactagcattcgtatcctgcatgcacgcccataccgtgtcagctctgaagtgggaagaactgtaacaag

SEQ ID NO: 352 - DNA, 339 bp, Zea mays
aggccgagggcacgaacggacggctcgcggccaccgccgaggtgctcgaggtggccgtggacgtggccgtggtcgagttcgtgcacgacgccggggacgcgctggactttaacaagttctgcgccgtcgacgtccgcccggggctcacggagatcgtctgggcgtggcagggcgacagccccgccgccgccgtcggcaccgcgtgaacaagcgtcctctggcgtccccgtctgtgacgtggaagttgtagcaactttgcgtaggagttaaacacggctgcactggcaccagctttttatagcatgtaaagtttcaagttctcgtcgttgcttcgagact

SEQ ID NO: 353 - DNA, 512 bp, Zea mays
cacgacgagacttgaaactttacatgctataaaaagctggtgccagtgcagccgtgtttaactcctacgcaaagttgctacaacttccacgtcacagacggggacgccagaggacgcttgttcacgcggtgccgacggcggcggcggggctgtcgccctgccacgcccagacgatctccgtgagccccgggcggacgtcgacggcgcagaacttgttaaagtccagcgcgtccccggcgtcgtgcacgaactcgaccacggccacgtccacggccacctcgagcacctcggcggtggccgcgagccgtccgttcgtgccctcggccttggcctccatcctcaccttccagcctttccccctggtgacctcgaatcctagggcgcgcgccacggactccagcttctccaccacggtggccgccggcgcgcgggccgtgaacacggtcgcggtcttctgctcgctctcgaacagccccgacaggtcgaacccggaggacatggacgagatgagc

SEQ ID NO: 354 - DNA, 1180 bp, Zea mays
  misc_feature (716)..(717): n is a, c, g, or t
  misc_feature (1124)..(1128): n is a, c, g, or t
  misc_feature (1171)..(1174): n is a, c, g, or t
gttgtagtgcccattcttcttccatctgacgtttaattcttgaagtgcttttaagacctcaaccattatttcacgagggtgggcccgagactgttggttaagtgatacatcaatacaagtgctaggccatacaaagtaaagtaaaatgaacagtatccaatacctgaagtccaagcgcccattttctttcaacaggataatatggccgcaaaccactgctatgaggatcactgcttcctggaacataattcctcgtaccagaactagatgattcagatgacgccagctgatttaaattcctgtcctggagaggcaaccattcaaacatctaatagtgttagaatcatcaatagatcaaataaaccctcaagatcttttttgtttaaacacccaggtgttgttaatgtgtactaaccattgattcttgataatctgccccaagatagccactagttgctctaaaccgattgtccaatagtaaataatatgcaacagttgcctacaaagttttcaaaaatttagtaaacaagtcaccaaaaggaacatataaggctcacaatgcatgtccatacctcattttgaagtctgctgcacagtgattcacacacatggttcttgttaaatcccatattaacaacatctcgaagtgtatcttcatcaatcttcaaaaatgataatgttagaaaatgttagaacattgttaggagaacggtagnnggctagtaagtaaaaatcaatccaatggaaacgcctaaatatccctcaaaaaaggaacgctgcctgaaaaatttagtgctccactcatgtactccgtgagacatacatgctagtggatcggtgttactatacagactacctgcagtaaggaattactccaagatacaacttttgactatagatttctacaacattatgttcaatagatattagatactacagaaacatgcttatagaagtatttttcatggaaaatagatagatgatattctgatatgaacaatatacacatctactttttcctacatattagtggacaaaattagaaactttgaacacaagcatgcaatagcagtatagccacttataactgagaggacataccattttggcttgttgtgtcgtannnnntggaggcactgccaagtaacgtggaaggcgaatctggaaccannnntgctcc

SEQ ID NO: 355 - DNA, 561 bp, Zea mays
ccgttgaagtatgcctctttaagcttcttgaaggacagtgctgtcagaagcgaatcagaccctgcctggtggcagattccaacccttgcaacatcaagcagctcagcaagcttgttcagccctccatggaggctattggagaacctcatcaagtgttttatatcgtagataacaggaaagtaaatcttgatgagatcgaagaatcctggcagcgtatcagggagatttgtgccagtgagtagcttgagcaggtagccaaagtcgtagccgctatgaaaagtcacccaatgcacatctgaattcaatactacgccggaggacatgagcagttcagcaaagcagcgagagtcgactccatcagcagcatggcgagagaagtcaataccactacggcgtagaagatcgatggagtccgctgcagccacatcagtccgagggtcaaatcctcgaaagttgaactgccagacgcagggacgaccgtctgggcctagcgccggcagcccaccatgctcgtcggacaaggtgagcccgagctgaataagcttcagcatgtccacgtta

SEQ ID NO: 356 - DNA, 467 bp, Zea mays
agattccagtctcatccttccctgaggttccagctggtcgaggtacacacttttgcgaaacaaaactactcaaattgttttttatgtgttccatcacctttattctacagtttgtaatccttgatgttttatatgcagtaattgaaattcctggtgatacttctgttattgatgctgtaaggactctctctgaacagaacataagggcagcaccagtactgaattcagaacctggggctcctactgattggcaggggaggtaccttggtgtcatcgattactcggcaatcatcctttgggtactagaaaatgctgagcttgctgctgttgcactctcggctgcatcggcaactgctgctggagttggcatgggtgctgttggtgctgttggggtggcagctttgggagcaactggcccagctgctgtagctggcttaactgcagctgcaattggggcttctgttgct

SEQ ID NO: 357 - DNA, 872 bp, Zea mays
  misc_feature (775)..(780): n is a, c, g, or t
  misc_feature (829)..(834): n is a, c, g, or t
  misc_feature (839)..(850): n is a, c, g, or t
  misc_feature (857)..(866): n is a, c, g, or t
acaaaaggagaccagcggtacgactcaacaatcgatcgaacctgcagtagtaaaagaacaacagatgatcgtcatacaatatttaactagaatagaagagtctgaactaaattgaatcttatcaacaaaacacagtgcaggtaacaataaaaaagcaagatatgtctaaactttaaaccatgggccaacagttgcaatatatgtagggtaaccaaaattccgttcagccacacagcaaaacattaggtcaaatgtgtccctttgagtggacggattcttaaatttgatcaatactaacaaaagaaaacatatttattatttgttcattcagtggttacatgcgtaattgttaaggccaagaccaatggcttactgttgttgatctgaaaggttcctgctgaagtaaaactttgtagaaatcctcccctaaatgatctgcagcagttagcccatccttcgccacacccttttcagcagttaatccaccagcaacagaagccccaattgcagctgcagttaagccagctacagcagctgggccagttgttcccaaagctgccaccccaacagcaccaacagcacccatgccaactccagcagcagttgccgatgcagccgagagtgcaacagcagcaagctcagcattttctagtacccaaaggatgattgccgagtaatcgatgacaccaaggtacctcccctgccaatcagtaggagccccaggttctggattcagtactggtgctgcccttatgttctgttcagagagagtccnnnnnncatcaataacagaagtatcaccaggaatttcaattactgcatataaaannnnnnggatnnnnnnnnnnnnaataaannnnnnnnnnacataa

SEQ ID NO: 358 - DNA, 1000 bp, Zea mays
  misc_feature (986)..(993): n is a, c, g, or t
tgtaattgaacatacatgtggtcttatcaagaataagtacaataatatattgattggaaatattggaaccatgtgtgcatttgttttgaaaggttgaataaatatagtctagttttttttgggttatatataactaggttgaagattatttgtagtcaagcttaagctaaattgtggagaccatgtggatgtgcagaatggcgtgtattcataagttgtcaatatttgaaaccttctgtgcaggggataatggaagcctgtggttttgggactggaagagtggtcataactttcaacaagatcagactatagtccagcctggtaagttttcatttgaatcatgcaggcaccgataataggagataagcaactctgtttcgagtctccacaatgtttttcctcatatgagaggttcttgagaacaccagtatcagaaatgctactggtggcttaaatcagcctaagggcttgttcgttttgctctcaatccatgtgtgctctcaatccatgtggattgggtcgaacaagtcaacatcttttataattttttccaatccatccaatatatatgggaatccaatatatatgggataggaataaccgaacaaagcctaaatgttatcacactgagtccttggttaatccatagcaactagccaaactattccagagttccataatctagatgttacctagattatgttatgtccgttgaaaagtatgcgatttgaaatgatcatgctcattactggtatctcccattttcaggatcactggagagtgaggcatgcatatatgccctctcatatgacgtgagcggatcaaggcttgtgagctgtgaggcggataagactataaagatgtggaaagaggacttgacagcgacgccagagactcatcccatcaatttcaagcccccaaaggacatccgaagatattgatgctcaaatcccacaagtagcaagctagtggatggttggagcctnnnnnnnntgtgtga

SEQ ID NO: 359 - DNA, 395 bp, Zea mays
ccctgcatggcgccacgaccaccatcagagtcagagccatggcggtgaacaaggagacggagcaggacaggtggaggggcctggccttggacacctcggacgaccagcaggacatcaccagggggaagggccgcgtggacccgctgttccaggcgcccatgggggacggcacccacgtcgccgtgctcagctcctacgactacatcagccaggggctcaggcactacagcttggacaacatgatggatggctactacatcgctcccgcgttcatggacaagctcgttgtccacatcgccaagaacttcatgcccctgccaaacatcaaggtgcccctcatcctgggtatctggggaggcaagggccaagggaagtccttccaatgtgagcttgtc

SEQ ID NO: 360 - DNA, 529 bp, Zea mays
acgacgcagtacacggtgaacaaccagatggtgaacgcgacgctgatgaacatcgccgacaaccccaccaacgtgcagctcccggggatgtacaacaaggaggagaacccccgcgtgcccatcatcgtcacgggcaacgacttctcgacgctgtatgcgccgctgatccgcgacgggcgcatggacaagttctactgggctcccacccgcgaggaccgcgtgggcgtgtgcaagggcatcttccgcagcgacggcgtccccgacgaggacgtggtgaggctggtggacgccttcccgggccagtccatcgacttcttcggcgccctccgcgccagggtgtacgacgacgaggtgcggcggtgggtggccgagaccggcgtggagaacatcgccaggaggctcgtcaactccaaggagggcccgcccacgttcgagcagccgaggatgacgctggacaagctcatggagtacgggcgcatgctggtggaggagcaggagaacgtgaagcgcgtgcagctggcagacaagt

SEQ ID NO: 361 - DNA, 350 bp, Zea mays
ccggatgttctcggagagctcaggagcctgcaggagctcatcgtgtctggcaacggcctctgcggcgagttcccgaaatccatcctgcggtgcaggaacctgagcaagctggacttgagctacaatgcgttccgcggtggcctgccggagagcatctgcaacggctcacggatgcagttccttttgctcgaccacaatgagttctctggaggcattccagcaggaatcgggggctgtacccggctgctcgagctgcatctcggtagcaacaacctcagtggtgaaattccagctgagataggcaaggtgaaaagcctgcagattgtgctgaaccttagcttcaatcactt

SEQ ID NO: 362 - DNA, 506 bp, Zea mays
aatgggatgtacaactttggaaggggcaggtttgaggttctgtcagggtatgtcaatgcagtgttcttggttcttgttggtgtgctgattgtgttggagtcgtttgagaggattcttgagcctagggaaatatcaactagtagtcttttgtcagtttcgataggtggacttgttgtaaacataatcggattggtgttctttcatgaggagcaccaccatgctcatggtggtacctgttctcactcacattctcattcacatcatggtcatgaacatcatcaacaccatggccatgaagagcacaaacatcataatcatgatcatcacggtgcgaataatgtgaaggcatgttgtgatcatcatggagatgacaaccatcgccatgatcaccatgggaatagtaaaagtgagggcattcataacaatatcgtggataacacctgcaaggagaagcatggccatgagcatcatcaccatgaacattcggaacattgccatcagagcag

SEQ ID NO: 363 - DNA, 551 bp, Zea mays
ttccgcacagatccgtctataaactccacgttcccatgcgtatgccgtcgacgacggtgttcttgcttgcttcttgtgctcaccatgcagggcaccgtgaagcttgtattccagccggcagaggagggccagggcggcgcgtactacgtgctgcaagaaggcgtccttgacgacgcgtcagccatattcggcttgcacgttgacccggccctccccgtcggcgtcgtttcgtccaggccagggcccttcgcggcgacgtccggtcggttcctggcgacggtcaccggtaaaggcgggcacgccgcgatgccccacgaatccatcgaccctgttgtagctgcagccactactgtcgtcagcctccagaagatcatctcccgagaaatcgatcccctgcagggcgcggtatgcatgtgtttctgcgtcgtcttagctgtgctgtgctgttgttctgggctgtctgactctgcctcatcttcttcgctgatttaaattaaatgtatcaggttgtgtccgtcacttttctcaagggaggagaagcgtacaatgtc

SEQ ID NO: 364 - DNA, 801 bp, Zea mays
ggtaactgatgcttaattaatccggtcaattccgcacagatccgtctataaactccacgttcccatgcgtatgccgtcgacgacggtgttcttgcttgcttcttgtgctcaccatgcagggcaccgtgaagcttgtattccagccggcagaggagggccagggcggcgcgtactacgtgctgcaagaaggcgtccttgacgacgcgtcagccatattcggcttgcacgttgacccggccctccccgtcggcgtcgtttcgtccaggccagggcccttcgcggcgacgtccggtcggttcctggcgacggtcaccggtaaaggcgggcacgccgcgatgccccacgaatccatcgaccctgttgtagctgcagccactactgtcgtcagcctccagaagatcatctcccgggaaatcgatcccctgcagggcgcggtatgcatgtgtttctgcgtcgtcttagctgtgctgtgctgttgttctgagctgtctgactctgcctcatcttcttcgctgatttaaattaaatgtatcaggttgtgtccgtcacttttctgaagggaggagaagcgtacaatgtcatcccagagaatgtggcctttggcggcaccatgaggagcatgacgaatgaaggtctatcgtatctcaagaagaggatcaaagaggtaaaactccgatcctctctcgttacctaacctaacctaaaccgcgcgcacacagttctcttataaaaaacaaaatgctcccttcttcgcaagatcgtcgaaggacaggcagcggtgcaccactgcagtgccagcgt

SEQ ID NO: 365 - DNA, 297 bp, Zea mays
cattgccgccaggggcggcgcacggaacgggactcgtggggagagacgttgttcgggacaagatcgaggagctgctccgtgacagtgagacgaaggcgagggcgctcgcgctgcgggacctcgccagtcgggcagtcggcgatggaggttcgtcgcgccggaatctcaggcagttcttgggccttgtgcgaggatcggagagctaaagctgcaattttggggctactgttgtgtttgcgaatcgcgatgccaggacaaaggtctgcaccgtgaaaaatcctgtttcgatgttctgaa

SEQ ID NO: 366 - DNA, 1104 bp, Zea mays
aacacaaaataaaccctcagctactaaagaggcgtgggtttccaatcgctgtcgaacttccggtgctgcaaaacataggacagtagtaaactgttatagacaaagacgaaaagaacctctggtcctggttgaaattggaacaaagtgactgggatactagtacctctgaaattggcattcgagttctcacagcctcaacttttgacaaatcaagatctgcaactgcaaatccagtggagagccgatctgcaaccacatttttctaatcaagcaattgcatcaatatatgtgtagaaaacagttgtttcacaggttttaggataagagggctctagcacaaacatgcagcatgtaatacacgccaattgtattccacatcaagcatttcaatgtaaaaaaattgatgattgatgcagcattatgaaataacaaacgaggcatttaagtaatcagataaatcttgaacaaagaagtcccagtgaagatacacaaaagaatcctaactcaaaaaagtaaagaggtgaaaagggtatacctggaagtcgagctatcactgtcccccatgggtcaataattatagaatcaccgtaactttctcttttttcattgtgctttccagcttgagcagcagcaataacctgcaaatggtttcgaacactgtgcatcatgttttaaaatcacaacagaaaagcagatgttgcataattggtacagcattaactttttattttatatatatcatgttgccaacaacatcaggcagcatgagataatttgattttcaaatgtgaatgaaatgtgttatgtgtgtcacatgtcactaagaagatagaagggtttgattaacatacataacattgtgtctcaattgcacgagctcggaggagaatttcccagtgtgcctctcccgttatctttgtgaatgcagatggcactagtaatacctatgagacaaaattaagacaggatcacaaaatatacatctgctctacactttctatgataggagggcatccaatataatgaatcatattgactgtgtgaagtatattagaatgtgtaaccacctgtgcttgatgcttaaaacgcaaaatttgataaagc

SEQ ID NO: 367 - DNA, 523 bp, Zea mays
agtagtaataatagcaacacagaagaaacctccaatttccaccgtacccactccaaaccttcccaccctacacttcggcccttttgactgagtagtgtagtgaacgaggccgtcacatggatgatggattatgggcctttctttgaggctgaggcgccaaaaaccactgtcgtatggtataatccatccgtccatcaggttcaggtccacgtgaacgctatcgggctggccacgctgtgcttcccgtccgaccacacgagccgcccgaaaccggcggtgcccgacggctgcgacttggacgtgaacctcaccgtgtagctcttcttctcccccaccgacgtgaactccagctccgccggctccacgtccacggccacgcccttggcagcggcgagcgacgtggacgccttgtacgtgcccgccccgcccacgttggtcagcgtccgcgtgtgtgtcacggtggccgagtccccgccgccgtcgccgttggccgtcgagtaggccaccgagaaggacgggtagt

SEQ ID NO: 368 - DNA, 569 bp, Zea mays
cttcttcctccaatcctcccccccggccctttcccctcttcggcctctctcgctcagctcgctcttcattaagcgagctcacgtcgttcctcccttcttcctcttcttcttcttatccgttgttcaattcgttcagctagccggccagagatcgagcatcatctccatcatcgatcgatccatctcatctctttctcttcttctattctatgtcgtcgtcgtcccagattagatcgaagctgctagcagtctatccagtctctagctagctagatcaagcccgcagactatataatataatacaagctagctacgtgcttattattgctttattagtctagaagaataatctagatatatacgatcgaacatatatctcgatctccaccgatacacacccggccctatccatgcttgaggtgtcgacgctgcgcggccctactagcagcggcagcaaggcggagcagcactgcggcggcggcggcggcttcgtcggcgaccaccatgtggtgttcccgacgtccggcgactgcttcgccatggtggacgacaacctcctggactacatc

SEQ ID NO: 369 - DNA, 607 bp, Zea mays
atcattagaatctttgttatgattgcaaatgggagattaaagtttgattggctaattttgtgaagcttatattccttccgtttctttttagttgtcgctggatagttcaattttgcactattcagctacaactaaaacgaaacagaacgagtataaatgcatgacagataactgttgagttttttttcttcttcttctgaactgtgcatttttttacacagataataagcaatgggatcttcaagagcccagtacatcgggttgtaacaaacgcggagaaagagaggctatcagtggttctgttctattctatagatcctgagagagaaatccggcccgctgacaaactgatagatgagaaccatccagcactatacaagaaggtgaaagtcaaagaatatactgctggactctacgaacatttctctcgagggaaattggttaaagagactgcaaagatatagcttgttcgctttggattaaatccagctatttggactaatccctagagacaaaaacactgtataagtagtaaaagtcggtacgaattaaagcccaagctagtcgtatctatgtaatgaataagggtgaaacctttgcgatccta

SEQ ID NO: 370 - DNA, 334 bp, Zea mays
gcgccccggccctcgccatcaacgccaccatcgagaagaccaagcggcggttcgagaactacggcaagttcggcctgctctgcggcgccgacggcctgccgcacctcatcgtcagcggcgaccagcggcactggggcgagttcgtcaccccgggcctgctcttcctctacatcgccgggtggatcgggtgggtcggcaggagctacctcatcgccatcagcggcgagaagaagcccgccatgagggagatcatcatcgacgtcgagctcgccacccgcctcctccccagggggttcatctggcccgtcgcggcctaccgcgagctcatcaacgg

SEQ ID NO: 371 - DNA, 1195 bp, Zea mays
  misc_feature (928)..(928): n is a, c, g, or t
  misc_feature (931)..(931): n is a, c, g, or t
tgtcttcagttccatgctttgtgtcatctctgtgaatacatgggtgcctatgtttgtttaacttttcatatttttggtaacttgagtattggaaacttattttagtgcaaggtagctaacaggctaagttttcctttttttgtcagtcttagtggagctgtactctccagatcgtcctctggttgatactgcagaggtgtttctgtggcttatggcagttggtaccattctttgtgcatcatactggtcagcatggagtgcccgagaagcagatattgaacaagagaagcttctgaaggttctaaaccccaaatcttgtttgatttctattgctagttttgcgtacttgaaaaaaagggactgacaggttcaatacttgttaggatggtcgtgaagtagcaccaaactttgagcctggaggttctagtggtatggtagatatcaacatggtatccgcaatactgtttgtggtgattgcatcatgcttcttgataacactctacaagctgatgtcccattggtttgtggagcttctggtggttatcttttgcataggtggtgtggaggtgtgtaccatttcattttctttctggtattgcatctgtctgaactgtgcttttgtgcttccaaaaaatcaaatcgcccaaatggtcaaatcccgatgtgctttgataatatactttcacttttgagagaacactgagacacttccatctttatctgtaattcattgttttttgacatgtaagagcagtcataaattgaccaaagaacttcttgttagttttggaatgaccaagtgtgctggtgtgtgggtgtatcaatgtctcgatgagatagcaatatgaattattattgcttctgctgattgttactcataataatgtattgccttccatttcatgagctcccgtgatgttttttcctnttntgtgaagggtctgcaaacatgcttggtggcctcactgtcaatgtcaaggtatgctctgtatttttttttgtttttttctgactcaagatgaatttttagacattttgtagctcccttttatatcagattttacagctatgtgtatttttcttactgttactaagtagaagtcatgggatctttcaggcggtttaaacctgctgcagaatcgtatgtgaaagtgccattttttggagctgtttcataccttacattggcagttgt

SEQ ID NO: 372 - DNA, 861 bp, Zea mays
tgtaaatcctaaaggtatgatactccggactccagtactcaacaagattagtacttcacttatttctaaaaatattttgtgggttcccctccagtgcaagcgtcaattggtgctaatacatgggtggtcagtggaactccacagacaaagagtatgttctcatgacttgcattatctgcttaactagcttctgttaagatgctcttaatggcataatattattgatggcataatattattcattccgttgtgctggctttctacttaactaggtagtaatgatgtcctataatcctgtcacactggcagctggtgctttggttatgcatggcttttgtcaatttgaattttcagggagaaaatttctcttgagctagatttgcacaacagcacaacagtattcttatgaagcatttttcttatttgaacagagctgcaagatctgcttccgtcgattatcaaccagcttggtatgtttctctttactcatgtatacctattgaattcaaaacctatattattagatatatctccttttgtgttcttgatcccatcctttttgctacacagtacttgagaatcactgaaatcttatatataattatgacttgtgagctccataactatgctgtactataaatgattttgttttaccttcgactgttcctccggttcaggtcctgacaacctggacaatctgcggaggctcgcagagcaattccagaagcaggcctctggtgcttctggtgcagaggctggtgccagcgctggggctgttcaggacgatgatgatgacgttcctgagcttgtccctggagagacatttgaggaggccgcggaagagaaaaaggagtcctcatg

SEQ ID NO: 373 - DNA, 406 bp, Zea mays
ctgatattcaccaagcccctgacggagcagcacgcgacggggctcctcctcataaccatgggcatcgtcatcaagctcctgccggagaacaaggagggacgcccgcgccggctgcccaagaatgacgacgacgacaagccccgggagagtagagaagcgggggaggaaacagcatgactgctgctatagacccgacacccgacccgagcaaagcagaactgacgccagctcgatcagcaacagcaaccctagaagaaattctcagtcctccaaaacagcaatccccaggaggaggatgggatatacatgcaggatagagcactacatacagtaataataaccttttttcttcgctcctcccctcgcttttctcatgtgctgtggttaatgttaattgtgcacttcg

SEQ ID NO: 374 - DNA, 769 bp, Zea mays
cgacgatcagatcgtaaccgccgtgtgtaacaatgtgtacgtctgaaagacgcctttggtggtcgtttctgatgtcctaggtctgctgggagaagtttgcaaggtattttgaggtggagctgaaggaggttaagctatcagaagggtactacgtcatggaccccgtcaaggctgttgagatggtggacgagaacactatctgtgtcgcggcgatcttggggtcgactctcaccggagagttcgaggatgtcaagcagttgaacgaccttcttacagagaagaacaaggaaactgggtgagcgttttgttctctgcctgggcttctagctagctagggcattatcttttgaatgcagcatactctgctcttgtttgattctttctgtgaagatgcttacttcccttgttgatgcacgcaaatgaaggtgggacgtgcctatccacgtcgacgccgcgagcggagggttcatagcgccattcctctaccctgagctcgagtgggacttcaggctgcctctggtgaagagcatcaatgtcagcgggcacaagtacggcctcgtctaccctggtgttggctgggtcatctggcggagcaaggatgatctgcctgaggagctcatcttccatatcaactacctggggacggaccagcctacgttcacgctcaacttctccaaaggtatcttcggctccttcctttcaggctcctctgttgtttccttgggtctttctcatggtgcatggaattgagagggactggcgatttctg

SEQ ID NO: 375 - DNA, 512 bp, Zea mays
cctgagtgctcgaacggttgaaggccatccctacctgcagtttgcatcggaagacattggcgacccaagtgtgaggttcatcacctacaaccacaaggtgaacggcaaacgggtggtgcgcttcaagtcgaaccatctcggcaagttctggaggcggagccccaactggatctgggccgacaccgacgacaccagcactaacaactccgacaccctgtttgaggtcatcaagatcgacgaggacgacgtgtacgcgctccggaacctcggcaacaaccacttctgccacaggctgacctacgacggcaaggagagctgcctgaacgccacaattccgaccatcaggaaggaggcgcacatcaagatcgaagaagccgtcctctcccgaaagatctccaacatcgagtaccacctcaagggcgccaagatcttcgacaagaaggccaagaccctcatcactcgagaggcggtgaacggcaccagcacggacagcaagaccaccatcaccctca

SEQ ID NO: 376 - DNA, 1252 bp, Zea mays
caaacttacacagcctgactaatttgggggatcccatggttttggaaccattctggcatatgaaatctttcacgcaatacgggtctgacgtctttctggagggaaagatgcttcaggagtggaaatataaccgtcatgagctggaatgtttagtcaagaaaaaaatcagcgcaatttgttaggctagaagttcaggcccacagaatgacttgtgccatagtcagttacctgatcatcagaatgttgtccagctgaaaatggaacacaaggtattccattcaaaggctgaagaatgaaactgaacggattgttgtcgacaatgacaatcctgccaaaatcttttgacacgcgagtaagatctttcacatgttctctatattccctgcaatcatgcaacccattgatgtcagaccattggcaaacaagtatggtgtaaaacggtcaggcaggaagagaaaaacatcaagaaacgagtgtattatgattgaataactcagtgaatcagcacaaacatgcatagtaaaggaagcatccatagttgtacagaggcaatgacgacagatcaagacacccaataaaaatgcacattgaatatattgtagaagttctggagtgcagatactcggagaacttggttaagataaaatgaatactaaaatttaaacactactagcattccatgtgtacaatgttaacatcattattggttgctgtgtacaagcattgactatgatctgtttttttcccaattgatagagatgctggaatgctaagtttgcagacatcccaataaggtaacaggtctcaacacaagaatatgaagcaacagcacagtggtggtacaacttgatttgtatagtggtaatgtaacttacgtggtaacagttgatgggcgatagagacgaattctgaatctattgtgaacatctattcggtcaactaaaggtctagcataacctgaggagaagcatggataggttaagtgaggaaatgcacaaaagtcaaataggctcatggttacaaaaaatgacagaaggaaacataccttctaaacctgctgtaaaaaggataagatctgcaaattcactagttttccgcaagaactcatgcaaaccagggcgctcaaaaacagtcacatgattcaccttttgtttgccttcaacatccttttaaagtttacaaaagaaaaggcttattggtcagtagtgatcaaattattatcaacgaagtgacatataacaaaggcacgagt

SEQ ID NO: 377 - DNA, 485 bp, Zea mays
tctggcttcaatccttccataccttgtgtgcgtgcgcttccatgggttggttactgcaatctgctatacgatcaggaaggcagtaagcaactttgttgtttacactaaatggtcctcttctgtctgttgcagcttgcggctgtggcggcactgtgtgtgcaatatgaatctgaatttagacccagcatgagcatcgtagttaaggcactctctccccttcttcaacataaaccgcaaccaccggcagccactactgacgctacagcaccgtcagatgcctgactttctcaaggagctatgaatcatgaatgttaagagaaccattttctcttcggtgcgtgcgctgttctagatcactatcgtgtgcctatgaagtgatcagtgtcacacaagcaacagcattgtgggctaaagcatatctccacctttacttagcttggtacaggcaggagacttcccattgtcattaccgtgttctatgctga

SEQ ID NO: 378 - DNA, 489 bp, Zea mays
ctttatatattgacaaacagaatttgcaccttaaatttggttgtgataacaatgatgatttcttacattatctcagaattggtgaaatatttgagcttgttgaggaggagatgaagattaaactgtcttgaagattccgattcattttgttgggctatccatcaaggaagaagaaatggaaaagaaagatcaatcagttcactattcaccaggattctatatccacttatccagtgtctttatctgccttagtagaagccttcagagcttacctatgatcttagaatatagtactggtctccttgtgacccatatttttttaaaaaaaatttaatgttgggttacactggaatcatattgggaggagagcgttggaccaacatatgttattgaaatgagatttctaagttatgaggatcattcgcctagcttcaggtttgttctgtgctgttgtagatgtgtattatttacttcattggcctgctgtac

SEQ ID NO: 379 - DNA, 1010 bp, Zea mays
  misc_feature (952)..(955): n is a, c, g, or t
  misc_feature (993)..(995): n is a, c, g, or t
tctcgtcggatcctcagctggtaggctccactttttcgcctctccccgatgaggcgaaaccctgtcgcgatccgtacctttttttttcagttcatgaagcgtgaaaccgtcgcacagtcagactgctgcggtaatcaagtcaaaatgatcgaacagtttcgcttttctgaagctctctttggtcaaatttaattgtacaaattacaattctctccgcagtcattcgggcctgtaagcaaatagtagctgttgatgtatgtgttgaatacaaataggaagctcagacgtttgtcctcatggaatttctgcgtttcagtctgtacactccaaatttgtatctgtaatcagcagatgggcattgatatttcatctagttttatttagggacctaaatttctgtcagatatccttaagaaaatatagtggcaaaaggtttattgttaagtaatctacacagctttcagcaaaccctcccagaaatgtaaagtagttttggatgcctgcttcctgtatggctgcaattgtcagtgagctagttgaggaagatgaagtttgtttagtttgcatcgaagaattaagatgtggtattctgcatacaagtcttctcctgtctttatgaagctgatgtgttgtgtttaggcatgtatctaacaataattccttgatgcaggggcaccaattgccggatctgcagttgataaagtggatgaagtgattggttacgttagcatcgggtacccctttggtctgatggcctcagtcctattcggaaggcataatgatgctatactcaagtctgaaaaaccaaagcttttcatcatggggaccaaagatggcttcaccagtgtgaaacaactgcaaaacaagctcaaatctgcagctggacgggctgatacacacttgattgaaggagctgggcacttccaaatggagggccctgcttttgatgccnnnnatggtagaaattattattaaattcattaattccttgcnnnaaatagcatttatgg

SEQ ID NO: 380 - DNA, 769 bp, Zea mays
tgcagaagggctggtagagggcggaaagtaagtctttttttttccagctaggaaagacggtcatgtttggaacctctagagctaatagtcagctgctaaaatcagttgtagaggttccaaacaaccacagctaataccttagctaaatgctaacaattagtatattagttagctcaacctagctaacaatttattagctgactaaactattagcttccaaacagggcctaacatttcattacctctggtagtatcctcctctacgtttccgtcgaatctttccttgcgtttgcttactgctgtataaacaactacaggaaggagatcttcacgccaatgtacttctttcttgttcggaagcctcttctggaatgagctcttggatcacctttttcaggtcagcaaggtggttttgtaagcttcccagatccatgtcttcctcgttccgtgaccagtttctaagttgttgtgttgccggttttcagagagagaaggcaaggggccatttcgaagaagccgaggagggggaacctggaatcaagaaaaccgtcagctctcctgtgtaggaagaaagttaacgaacagtgtagtaactgttcagctttgtgtttattcagttgttttgctgcttgaggttattcgtttctaggtgggggttggaatccttttcgccataaacctctcagtggcataaataagatggtttgcataagagtacttcatggataccgtaagggctactactgaaagagaaatgtttaagcagcat

SEQ ID NO: 381 - DNA, 591 bp, Zea mays
ctgctgctggtggtgtcggctcactcctttgtcaatgggcaaacgcccttggtgccactgtcatcgggactgtttccaatcaagaaaaagccgctcaggcagctcaggatggatgccaccatcccataatttacactagcgaggatgtcgtcgcaagagtcaaggatattacatcaggaaaaggtgtcaatgtcgtctatgattctgttggaaaggatacatacaaggtacttactatatgtaccaactgccctgttgtcgtccactgctcgttgcatggctggatgctttgcttgctacgcagcgctgagttaatgtttagcatccaactctgggcataacctttccactggtcttgcaactaaattgatactggttgccatcaccaatacaaatacaaacaccaaacgatctgtatggtatctgtgatgtgtgcaggcttccctggagtgcttggcgtcccgcggcttcctggtgtcgtttgggcagtcgtcaggcaaacctgacccaatcccaacgagcgacctggcttccaagtccttgttcctcactcgtcctagcctcatgcattacactgctacccatgatgag

SEQ ID NO: 382 - DNA, 270 bp, Zea mays
agcatgagctgccacctctacctgaacccgagttgccattgccaccaaaggccgagagccactacccggagccagggatggccaagccgtgatcggcctaacactacccggaggccggccggagttagagatgatcacgatgtgatcggcctgcattagtgaacacttcatgtatatgtatttacgtacgtacagtatgctttatactttgatgtctgcatgcgatgttgtggacgtgccccatgcatgcacacaactcgctaggagcgt

SEQ ID NO: 383 - DNA, 395 bp, Zea mays
gttgggcacggtgatcacgcctgcacgggcgaccggatctgctccgccgcctatggtgggcgtcgacaggtccatgctgctggagcttgcgatcagcgccatggatgaactagttaagctggcacaggttgacgagcccttgtggcttcccagcctcagtggctctcccgacaagaagctgctcaactttgaggagtatgcccactcgttccctccgtccgtcggcgccgtgaagcctgtgggctatgtatccgaggcctctagggagtctggcctcgtcatcattgacaacagccttgctcttgtagagacccttatggacgtggtttgtatcctgttcatgcatgtttttgcaatttcgcttggtaccattgttgctccatgacttttttttt

SEQ ID NO: 384 - DNA, 958 bp, Zea mays
  misc_feature (951)..(954): n is a, c, g, or t
tgctaccgctgcggctaacagcctcaaccgagagttcaggtatgtataactaaggtcttgaactcagtgattacattgttgttcctctttaaacaatatgtactttctgcagattaaaacttaaagagcacatgcagtattgtgtggatcaccctgaagaggttagcaagctggccaaagtggaggcacaggtttctgaagtcaagggtgttatgatggaaaacattgaaaaggcatgctttatggattgatcaagctatacaatctaactgttggtattgagggccactgtaagaatgttctgattgttttgtttcccaaatgcaggtcctagatcgtggagagaagattgagctgcttgttgacaagactgagaatctgcgctcacaggttttcatgcattcctttatcctgctctgtagtgctccattgaatattgtattattttttctttttggagctgtagacgtacatttcgcttagaagggcaaatccatagatgtcggaatatctgtaggttagaaaggaaatccatgtaatatctgtaggttcgaaaggcaatccatttccataaatgctgagatatatctaagcatgtaagcagcatactatgtcaaatcccaagaataccatcatcgacttgttagtgttcatatgcaaatataaatacaaagtattgaaatgaaagcataacctttctcaagggttggacgttcttctatctataatttttttgggttttagaacagtgaatgatcttaaatctatttaaattttgtgatgtaactcctatttgcgtggccgatttggggtatgcgaaacatagccagtttcttataatttgtctgggtttgcaggcacaagatttcagacagcaaggaacaaatgtgaggagaaagatgtggttgcagaacatgaaaatcaagctcatcgtcctgggaataatcatcnnnnttat

SEQ ID NO: 385 - DNA, 571 bp, Zea mays
cgcatgaggggagagatggaccaggtgctccttcctacgccattgccaacttgttcttgttcttcttcttcttccattatattggcggcttgactgaaacgttaatctgcttgcaggtccggagcgtgatgatggacaacatcgacagggtgctggagaggggtgaccgtctggaggtgctggtggacaagacggcaaccatgcaggggaacacggtgcgcttcaagcgccaagctcgccgcttcaggaacaccatgtggtggaggaacgtcaagctcacgtacgccatgttcttgttgttgtcttgcacattttagggtaacaatcgcctgtccctgtaactcttccactggtctttttgcagagctgcagtgatattcatcctcaccgtaattgtgtacgtcctgctcgcctacatgtgtcgcggcttcaccataccgtcatgctttccgtaatctccatccgtcccggtgccagtgcggaccaccagccctagctctagctgcgtcacaacttggttttccgggttctgtaacagcagcagcggtgctgcagttctctctcttgtacg

SEQ ID NO: 386 - DNA, 940 bp, Zea mays
aacaagggacgacgagcggtggcggtgggcgatgatgatgatgatggcgggggagcacgtgctggccgctctggccaccctgcttctggcctcgctcctgaccctggtgctgaaccacttcctgcccttgcttctgaaccccaaggcccccaggggaagcttcgggtggccgctcctcggcgagacgctcaggttcctcacgccgcacgcctccaacacgctgggcggcttcctcgaggatcactgctccaggtacactgtgatactagtgccgtttgccgcgcgcgccggccggcccggcggccctttttttccccctttcttttttacctttttccaccgtccgtgcccgtgttccatgcacacggacggctcctagctgactagccaaccggccggccatatgagatggatggatggatggatggatggatcgatcgatcggtcttgttaccgtgcaattaagtatcgcgccattatttcatgtgacagcaaaaggtgacgcgctgcccgccggccgctgtcatgtctaagctagcagcagcagccttttttctcacggttttgttcttgggtcgttccgagaccgggacgacagtagtctgatctgatctgagagagtagtaaaaaaagaggagaaagtaaacaacggcgctcgacgatagattttacttacatgcatgcatgcatgcatggtcctactagcagctagctagctaatggcagcatgcattgttgatatgcaggtatgggcgggtgttcaagtcccacctgttctgcaccccgacggtggtgtcctgcgaccaggacctcaaccacttcatcctgcagaacgaggagcggctgttccagtgcagctacccgaggccgatccatggcatcctgggcaagtcctccatgctcgtcgtcctgggcgaggaccacaagcgcctcaggaacc

SEQ ID NO: 387 - DNA, 536 bp, Zea mays
cttcctatttcaactctgatctacttcaacatcttcctgggcgacatgtggtccgccatgaagtcggagaagaagcgccagaagcagcacgacgagaacgtgcagaaggtcgtgaagcggctcaagcagaggaacccgaagaaggacggtcttgtttgcacggccaggaagccctggatcgctgttggcatgcgcaacgtggactacaagcgtgcgaggcatttcgaggtcgacctttcttccttcaggaacatccttgagatcgacaaagagaggatggttgccaaggtcgagccccttgtcaacatgggtcagataaccagagctacctgcccaatgaaccttgcccttgcggtcgtcgccgagctcgacgacctcactgttggtgggctgatcaacggttacggcatcgaggggagctctcacctctatggccttttctccgacacggttgtcgcgatggaggttgttctcgcagatggccgggtcgtcagagccaccaaggacaacgagtactctgaccttttctatggcat

SEQ ID NO: 388 - DNA, 714 bp, Zea mays
  misc_feature (689)..(690): n is a, c, g, or t
agctacgacgaactcaggccttcttgaggatatcatctggctcacggagcgtaccaaacatccagtccatccagacggtgtagtggccatagttgtggcggtaagtcgtatggtggatggtgtgataccccgctcccatgactggccataacttgccgtgaatgcagtcgtggatgtttgtcgtccacacgccctccaagaacacgagagcgatgtgcgtcctgaagtgcgttgggaggaggaagagcgcaagcacatgcggtatcgcttgcagaataccatccagtgggtgaaacgcgagtcctggaaagcaaatgtgttttagtagtcatggccgaatggctgctcatagcaaaatggagtaatggacttcaaaagcgacacaccagagcttaacatcaaggaactatgtagtgcacgcaagtagtggatcgtaaatggaacttttctaccgataacgaggggagaatgcgagatagaaactgagagctggatacgatagtgcagatgcagacttaccagcaaacggagacaaggtgttctccttgttgtaaatatggtgggttgcatgcagatgtttgtatagtggctttatgtcatgcaactctctgtgcatccagtaaattccaaactccacaaaaatgagatacatagccatataacaaaggtacgcagaaaaccccatttcnntgatattaaagtaacaccgggtcc

SEQ ID NO: 389 - DNA, 679 bp, Zea mays
  misc_feature (26)..(26): n is a, c, g, or t
gctacgcgggtgagtcactgtcactngctgccattgctgctgatacacagggacacaccagctagctgtccaagagttttctttttttgctgcttcaatctgttcactttgctcttgcttccacaggccactacgtcccccagttggcaaggaagattgtcgagtacaacgaggcctcgcctcaccccttcatcaacctcaagggaatccttgtgagtatcgtatcgtatctatgcatgctgctgccaaacacgagcaggccgccggccggccggctccagtctaatcttaacccccctccaaaaaaaaaacatcgatcaggtgggcaacgcggtgaccgacaactactacgacaacatcggcacggtcacctactggtggacgcacgccatgatctccgaccgcacctacaaggccatcctcaggtggtgcaacttcagcagcagcagcatctcgcgcccctgcaaccgcgccatgagctacgccatgaaccacgagttcggggacatcgaccagtacagcatctacacgccgtcgtgcgccgccgccgcggccagggccaacgccaccgtgctcaggttcaagaacaccctcgtccgccgccggcgctcctccggctacgacccctgcacggagacctacgccgagaggtactacaacaggatggacgtgcagaggg

SEQ ID NO: 390 - DNA, 367 bp, Zea mays
cgtgtctccgcatgatgcaacgagcacgcgcatgaactcgatggatgaaatcaacctgctgcggcaggcgcagcggcagcatcagcatcatctcatggtgcgcggcatcggcgaggagatcgacctcgagatcggccctgtcgacgatccctctttttccggagcttccttagtggccgttacgtccacgcacgacactgtcgttcacgccgacgaccacaagagcctcctcatcccgtgttcgcagcccggcgcggcggacgggctggcgccgcagcagcacctgtcgcagggggaagagcatgacgggatgctcaggtcgccgtcggggcacaccaagaagaagaagaaggtggtcaagaaatgg

SEQ ID NO: 391 - DNA, 836 bp, Zea mays
  misc_feature (784)..(795): n is a, c, g, or t
  misc_feature (797)..(798): n is a, c, g, or t
  misc_feature (803)..(819): n is a, c, g, or t
actcatgcaccacagtgtactggctgaatgttgatgtccccatgaaatggtaaatgggctttccatttacagagaacctgctcttcatatcattcatcatgacacctacgcctgtggcactccggaccttaccacagaggttggtctttccgctcttgcaaaacttgcattctttgcattctgcttggtagcaaggaatgacatgatccccaggctgcacatcagttactccttcaccgacactttccacaattctattaagacaagtaaaagaaaaattgtccatcacagcccaacgatgaattacttcgtgtatagaactgaagcaaatacacacacacacttattacccggcagcttcgtggccaagaatgcaagggaaaagaccctcaggatcctgcatagaaaatggaggtattaatatcgttttagtgttctaacatgaccacatggtcaactaaataatacctactataattgcacagcatgtgtctaactaacaataccaagtttcagcaatattcttacgttacagctgatggcaccatcccctgttagtgagggaaagtaggaaaaagtcttacagtgcgccatcaaatccttgtatttgtttagaatcattattttatcaaccagtctataaaactctaggaacatagccacaagatgaagtgacaaaaatacgaccaaaacgccaaattatatcagaacagcgactgtccatcagcgtcaggattgccatttgccaatggctactacacccaccagagtgagtgaccatttnnnnnnnnnnnnannacccnnnnnnnnnnnnnnnnnaaccaaacgagcatgag

SEQ ID NO: 392 - DNA, 1539 bp, Zea mays
  misc_feature (824)..(825): n is a, c, g, or t
gtctgcatcctcagctgtggtatctcgaccggtaagcaagatgccatttccatgcattccatggccatgccgtgctttagcaggatggcttacagcttactgaactgtcgccgtcgttttggtgcaggccttggcgcgacactgaatgtggcgaaaccagccaagggctcgacggtggcgattttcgggcttggggctgtaggccttgctgtaagtggtggtggaagttttatgaggtttattttttttcataatatgattggaatatgtatggactgaacactcactgtatactatatatgtttcaacgtacatgatcgatcaggctatggaaggtgctagactggctggtgcatcaaggatcatcggcgtggacatcaacccagcaaaatacgagcaaggtataactaaactaattaatgccatcttaggccttatttttttacaccaatccagctctgattaatgtggattggaattaaatctatatcataatccatactccaaaataatccaaacctaattaattttttatccagttaaacccatcctaaactataacaaaggctttgtgaattttttaaactatagaaggcatagattctatccatagctcactagatatgaaacaaaatccataaaaatattatacaaatttatattagaatccatgtattaaaaataagtaggtttgaaagatacatagattaaatgatggatttaatctcaccataagattgagtgtgaggtatggattcacccagttcagaaccggattaaatccatgatgtgatgtcatttcatccattgcaaccgaacaagannttatatattatgtgtgaaatggcagttttgtacttgtatgattcttgatgcctgcggcacagagaacttacttccatttgcttttcgtttttcagctaagaaatttggctgcactgaattcgttaaccccaaggaccacgacaagccagtgcaagaggtgtgcttagctttgtcgcagtatatatattactgacggcgatcctttgttcaggacaaagaaactaaaatcctacatgtatctgatatccactgctcgttggtgctcctgtgttgcattgcaggtgctgattgagctgaccaacggcggcgtcgaccgcagcgtggagtgcaccggtaacatcaacgccatgatatccgccttcgaatgtgtccacgacgtatgtgctcgcctcagctcaatcttgtgcgattctatcaccaccatcatctgctttcaggctgaaatggaactctgaaatgcaaatgcagggctggggtgtcgccgtgctggtgggtgtcccgcacaaggacgaccagttcaagacccaccccatgaacttcctcagcgagaagacactcaagggcaccttcttcggaaactacaagccccgcaccgacctgcccaacgtcgtcgagatgtacatgaagaaggtaagccgccgcctcaagaaccttggagtacgtacctgacctgcttacggttcaaccgtatccctgactgacgatcaacatgcg

SEQ ID NO: 393 - DNA, 621 bp, Zea mays
gtcgctgttgtccttggtcgcaagcagcggctccgtctccttgtcaggcatctgcagcaaccacgaacatcagattcagaccggccccatgaatggctgaactcggctctaacaaacccgtgcagtccacctccatctcaaagaatgtgatggcctgatagttgggtgtgtgatgactgatcgatcgatggcagacgacgtgcgtacctgtgacaccgggagggcgtcgcctgcggacttcttcttgccctcacgcaccgagaagatggagtagagcgccatcccgaagatggcgacgaggatgcccaggatgttccgcacggtgaaaggatcgtgcagcagcgtgtacccgaacgacagcaccaggcacgtcttgaggtggcccagcacctggtacgtcaccggcgacgtcgtcccgatcaccaggaacgtgctgaagttcaccgacaccgcgatcaagcacgacaggacgatgaagccctgcaacatagctcaggcatccttgtcatggttgggcacgttgtcatgtcacccacgacccacccaaagctgagctacacacttgggagttgggagtgatcttttttctttctttctgaaactgtcaacaccgttgcagag

SEQ ID NO: 394 - DNA, 815 bp, Zea mays
  misc_feature (731)..(733): n is a, c, g, or t
  misc_feature (754)..(755): n is a, c, g, or t
  misc_feature (762)..(766): n is a, c, g, or t
  misc_feature (777)..(811): n is a, c, g, or t
atacgctttcagttgttgctttagactcggttgcgatgcccatcacaggtacgctcattaacccgacagttccagcaacatagtagcagtacatgtagagctcgtcgaagttgttataccttgtcttcctaagatcactcctcatcccttcaatcatgtccctgaatggctgccacaacatttattgatttcaaaacgttggtaacttggtatcacaacatagtttatcaaaccactaagtggcacagatagttttctctcggtcacttcccagtggcaaatctaggatttaaagttaaggtggtccaaccttatgagaatcaataaacaaatgagttcacattttaagttctacaacgtatgagaatcaaaagtagcaaataaatcaaaactatctatataatttagcaggatcaaaatcagcccaccttgtccaccctctagatcgatctgccaatgttcccaggtctaatttttaattgattggattttttccccctgaaacgtttctctctcaatcatcatctagatcctattttcttctgcgctggtcatacagttaccttttgtttcttaaaaggtcggaccaactaaggatagaccaactaattaattcacattaccaaggccatgtaatattcaaattattgcctctcgctccaagttttgctgtgagggctgagctctagaaacagttcattttttatttaaaaaaaagttacattgaaacnnntttgacccaaacacctctccnnggtcctnnnnnatataactagnnnnnnnnnnnnnnnnnnnnnnnnnnnnnnnnnnnaacc

SEQ ID NO: 395 - DNA, 502 bp, Zea mays
acgcccatgttcctgatggctcgcaagatcaagtcgctgggcgtgaagatggtgctgtccggggagggctccgacgagctcctgggcggctacctctacttccacttcgcccccaacaaggaggagttccacagggagacctgccgcaaggtgaaagccctgcaccagtacgactgcctgcgcgccaacaaggccacgtcggcgtggggcctggaggtccgcgtgccgttcctcgacaaggagttcatcaacgtcgccatgggcatggaccccgaatggaaaatggtataaatcaggggtctcagcggctgcgcttatagctctgtgctctgttgttttatgatgattgatgacgatgccttctcttcttctatcttgctttgatctgctggcgcacacacgcacagtacgacaagaacctgggccgcatcgagaagtgggtcatgaggaaggcgttcgacgacgacgagcacccttacctgcccaagcatattctctacca

SEQ ID NO: 396 - DNA, 1215 bp, Zea mays
  misc_feature (1153)..(1153): n is a, c, g, or t
gttagttttttgtccccatttgtcgattttatttgcctttattactttgatttctaatttctttagactgaatccatgtgatgttttgagtaataaaagtttaaagctgattgtgaaaggcatattttccttatacataagtaatattaatatttgttgtgcctgcatttgtaaattgagatactgaactagtggaaccaaagacttatttgagttgtttaagtagtctaaagtcctgttttgaagaaacctagtttttaagaatccagtttttatgtctagtttttaaaaactggtttatggtgtttggaaccatatcagttttcataaattggttttagttagggaacgctagcttcttggtttttaagaaaccgagaatccagtttctataaactgtatgtttggaaccaccctagttttcataaaccagtttctttaaaaactaggtgcttccaaacaggccctaagcgacaaggaaacccgatacccgacatttcagtcagatccatcagactatcaagtagttttaactattatttgagtgagcgtttattagttttttgttgcaatgaagttgctaaaacgaattcaaactggacttgctaaaacaagttcaaactggacttgctaaaacgagtttaaactggaaattgtgtgtagtcttgcctttctgggacccgaaacatatccataagtaactatgaataggatcaaaacattacctccagggtattttttttcaggagcatgccagaattgtattatgctaaacaatgtaaatttgataccaaatggtatttatttatgcagtggcataattcccccctcaccagaggagtacccaattttgggactcaatcttctgaggctgttggttcagaatagaattgctgagttccatactgagctggagcttttacctgtcaaggcacttgagcacccttgcatcaagcatgctgtagagcttgagcaatccttcatggagggtgcctacaaccgagtgttaagcgctcggcaagctgtgccacatgagacctatgtttacttcatggaccttctcgccaagacagttaggtgagtgggattctgttactcctgtttatttgattgtttgattttatctcattgtgttttcctgctctcacagaantgagatcgctgggtgcagcgaaaaggggtatgattccctatctgtaagtgatgcaaaacaaa

SEQ ID NO: 397 - DNA, 507 bp, Zea mays
  misc_feature (498)..(503): n is a, c, g, or t
cgctccgccccgacctgctcgccacctccgccgaccacctgcgcatctggcgcatcccgtcctccgacgacgccgaggacggcgccgcttccgccaacaacaacaacggctccgtccgctgcaacggcacccagcagccgggcatcgagctacgctccgagctcaacggcaaccgcaacagcgactactgcgggccgctcacctccttcgactggaacgacgccgacccgcgccgcatcggtacctcctccatcgacaccacctgcaccatatgggacgtcgagcgcgaggccgttgacacccagctcatcgcccacgacaaggaggtctacgacatcgcctggggcggcgcgggggtctttgcctccgtctccgccgacggctctgtccgcgtctttgatttacgggacaaggagcactccacaatcatttatgagtctggttcaggtggcagcagcggcggcggttccaactctggcgccggagatggtgggactnnnnnnccga

SEQ ID NO: 398 - DNA, 661 bp, Zea mays
catctacgcgagcagaagaacggtcagttgtctgatgggcacaaggtagttcttttggtcacctctgaagccgacaaggacaaatatggatccatatttgatattgtgatgtgtaagcctataagggcaagcacaattgcttcatctattcaacaactgctcaaagtagagatagccgaaagaaaagataatcaaaaccggccgtcgtttcttcgaagcttgctggttgggaagaatatattggtcgtagacgataataaagtcaacctcagagttgctgcggctgcactcaagaagtatggtgctaatgttagctgtgttgaaagcggcaaggatgctatcagtctacttcaacccccgcatcgcttcgatgcatgttttatggatgttcagatgccagagatggacgggtatgtggatgaaataaacaaagtcgttttccatttccatcctgctgtttgaagtttgtttgctagttgaataaaaaaaatgtttccactgaccagcagttctcgattgttacttttgtaggtttgaggcaaccggacaaataaggcaaatggagttgaaagcgaacgaggaaaggaagaacaagttggctccgatcgaaggctcgacaactgccgagtaccatctgcctgttctggcaatgacagccgat

SEQ ID NO: 399 - DNA, 605 bp, Zea mays
ctctagtttagtacaccaatccgcatgcattcttttttgtttgtttgtttgtttgtttgttttgattgacaaatatatgcggcagagttaagaacgaatcgactccgtcgtctcggctagtcgaccgtacatatccacgacctccaaaggccgccaaaacacccgatccggccagccagatagacagccttgtcgtgtcatcgtctacttagatgtcaactcccatctgaatctcctcctccatggcggctttcctataaatacgtcgcctttccatgttggatgccattccattccattccaagcagcaggcaacagcagctatagtttccaagggaaagggatacatcacctgctgctctagctctgctatagcgctagcagcaatataatataatggcggccgtcggcgctccggggagctctctgcacggagtcacggggcgcgagccggcgttcgccttctccacggagcacgaggaggcggcgagcaatggcggcaagttcgacctgccggtggactcggagcacaaggcgaagagcgtccggctcttctccgtggcgaacccgcacatgcgcaccttccacctctcctggatctcctt

SEQ ID NO: 400 - DNA, 366 bp, Zea mays
acctcgacctcaagaagggcggcaacaggttcatcaagaccgccgcatacggccactttggccgtgacgacgccgacttcacctgggaggtggtcaagcccctaaagaaggcatccgcttaagaatgtattgggaagttcactggacatgaggttcatcttcgtctggctctgctgatacctgcaaggattgctgctgctgctgccgcccctggatgtgtgtttgatcagtgactggctgctctgctccatagaagatgaatgaagagagagatggtgaagaaggctttggcaaatggcaattgccgcagcaagccatgtcggcgccactgaccggcttagtgattggtataatttggtgtggcag

SEQ ID NO: 401 - DNA, 487 bp, Zea mays
tgtgcagtcgagggtgacgggggcaaagtactcgtaccagtggatggcattggcgcagcagaaccactggcacgtcctgcttgatgctggggctctggggcctaaggacatggactcgctggggctgtctctgttccggccagacttcatcatcacttcattttacagggtgtttggggctgacccaacgggctttggatgcttgctgatcaagaagtcggtaatggcgtgcttgcagagcccaagcggcgggacgggggcggggctggtgcggattgtgccggtcttcccacagtatctcagtgattcagttgatgggtttgatggtgtcctggacgggctggaggatgataatatcattccaatcgaggaggggtcagcctcgaacagtcaccatgcatcccaattgcctgcattctcaggcgcatattcatcggcgcaggtgagggaggttatcgagagcgagatggaccaggacagttcagac

SEQ ID NO: 402 - DNA, 661 bp, Zea mays
  misc_feature (576)..(577): n is a, c, g, or t
aggaagcagaggagctggagcctgacgctgctctgcagcttgggccccatgaagtcggcggccaggagctccacgagcgccatgtagtggagcagccccgccgaggccgcgttgagcaggcccaccacgatgagcgccgtggggctgttctccctgtacaccttggtgagcgccagccccagcgcgatcccgaacggcgtcgtcgtggagaagaagaacaccagccccgccttcatcttcgcgccgtactccgcctgcaggatgcagccgccgagtcccatgccctcgaagagctggtggaagcacatcgccgtcaccagcggccggatggtgcacacgttctgcgacgctcccatgcccagcccgatcaccaccgagtgcacgatgatgcccatctccaggacctgcgcgtggactgttagctagtttcaatgcccatgagtcatgcatgaccgtacgaactgcgatatgacacgcatattaccacatggttttgctaatatttattctgatttaggccccgtttcaatctcacgggataaactttagcttcctgctaaactttatctatatganntgaagtgctaaagtttagtttcaattaccaccattagctctcttgtttagattacaaatgggctaaaagtagctaaaaaaaagc

SEQ ID NO: 403 - DNA, 752 bp, Zea mays
gatcgaactggacctgcccagcacgttcttgaggaggaaggaggaagagtcgagcgagaggtcgctgcacttgccggcgtcctcgggcgacaggttgccggagaagcagacggtgccggagacggagatgacggcgatgttgatgagcagcgccacgaacagcgcgaagccgctctcgtagaggaagaaccggcacgcgtccttgatccccctcaccgacgacggcgtcttcctcgacagcaccagcgcggagtgcaggaacaggttgtgcctgcgggcggtgccatgccatgcatgcacacggagacggagatatataatatgaggcttattattggcttgttattaattaattaatccgtcattgacctggttagtatatatagtggtagcgctaatatccctgaatgctattgctagctagctatagcttacggcatgacgagagctccgaggagcgcaatggcgtccgcggtggcgccgtcgcccttgagcctggggatgaagagccccttgaccacgtcaaccgccggcggcttcacgaagctcagctccccgaagaagcacgccgccatgacgaacaccagcatcgagatcaggaactccagcttccgcacctacatacatacatatagttccggcattaattgaagactaatcaacaagaaattaaacaactaacgcatatgcgtacagcgtaccccgtatctctgtaggcccaggagcagaagagtgctggagccggtgatgag

SEQ ID NO: 404 - DNA, 1019 bp, Zea mays
  misc_feature (654)..(658): n is a, c, g, or t
  misc_feature (665)..(685): n is a, c, g, or t
  misc_feature (687)..(692): n is a, c, g, or t
  misc_feature (698)..(733): n is a, c, g, or t
  misc_feature (740)..(741): n is a, c, g, or t
  misc_feature (744)..(1016): n is a, c, g, or t
tgcttccttgttagatacagatgttccatgtcttcattatcatctagaagatgttctatttcatccctgacctgataagatacaataaataaatacataaaagatcccagtacagcagcacatgagatatcaccaagattctcacaagcacgacagaaatactcagcagctcaccacaatatgatataaacaataatcttaaaggagaacaaaagtgaaccatacagtttgattccaaaaacgaaaattcaatggctcattcctctgtcttcctgcagctaaaaataatcatggctcttttaccaatccatagtggatacacaactgtaagtacatcaagcaattctttttgcatgagcatcagaccagataagaagatcataacaatttgtttgagaaaaaaggatcagagcaaaccatcaagctggattggtttgtgaatctatgcacaaagcaactaaaactataacaatttacagcatgaggcaatctaagctgcacagtcataaacagacatggtatacaggctgtttgaagaactcaatcatatctccattgttacaaatagaacagactgttggaaaccaattaattaggattatctttgtaatataattcaatggccttttcatctataaaatcgagatgcgacannnnnaaacaannnnnnnnnnnnnnnnnnnnnannnnnntagacnnnnnnnnnnnnnnnnnnnnnnnnnnnnnnnnnnnnacctttnncannnnnnnnnnnnnnnnnnnnnnnnnnnnnnnnnnnnnnnnnnnnnnnnnnnnnnnnnnnnnnnnnnnnnnnnnnnnnnnnnnnnnnnnnnnnnnnnnnnnnnnnnnnnnnnnnnnnnnnnnnnnnnnnnnnnnnnnnnnnnnnnnnnnnnnnnnnnnnnnnnnnnnnnnnnnnnnnnnnnnnnnnnnnnnnnnnnnnnnnnnnnnnnnnnnnnnnnnnnnnnnnnnnnnnnnnnnnnnnnnnnnnnnnnnnnnnnnnnnnnnnnnnnnnnnnnccc

SEQ ID NO: 405 - DNA, 1028 bp, Zea mays
gctactgtgcatggaaatgagaatgatgttgaagagctagagatgttgctggaggtttgtattttgtttatttacctgacggacataacctatcataacctatcagttgtcattgtcttggttgagtatttaaagctattataatctgcaggcatatttcatgcaagttgatggcacattaaacaaattgacaacggtaagttggcacagctgattttaagttttacagcatcacaataaactagcaaagcctgcccttatgttgctgttcacatgggtattttttaaattctaatgttgtaagagaaattttagggtttagctctgtgttgacgttgtatttgtttgtgacaccttttcagttgagagagtacatcgatgacacggaagattacatcaatatccaggtaatgttgcgccatatagatgcatactgccttttatttttcgaccattcagtttctaaatacattttggtttttcttctttcgcaatgcagcttgataaccaccgtaatcagttgattcaggtataatttacaataatctggatctcatcttgtctctgctagagatgtagaaatttcagaactacagattgattttagtcactttcagtagttgatgtgtaatcacttggtgctgaatgtgcattccatatgatatcacccaagcagagtcctgagtaatacttgttgcaattttgcactctttaaggataacatatttttcgtttggtccctgcagctagagttattcttgagttctggtaccgtctgtctgtcgctgtactcattagttgctggagtctttggtatgaatattccgtatacctggaatgacggccacggatacatcttcaaatgggtaggtttctgctcgcaacacgacaaatataatgatgcgttgctttgtgtaacttgatcctcccttcacaggtggttcttgtatcagggcttttttgtgcctttatatttgtctccattgttgcttacgcacgacacaaggggctcgtcggatcctgaatag

SEQ ID NO: 406 - DNA, 689 bp, Zea mays
tgcttgctaccacgcctcctcatctgctgccaccggcgtctctccttcccagctggggccctgagctgagagcagagcagggagcgaaactttgcgctgagattgagctgctcctctacttactactactagaaggcggcggcgtcggcgtcggcgtcggcaatggggtcggagacgttcgtggagatcctgctggccatcctgctgccgccggtcggcgtcttcctccgctacggcatcggggtaattaacactcagcttagcatctgattaattgatgcatcgtcgttctcatcagatgtgtgtaagtaaagtaactgcttgctcgcgatctactgtgtgcctgccctgcaggttgagttctggatctgcctgctgctcaccatcctgggctacatcccgggcatcatctacgccgtctacgtcctcgtcgcgtgacagcacaacatggtgtggtaggtatgacgacgatggtgaccgtccgcccgcccgccgggagctggaatatatgagacccagacccagtgcttctgatccatccattccatgcatgcagtgatgcaggcatacgtacgtttagcccatgctgtatgtttgtgtcttgctttagttagctttagctagctgcttgcagcttagcttctctcagctcgtctaccgatccgttttgctgtgcccatggacatgga

SEQ ID NO: 407 - DNA, 771 bp, Zea mays
gttgcttctttctgtcggacagactctgttgctcgtgctcttaaatcgattctttagctgtctacatgaacattattattgttatgattgtttttttggtagcagctttccttcttttctttttttttaccatgatgccgtaagctttttgcctttttgggtgccgttggcgtgcataaaaaaatatgatattgcgtactactcgacatcgacagtggacagtggacactcgacatgcatgcttcctgacacgcattcggccgtgcagggacatccatgtcgtgcccgcacatcagcggcctggcggcgttcgtgaaggcggcgcacccggactggagccccagcgccatcaagtccgcgctcatgacaactgcctacaccacggacaacaccgggtcgcccctcctcgacgccgcgaccaacaccacggccacgccgtgggccttcggcgcgggccacgtggaccccgtcagcgcgctctccccgggactcgtctacgacgcctccgtcgacgactacgtcgccttcctctgcaccgtcggcgtcgcgccgcggcagatccaggccatcacggcggaggggcccaacgtgacctgcacgcggaagctgtccagcccaggggacctcaactacccgtccttttcggtcgtgttcgaccggaggtcgtcgcgcagcaccgtgaagtaccggcgcgatctgaccaacgtcggcagcgccggggacacgtacactgtcaaggtcaccggacctagcgacatcagcgttagagtc

SEQ ID NO: 408 - DNA, 465 bp, Zea mays
gggcgccgcgtcgcctgcggcggcaagcggctgaagcccatcaccgaggcggagctcaactacccgtcgctggtggtgaagctgctgtcccgcccggtcaccgtccgccgcaccgtgaccaatgtcgggaaggccagctccgtgtacagggccgtggtggacatgcccagcagggccgtgtccgtggtggtgcggcccccgacgctgcggttcgacagggtgaacgagaagcggagcttcaccgtgacggtgcggtggagcgggccgccggccgtcggcggcgtcgagggcaacctgaagtgggtgtcgagggatcacgttgtccgcagcccgatcgtgataccgccggcgaaggccgccgcgtaggcgtagctcccagcccaattgatgagtgccccggcattggtcggcaaacggcatgtatccctccaacaaggtcagtagcggtaggtggtaatcttgagt

SEQ ID NO: 409 - DNA, 733 bp, Zea mays
cagcagatatttacataatagtttcaggagtagcggttagatattttttttaatctctgactatgttctgaaaacatatttgtacaggtttgttcagcaagctaattacacttttcttgtttccttatctgtagaatttgataacaacagcaaatggtaatgaacaggtaaaggtttcaggtttcctcatcttacattgcaatgatatcagataccactagggtttcggcagattaataacaatgattcgttatctgaaagcaggtgtacgaaaaagttgaagagggagacatgttcggagaggttggtgctctgtgtgacataccccagccatttacttgccgcaccactaccctatcacagctcttgagaataaggaagataagactgacagagatcatgcaagaacacaaggaagacagcaagattctaatgaacaatctatttcaggtacagcttcattgttttaaggaagttaaatacacatcagccaaaatttcagctaaattgaagttcataactttttatgtcaatggacagaagctaaagctgcatgagagtttaccagaattaaaacaactagatcgaagattcatgcacaagtacgagctattccatgctcctcaagaagcatggttgttacctcagccttacctgcagtacacagagcacaaattggaagacattggtaagaagatcccaaccttttgtggagatcatggctcaacaaaac

SEQ ID NO: 410 - DNA, 905 bp, Zea mays
cattttcttgctttgctttgttttgctttacctttgctcgctgcctcttctgaagtctgaacttgtagctttttagttagtaccattgtgttcaagataatagctcatatgactttgttatttcaagagatctcacaccaacatattctaatcctccgtgctttattttctctccgtcccaaaaagaatacaattctagcacagtgttatgtcatagtatcgtaaatttgattaattatagataaaaaagtaccaatatctatgataacaaataaatacgattagattattataagatgtgttttcataataaatttatttggagccataaatctaaatactattcactaaaaacgtgatcaaacatgaaccaatttaaccggcatgtaacccatagttgcattctttttgggacagagtgaatacatgaaaactaaaacagatggtaaacagtgaccatttaggatacactataactgacaaaaactgtggggacaaacaggacgccatgtgatttaccatctgaccagcctaatgaagtgcagaggatttagccccttcgaaatagggggaaattattcctaggaaaattgcaaattctcttggcgaacataggattggcaaaccataatatatttctatatggtttgttaatgttttttttttcttactctcgtgatcaactatatcctttcacaattattgcagaagctaatagcaccgcacagcatcttgttgacttcacggaagcagaggaagatcttgtttccagaatgcacaggcttgtggggaacaggtacacagtacactatatatatatgtgttactaaatcagacaaaataatgtcttccgttcccctgattgtgctgttgataccatggcattatgtaggtgggagattata

SEQ ID NO: 411 - DNA, 874 bp, Zea mays
tccaggcaaaccaaatgcaagaactgttttagatggctttggcgtgtcttgtgtggtgatctcagcaaaggttaacggctttcctggtttcatctggatctgtacatgtgatacaagcagcgaacaattaaaatcattctcacaagtgggcaaggattatgatgttgagttcagaatgattatttttccaaaggtaacaggttcaatatgttatctaacagaatacatgaaaagaaccagatggtaaatttaatattcaatatgtatcccttgctgttggttatgtttttcctaataactagccagtagagtataaatctttggaagcaccaggtggtttcaaaggtaccttctcaaagtgaattttacccatctttgccaggcaaggtttgacaagatctctgtcgcccatggaaacaccaccagaagtaatgattatatcagcattagaacgcaaagctgcatccatatgctccttgagactttcttcagtgtcctctgcaatacctaggtcaaccactttgcatttctgctgaatagcacaagctagaagcatggctcgattggaatcacgaatctgcgattttagtttcaagaagggaggatcgtttgttgctgagaatactgaacgcaaagaagattgaaggatgcaaaaaatttggaagagcagaaataacctgaccacggctgagggtggcagtggctggctgcactagctcatcccctgtggagaatacagcgattgttggtcgagggtacacctggacatgcaaaatcagaatgctgcattgcaattgttgttctttagtataatcaaccacgctaacttgaaatgttattcaccttgacagtggttacacccactgtgcaagta

SEQ ID NO: 412 - DNA, 392 bp, Zea mays
cctccgaccaggacctcttcagcaaccccggcaccaggcccctcgtcgagaagttcgcgcgcagccagagagacttcttcgaccagttcgccttctccgtggtgaagatggggcagatcaaggtgctcacgggcgcgcaggggcagatccgcaggaactgctccgcccgcaacgcaggcatgacgtggtccgtcgtcgacgaggctgcacagcagagcttcgtgttctagactttgtacgtactagctggctactgtgtgggcggcggtgtcctgtcaagtgtcaacagaacagatagctagcactagcagtagcactggacggcatgcagcgcccccatgcatctagcttggacaaataaaaggggccatgcataaataaatctaccgcaa

SEQ ID NO: 413 - DNA, 740 bp, Zea mays
  misc_feature (712)..(715): n is a, c, g, or t
  misc_feature (726)..(727): n is a, c, g, or t
aggtgctgtacctattacagggcatacttcaggcactaggagaaatgacaactatgttcgtcggcacagaagcccattgaattctggactgtggatttcaattgaagttattgttaactttagccagattgttgctgccattgttgttctttgtgtgtcaagaaaggaacacccacaagctccattacttgagtgggtcataggttacactgttggttgttttgcaacgttaccccatctctattggcgctatatacaccgtaatattgtaaatggtgagcatgagtcatcacatacacctcaagggtccgctcataacaactcaaatgaagcgactcatgctgcaagtgcatcagaacgccgcagaaatgctgcccgaaatgctgtgcttgctaatcctaggtactcatgccttctttttttccttaaaaaaatggatcggtatttacaatgaatatgtttgactgtcacttgttttgtttatttatggtgctgcaaaatggctatgcattaaagatgaatgccctgtgctatctgcaggatcaatgcgctgtttgaccacttcaagatggccctggattgtttctttgccgtctggtttgttgttggaaacgtgtggatatttggtggccgttcttctgctgctgatgcaccgaacttgtacaggtaaatgtgaactgctcttcaattgatgagatgtcactatgtcagnnnntttatcctgcnnctgactttctact

SEQ ID NO: 414 - DNA, 708 bp, Zea mays
  misc_feature (390)..(394): n is a, c, g, or t
  misc_feature (427)..(427): n is a, c, g, or t
  misc_feature (431)..(431): n is a, c, g, or t
  misc_feature (517)..(523): n is a, c, g, or t
  misc_feature (528)..(531): n is a, c, g, or t
  misc_feature (533)..(535): n is a, c, g, or t
  misc_feature (537)..(541): n is a, c, g, or t
  misc_feature (544)..(549): n is a, c, g, or t
  misc_feature (556)..(561): n is a, c, g, or t
  misc_feature (566)..(577): n is a, c, g, or t
  misc_feature (631)..(635): n is a, c, g, or t
  misc_feature (637)..(641): n is a, c, g, or t
  misc_feature (645)..(648): n is a, c, g, or t
  misc_feature (650)..(653): n is a, c, g, or t
  misc_feature (656)..(658): n is a, c, g, or t
  misc_feature (668)..(669): n is a, c, g, or t
  misc_feature (671)..(684): n is a, c, g, or t
  misc_feature (693)..(699): n is a, c, g, or t
  misc_feature (703)..(705): n is a, c, g, or t
ctttcgtggggcagctggagttcttctacgaccaggcgcccgacgccatgaggagcatgtgctccgcgctgtcgctcaccaccgtcgcgctcggcaactacctcagcactgtcctggtgaccatcgtcacccacatcaccaccaggcacggccgcatcgggtggatcccggagaacctcaaccgcggccacctcgactacttcttctggctgctcgccgtgctcagccttctcaacttccttgcctacctcgtcatcgccagctggtacaagtacaagaagacggccgatgattaccctggcgccaaaggggagcacggtacagagcactgatgggcgagagatggcggaaattgagtgatttctatgtgtggttagctgtctgccacannnnncccatcagtgctctgtaccgtgctccctttggngcanggtaatcatcgcccgtcttcttgtacttgtaccagctggggatgacgaggtaggcaaggaagttgagaaggctgagcacggcgagnnnnnnnaaaannnntnnngnnnnncgnnnnnnggttctnnnnnncccannnnnnnnnnnnggtggtgatgtgggtgacgatggtcaccaggaccgtgctgaggtagttgccgannnnncnnnnntgannnncnnnngannnatgctctctnngnnnnnnnnnnnnnntaaaaaaannnnnnnccannnggg

SEQ ID NO: 415 - DNA, 1051 bp, Zea mays
ctatctccagcgcaaccagctggccactgtgcaagggtcaaatcagaactacgttccagacaacagctttgagagtagttcttttactgggatttcgccccctcctgtgtctgaagctggtgttgtaactgtatcaaatggagtcttgagaaacaacgtggttaccacaaatctgaggtaacatattgtagctttcagatacattgttgcttctgttaataaaattgatcttttttcaccatccagtgtctatatctgtgaaatatgataataagttgcataggcttcaatacttaacatgtgagctactagcgtaatgatgcactgagccctgagttgtattgcaaagagaattaatctggcaagatgtgttttcttgcattcagatcgttgccctcaagaagtaatagtccatacaatacctgaactcggcgcatgagtatgactaatcttctcagatcagatctgttagataaaaaaataaatgggaattggttggcacttggcacaattaaaagaattcattgcagtaaccaatctaacgttttatgtcctactgttctcatttgatagcagcatacctatacaggtcatcagaatcataaatactttgttggcaagttttctctgagctgcattctcctcgttgtagggcccaagcttttgctgatcacttcaagatggctctggactgtttcttcgctgtatggtttgttgtgggaaatgtgtgggtgttcggtggacattcttccgcccatgacgcacccaacctgtacaggtgcgctcctaacctgccatgatggcgtaccttcgcatacttatttcgatgtttcaaggtgtgtgtactcgtgtttttcaggttgtgcatagccttcctcactttcagctgcattggctatgcgatgcccttcatcctctgcgcgctgatatgctgctgcttaccctgcataatctccctgatgggcttccgggaagatctggacgaaaacagaggtgctacttcggatgcgatcaacgccctgggcacatacaggttcaggtcaaagaagcc

SEQ ID NO: 416 - DNA, 920 bp, Zea mays
atgcctggacaggtaggtagtacactgtacagccctgctgtgctgcaagttgcgcgcatgcagccgtcgctctgaccaatagtcaggacggggacggcattgctatgctgatgattctgaaccgggttccgtgtcaaacagtgggagttccaagtggggccgtccgttgggatctctgccggcgacgagatatgggtcgcccgctacattctcgaggtccgtttcgcggtgccgtgtgccgtcctccagtagtggcagtgtcgtcaaactagctgactagtgctgcggctaacgctgcgtttgtctttcgctgactgattggtgtggttcttccagaggatcaccgagatggccggaatcgtcctctccctcgacccgaagccgatcaaggttagatgaaatgaagtttcttgtgattttctttctcgcatccgtccgtaggcatcgcgcggctacgtactgaatccgttgcggtgcagggcgactggaacggcgccggcgcccacaccaactacagcaccaagtcgatgagggaggccgggggatacgaggtgatcaaggcggcgatcgacaagctggggaagaggcacaaggagcacatcgccgcgtacggcgagggcaacgagcgccgcctcacgggccgccacgagaccgccgacatcaacaccttcaaatgggtgggttgtttctttctgatgcgatgcgatgcgatgcgaaatggtttctgttccgctcgcagactcgctcacgttcgtgggtgtgcgctatggtgtcgttctgcagggcgtggcgaaccgcggcgcgtccatccgcgtcggccgcgacaccgagagggagggcaagggctacttcgaggaccgcaggccggcgtccaacatggacccctacgtcgtcaccggcatgatcgccgagaccaccat

SEQ ID NO: 417 - DNA, 827 bp, Zea mays
  misc_feature (43)..(44): n is a, c, g, or t
  misc_feature (55)..(58): n is a, c, g, or t
tggttttggcacgatacacttctgtatgttgcttctggagaanntatggtggagnnnntctctccaacctcttaggggactcttcccaaatttctatactaaggagaagcttgctggggatgatttaaatcccttccttcctttttcttcacggttggctgcaattgacttcattgtttgtgatgagagtgatgtctttgttacgaataataatgggaacatggccaaagttttagctggacggaggtatgtacccctctttttctgcatatgctttgggtattctaaactaatccctccatcccaaataaatcaactcccctagaatgacccagagtaaaattatcttaagtttgacaaattttataggaaagagtaacaacatcgttgacagcaaacaagtacactatgaaaatatacctatctagtgatactaatttgatattataaatgttggtgttttttctctataaatttaatcaaacttaaaacattttgacttaggacaaatctgaaagttggtttgttttgggacggatagagtatacatctgttgaatgtattggattgccatgcaaggacacgaggccttataggcaccgtcaatttgtttagtttttactatttattatgttaatttgttgctccgaacagtttatctattctcccttattattttctaatatgctatgttttgctcatccactctccatcaaatgtgtaggcgatacatgggccacaagagaactattcgcccaaatgcaaagaaactcaatgtactatttcaaacacggaatcaattgagctgggataccttttcacggaag

SEQ ID NO: 418 - DNA, 317 bp, Zea mays
gcgggctcagccgaccaatcgatgtcaaccgcggcagcagtagcatagctaaggcatccgccgccgcacgccgactcggccacgtgatcgctgtcggactggaacacgatccagcctcgctcgctccatcgtctaataagagggtggcggcggcgaatattggaattggaccttcggggagaaaatatatcttggatgcccgtcaagacatctttcaatggtttccacagaaataatttaaagtaggctgactaatgtcagccacgtgtctcccgggtctgaacctagctaggtttgaaccccttgacgcaaggaat

SEQ ID NO: 419 - DNA, 657 bp, Zea mays
ctatctcctcggcgaccaccccttccggtagcttccagtcgaagtgaaacagcaacgccgcgagagcgagctcaatgtgcgccagcccgaacgccatgccggggcacatcctccttcccgcaccgaacgggatgaactcaaaatccatgcccttgaagtctcgtccactctcctcgaacctttccggcacgaaatcctccggcgcgtcccacagcgctgggtccctgcctattgcccacgcgttcaccagcaccatggtgccacgaggcacgtcgtagccgagcacctggcacgggctgcggcactcccgcggcagcagcaatggcgccggcgggtgcagccgcaggccgcagcgtctcctttatgactagctgcaggtaccgcagattgaccaggctgtcctccgccacctcgtcgtggccggcgagtgctcccctgacctcatcttgcgccttccgcatcaccgccgggttccgcatcagctcggccattgtccacttcagcgtcgtcgccgacgtctcgctgcttgctccaaacatgtcctgcgcagtgtgtggaagaaacagagtgaacgtggagagctgtttcgtttgtggatctaaggtgagagattgtgaggagcgcttacgatgaggacggatttgatgttgtcggtgg

SEQ ID NO: 420 - DNA, 640 bp, Zea mays
  misc_feature (443)..(446): n is a, c, g, or t
  misc_feature (471)..(471): n is a, c, g, or t
  misc_feature (609)..(611): n is a, c, g, or t
ctgaacatcaaccttcacgccatccacacccacactagaaaggtagctgtgctgatcattgtagaactcatatatcttgtcaggatcaacgatacccactccaaatttctccaagctatccatggcaatatccctcagattcgcaacattaccccgcgattggactggataaacaagctttggattatacttcttcatcactttggatgctgctaaggtgcctccccaatatccaagtaaagcatgccacatgtagacgcacctatagttttgcacattgcatcttaaccatcaaaaaaatataaagattcagtcatcattgaacaagtattctgaaaaaaaaaattacttgactccatgttttccttttatcgttttaacaaggtcctcaagattcttgcaggtttcccccctgaacttatgattctccttcagatcagccnnnntctgcgcaaatctggcataattacngtatgaatcaggaactggcgctatgcacacttttatggattaccaaaggatggaacactaacacagtctgctcacggagggcttcatccacttccttgatttcgtcaactgtttcttgccaaccatcatctataatcnnnaaccttggcggcacaccaccttcacgcag

SEQ ID NO: 421 - DNA, 437 bp, Zea mays
  misc_feature (368)..(368): n is a, c, g, or t
  misc_feature (413)..(413): n is a, c, g, or t
  misc_feature (419)..(419): n is a, c, g, or t
  misc_feature (421)..(421): n is a, c, g, or t
gcgcctcatcttcgccggcaagcagctcgaggatggccgcaccctcgccgactacaacatccagaaggagtcgacgctgcacctggtgctccgcctcaggggaggcgccaagaagcgcaagaagaagacgtacaccaagcccaagaagatcaagcacaagcacaagaaggtgaagctcgccgtgctccagttctacaaggttgacgacgccaccggcaaggtcacccgcctccgcaaggagtgccccaacgccgagtgcggcgcgggggtcttcatggccaaccacttcgaccgccactactgcggtaagtgtggcctcacctacgtctacaaccagcaggcgtaggatgccccttctttctttcggnaaggaaaatgggaagtcttgctaggtgataatcctttttgctttnttttgntntgttgcaatggtagta

SEQ ID NO: 422 - DNA, 505 bp, Zea mays
agccggcgctcaaccagatcaaccgcatgaagtccgactgagctgctagctggcaacaacaccggggacggcggagtgtgcgtatcagcggctggacggttgtaatttatagcgtgaagcatggttggtctacgtgccttgttttttccatcttcgaatcttgagcaaatgcagtacatgtacagctccctccctctcgtctcaatctgttacatacatatacacacataccgtatcctctgtggtggttggtcaatgcaaacgctcctcgacgctggacatctcgccggcgagcgctccctgaacgccgccgccggcgtgaaccgtgatagacaagatgcgggtcgtcaacgccgcgcgcccctcaccgtcgtcatcggactcgcccctctccggcgttgcgcgcgcccagctcacagcagaggcactcacacgagttgcgtgtagcctctgtgcttctcctccccgtcgcgtcatgcgcatgcgcttcatgttcgtctaaaca

SEQ ID NO: 423 - DNA, 876 bp, Zea mays
  misc_feature (861)..(869): n is a, c, g, or t
gtaaatatagctccagaaccagcgaaataatagcacacatgacctaataaaaatacatgaaaagtcaacgaaaagccttcatgtgcagtgcaggagttaactttgaaggcaagaacgaatataagatgagtcataagaaattttccatcaaacacctgttgtatgcccaggagtttccagtacaagaacttgatggccagcgaacatccatgtgtcaccctccttaagcgtgatgtcaatgccaggtattctgtccttatccttctcagaaccaattacctaaaatgcatatgatcaccagaagactaaatgagacacaccaatcttattctatatgcaattaagtatttcaggtggcaggagcaatccagtgtagaaacaatgaaaactaaagaaaaaatatttgcgtcaaacagtttccttcaaatcacctagaaaatcatcaaaactttgatttgatactgtaggcaaatgacatactcaaacttgaggcatagccattagtatctgctctgttttaaacttcagttatataattcaatcttgaaaactataagtattgttgaatttaacagatactttattgataagaatatactttaaaaaacactcataataactccatccttgggtatagcactattgtcttcactttagctcataacaaaaacccattttgattgtgtcattgtcacatactgtatcagagtcactgaacgatacagaaaaagaaagaacaaataaaatagcccaaagctatacctttgcaccatattttgccttcaattccaagtttccaccagtatgatcatagtgatgatgggtgttcagtatataagtcaagttctggtttctcttttnnnnnnnnntttataa

SEQ ID NO: 424 - DNA, 855 bp, Zea mays
tggaaaagagaaaccagaacttgacttatatactgaacacccatcatcactacgatcatactggtggaaacttggaattgaaggcaaaatatggtgcaaaggtatagctttgggctattttatttgttctttctttttctgtatcgttcagtgactctgatacagtatgtgacaatgacacaatcaaaatgggtttttgttatgagctaaagtgaagacaatagtgctatacccaatgatggagttattatgagtgttttttaaagtatattcttatcaataaagtatctgttaaattcgacaatacttatagttttcaagattgaattatataactgaagtttaaaacagagcagatactaatggctatgcctcaagtttgagtatgtcatttgcctacagtatcaaatcaaagttttgatgattttctaggtgatttgaaggaaactgtttgacgcaaatattttttctttagttttcattgtttctacactggattgctcctgccacctgaaatacttaattgcatatagaataagattggtgtgtctcatttagtcttctggtgatcatatgcattttaggtaattggttctgagaaggataaggacagaatacctggcattgacatcacgcttaaggagggtgacacatggatgttcgctggccatcaagttcttgtactggaaactcctgggcatacaacaggtgtttgattgaaaatttcttatgactcatcttatattcgttcttgccttcaaagttaactcctgcactgcacatgaaggcttttcgttgacttttcatgtatttttattaggtcatgtgtgctattatttcgctggttctggagct

SEQ ID NO: 425 - DNA, 495 bp, Zea mays
gaataactgggatcgatagtttgatttcaagtggtttacctattggatatcaggctggaaaatttaccagaaattacctgattgaagagctcaatattcctgagtctcgattggtaccactaaatacaatccaggagtatgctgatgcccttaagcgtggaccaaaagatggtggtgttgttgcaattgttgatgagatgccctatgttgagatcttcctgtcataccactgcaatttcagaatagtgggacaggagttcaccaaggagggatggggttttgtatgttctctgttctttctctagttttttttttcttctgtatttgttcgccttggtttgctcactcctccaatggcatctcacggaagccggaagcgtacatccctgtctggtagtgtaattgaaacaatttattcttgttctttacaggcattcaagagagacttcccccttgctgcggacttgtcaacagccatccttcaactctcaaaaa

SEQ ID NO: 426 - DNA, 744 bp, Zea mays
tactatggacatatctctgcattattataattgtcttctcattgttgaactggctctcaaggcacttagttgttaacgtttctcctctctcttttttgcctgaatgttggaatatctttatgtgtttttatgcttgatgcatggcaatttgtattaggttgccaggttggtcaggaagttcttgtatggacttccagaaatgctaactatttgataattcttttcactcttcctgattcagttgatgaagtagatgaactataatgcttgtggtaaatatttggaaaatcatctaagttagcccttttgttgatacttggtagtgctgcttcatcaacatgttgagaccatattattccatttccagcattgagttatattaccaagtaacttgagatcctttttaggtttagcggctaaatattatagttatttggttttctgtttatcacagtcgatgctttcccatcttttaaattactatggacatacatagtttacgtcattaggtgtatgtatatgtatactgaactgacagaagaatctacaggtccagaagttacacgcttggctgctatggctgcaaaatataaggttttcttggtcatgggggtgattgaaagggaaggttacaccctttattgttccgtgcttttctttgaccctcttggccgttacctgggtaagcaccggaagctcatgcctacagcattagagagaattatatggggatttggggatgga

SEQ ID NO: 427 - DNA, 777 bp, Zea mays
tggtgacactcaggtagtacatgattatactttaacttatttctgcaaagtgatagatctgaaaattttgaagtgtatattgaggtgctatacttttcaggtttcttctttggaagatatcattaaatctatgaaggtatgcataagctctctagaacagaatttatgaaattttgtgatccttgcatattaaaatctggataccctagccttatagctagtataatcctccaagcttatcgtcattggctgacccattctggttttaacttttgcataaattaattgggtattctacacctgtccttggcacagtgcatcctgttgacacttttgcatacctttgtgattcacatatagcatagaccttgtgactcaagattgaccccccccaccccaccacacacacacacacaaatcattagttgccatattctgtttacttgtcttcaatcctactaaaatttaaagcatattgcaggatagctcctcctcaaaatgggatgatgttgtatttattcctcctggatttgaccttgctactggctcgacaccatcacagctccgcaagtagttcatagaaggttgttaccagtgttattcctagcaacattatatttgactgtctggacactttgatagtagtacattatatatacacattatttcttagacagtgtatgtgattttgtgccatgaactcgaattactgttagttcctgtgttagatgtatgtagtgtgacattagttagctggaaactgatgaaaaaatctcg

SEQ ID NO: 428 - DNA, 700 bp, Zea mays
ggaggaggacgagctcatcgtcaagctgcacagcgtcctcggcaacaagtaggggccgccgcgcgcctctccatctccctctgcctcctacccccgtcaccagcatcattcgtttcgtttcctaaactggccgggtacgttacgtgcaggtggtccctgatcgccggaaggctgcccggcaggacggacaacgagatcaagaactactggaacacgcacatccggaggaagctgctgagcagggggatcgacccggtgacgcaccgcccggtcacggagcaccacgcgtccaacatcaccatatcgttcgagacggaggtggccgccgccgccgccgcccgtgacgataagaagggcgccgtcttccggctggaggacgacgaggaggaggagcgcaacaaggcgacgatggtcgtcggccgcgaccggcagagccagagccacagccacagccaccccgccggcgagtggggccaggggaagaggccgctcaagtgccccgacctcaacctggacctctgcatcagcccgccgtgccaggaggaggaggaggagatggaggaggctgcgatgagagtgagaccggcggtgaagcgggaggccgggctctgcttcggctgcagcctggggctccccaggaccgcggactgcaagtgcagcagcagcagcttcctcgggctcaggaccgccatgctcgact

SEQ ID NO: 429 - DNA, 889 bp, Zea mays
  misc_feature (877)..(877): n is a, c, g, or t
  misc_feature (881)..(884): n is a, c, g, or t
tgagaagcctgagctgacttctccggaggatcttggtgttcaagctgcatcaatgctactagaagaggtggctcaaggaggtgttgttgactctacacatcaggtctgggcttttatgcaagcattctatgtatttctgaattttgcctggtgttaagctcgatgatagctgtatatattgttatgggctcagtgaagcttagacaggagtacaggacagtgaagcattttgttcttttggactgtttgtgtctactacagacaagctgcaagttctacatggcatgtggataactagatatgatttttttcaacgatctactttctcttaaaaaatgttgtcctctcttggactgacagtgctgtacatttatgtttgcccatcttaaattgcttgttgtctatcctgatgatattccatgcataagttacagatgcttttgtttagtgattttatcttaaatgcttgcagggcctcctatttattctgtgtgctttatgcccaccggatgtatcaaaggttcgtgtgggacagttgactccatatggtatagagacacttcgaaacatcagagattttcttgacgtcaagttcatcatcaagcctgatcccaattcaaacaccgttactttaaaatgtgttggcgcgggagtgaagaatcttgctcggaagatttcataagcaacatgaccattaatctgatcaaggattcatgccacatcaagagactactatgagaccctatttgtaactgcaaacaacagtgtaggagtttcccttagctgttactgctgaaattctattcgaggtccatgatgtcttagacatcaccgatgtacatcagtattagaatggattgttctgatcatgatgccntgtnnnncgaca

SEQ ID NO: 430 - DNA, 557 bp, Zea mays
agcaggttcctatcgcttctacagtttgatctctcgtagctgttgcctgaaccggtcatttcaagtgtatgatggggagcttctagtgttttgatgcaagtatatatatacacatcgcatgagatttctcttggcaatacactgatgatcctgctgcaaatctgcaggtcaagaagctgcagagggaagggcatctcgacgccatcgtcgaccgcaacttgaacagctgttacaacgggcaggaggtggagatgatgatccagatcgcgctgctctgcacgcaggcgtcgcccgaggaccgcccgtccatgtccgaggtggtccggatgctggagggcgagggcctcgccgagaggtgggaagagtggcagcaggtggaggtgacgaggaggcaggactacgagcggatgcagcagcgcttcgactggggcgaggactccatctacaaccaggacgcgatcgaactgtccgccggcaggtgacgacgtcgggtcgtcacacggagcttgtcgtcgtcgacgtcgcagtgccgacatgtaactgtatatgtaaggcat

SEQ ID NO: 431 - DNA, 544 bp, Zea mays
ggcaacggcaccatcgattttccagagtttctgaaccttatggctcgcaagatgaaggacaccgactctgaggaagagctcaaggaggcctttcgtgtgtttgacaaggaccagaacggcttcatctctgccgccgagctccgccatgtcatgacaaatcttggggagaagctaactgatgaggaggtagacgagatgatccgtgaggctgatgtcgatggtgatggccagattaactacgaggagtttgttaaggtcatgatggccaagtgagccacagaagcataagctcaaggcagagaggattgtgcattgcatattagtcaagatgcaatgcaactcttatttcatcgacttccagtgaaacattctgctagttgtagtttttgaaaggcaatgcagttgctgctttgttcttccctccagtgtgttttcagaactgttgattcatgtgaaactgtaatgattgccctccctgctgtgtcttggttgcagttgaaaccatatgtagctacattccccctcccaccacctccacacatca

SEQ ID NO: 432 - DNA, 763 bp, Zea mays
acgcatcacctttgaggtatgacttgccttcttgatatcaaaaaaattattctactcagtttatcttattattctcatggatgtttatttgcaacttcaggagtttaaggcatttgctgatttgcgacgaagattggagccactgtcgatggctatctttgcttacggtaaattgaatgggttattgacgaaggaggatctaaaacgtgcagcgcaacatgtaagattttcttaccaggtttggcatgcttatttatgttattttgcttctaactgatgtctagctatgtaatttttcattttggtttgtgttgtaggtttgcggggtcgacttaacagatagagtagtagacatcattttccatgtgttcgacacaaatcaggatgggaacttgagcccagaagagttcttaagagcgttacaaagaagagaaactgatattcgtgaaccaacaataccaggtccattggggttcttgtcttgctggttcagtggtaggaagtgttcttcactaaaacatgtggttatctgattgagcccctatttgatcctcacggtatctgtcattcgcctttgattgtcatctcccgttacgtacccctgttatgatatcctgtattgacacttctcatcgatattcaggcgcagaaggtaatcaccaagcagtgcattgctgatcgttacaacggacttcactgtatgtcgtcttggtggccgaagcttgactagcagtaacagctctaattgtaaatcgtgtcctct

SEQ ID NO: 433 - DNA, 532 bp, Zea mays
ctcaggaggagcttccacgcaaactcagggggaggcgcgcgcaagcaagcacacgagggagcagcgggcaggcaggcaggcagccatggggaggtctccgtgctgcgagaaggcgcacacgaacaagggcgcctggaccaaggaggaggaccagcgcctgatcgcctacatcagggcgcacggcgaggggagctggcgctcgctgcccaaggccgcgggactcctccgctgcggcaagagctgcaggctccgctggatgaactacctccgcccggacctcaagcgcggcaacttcaccggcgacgacgacgagctcatcatcaagctccacgccctgctcggcaacaagtaaggcgccgcgccgttccgttccgccacctgtactgtaccattcaccgcccagctgggatccttttccttagcacgcatggaattggatggggggtgtggctattggctaatatccatggctccgtcgcgcaggtggtcgctcatcgcggggcagctgcccggccggacggacaacgagatc

SEQ ID NO: 434 - DNA, 516 bp, Zea mays
cggatctactatgcgttatctcgatttcgtcttgttccctagtagattattttattgaatcttaatccaattggacgcgagcacagatcacgcgcgttatctgccctcccgacatcttatctaacatcctcggcttaaaataaaataaatgcagggcacccgtggatccagagcggaggcggaggccgagagctggtgcggccaacctgagcagccatatatcgaacgagacctgaaccgatcgagtatcatcgtagcagtccggtgggtgtgtactcccccgatgagtgttgtgcagacgtctctgtatatccagtaagcaggcggcggcggcggcggcgagtgtgagactggagatcgtcgtttcgccgcacctcgcccgtgtgtgtgtgtgtgtgatggtgacctgggccgttttcctcttttgccttgtgggccttttttcgggccgccctctttgcttgggagttaaacgtcgtgcgacgatgatctgttaagtctaaccgtccatgtaca

SEQ ID NO: 435 - DNA, 404 bp, Zea mays
cgtgtatgcgtgtttttccggccggccggtgaaggacgatggcaggatggacgcgctgaagtgtaacaacagcgtcctgccggaggagaccgccgcggacgccgccggggcgttcgtggagaaagacgggttctcggtcgaggacctgcttgacctggaggagttcgccgagcctgacaaggacgtcgccgaacgcgaggatgacgacgcgccgccggcagccgccgcggccgaggagaggccgaaagcggactcgcagccgtcgtcggtcgtgaagtacgacctccctccgctgccgccgccgccgccggagatggttgacctgccggtgagttgtttaggcgcgccgtcccttgaccgcttctattcgtgtggaaaggcgtcgtcgtatccacagggttata

SEQ ID NO: 436 - DNA, 780 bp, Zea mays
  misc_feature (688)..(693): n is a, c, g, or t
tcggagcatcaccgaggcgctggacttctcgcaggtccggtcggagaaggacgccgagctgctgtacgaggccagggagtccaccagaggtggagggaggatgacgagggagcaggtgtgtatcatgcaaagcaactgcggctcgataatgttatgttatcatccgtaatctgatttatttgttgtttgatttgcaatgaagtacggagcacttaggcggaagattggtggcacctaccaggatttcttcaagtcatatgttgaaggtatcttatctacacctttcccgtgagaatatttaaacgccaagtgaacaggcccgtatattgcctactggtattcagattagcactgcatcactgaataatccgtgtagttttttttggaaacaagtgtagtatgatgaaagattgaaagtagtgtccactgaaaatatattatcgcacacatccttttttattcctaacaagagagaatatcaagttatcgacgattgacgaccaaccaaattggtttcgaatttcagtcgacgggcaatacgtggaggagggttgggtcgacaagacctgcaagatctgcaagaaggacacaaggggggagccgaggcaggttgacaagctaggaagatacgctcacgttgcgtgcctggagaaccccaaaccgacgaactttttcgccaaaatcttcnnnnnnatgaactatgctgcgtccgtcgaaagcgttgtctcgctcgctcgtggttagagagtacaatatataggtagtgttgttgtggcttca

SEQ ID NO: 437 - DNA, 369 bp, Zea mays
agccgggcctatggtcgtcaccctctccttcctcttcctcttcctcttcttactccaccatctcctcggccgccaccgccgcaggaccaataatggcaagaacaagagaacgcagctgccaccgagccctcccgccatcccggtcttgggtcacctccacctcctacggaagcctatccacgcggcgctcgctcgcctcgcggaacgctacgggccggtgttcttcctccggctcggctcgcggcaagccgtggtggtgtcgtccgcggcttgcgccacggagtgcttcaccgagaatgacgtctgcttcgcgaaccgcccgcggttccccacgctcctgctggtttccttcggcggcgccacgctccc

SEQ ID NO: 438 - DNA, 710 bp, Zea mays
agtctattgttaaagatccagaatacgatgagttgttcaagctaatgagcacatgtggtcgactcttgaatgatgttcagagttttgaggtacattactgagttgcgagtcttaagctttcatgacaatcctgttacaggctcaagaaagtattagtgcgattaattatttaattagcataggacacaatgggtaattgagttagttttcattctcaggtgctattatttaataggtatatgagcatggtatactgaataataccactttagccttgactaattttaggaggtgttttctttgtaatcgagaaaaaggaaaacccttgtatattcaaaattgatatattgttgcagagggagtacaaggagggcaagttgaacattgtttctctcctcgttcttcatgatggctccatgtccatatcagatgccagatggaaattacagaagcccatagacacatgtaggagagacctcctaagactagttcttcgtgaagaaagtgttgtacctaggccatgcaaggaattattctggaaaatgtgcaaggtctgctacttcttttactcgagaactgatgggtttaggtcaccagtggagagggccaaagaagtgaatgcagtgatcaacgagccactaaagctacaagaaaaccatacacacatgtctgttttgtgagaggaaccaaatgtcgatgtgacgttttca

SEQ ID NO: 439 - DNA, 362 bp, Zea mays
ggactcccccaagtgctcagcgtcgacggagggggatgaggactcggcctccgccggctcccctccttccccgacgcaggcgccgcccgtgccggagatggcgaagctggacttcaccgaggcgccgtgggacgaaacggaggccttccacctgcgcaagtacccgtcctgggagatcgactgggattccatcctctcatgaacgatcaactacaactagtattttagtagtagtagcagcagcagcagcaaggttcagtcagtgatagctctgtgtaattttcgatttggggtttgcagctgcggtggatcgatggcattttagacatcggccatggcggctgtgttgtgatgcagaagta

SEQ ID NO: 440 - DNA, 258 bp, Zea mays
tctacggtctaccacacgaagcatcgtagccagccagccagctaaacccacaccacacatggccgggatcgtggtggtgttcgacttcgacaagacgatcatcgacgtggacagcgacaactgggtggtggacagcctcggcctcaccgacctgttcgagcgcctcctccccaccacgccctggaacacgctcatggacacgatgatgggggagctgcacgcgcggggcaggacgctggccgaggtgaccgaggcgct

SEQ ID NO: 441 - DNA, 590 bp, Zea mays
  misc_feature (576)..(582): n is a, c, g, or t
cccggcggtataccacccgagctcgggaggctgcgggcgctcgtccggctcgacatggctaactgcggcatctccgaggagatcccgccggaactggcgaacttgacgtcgctcgacactctgtttcttcagatcaacgctctgtctgggaggctcccgacggagataggcgcaatggggtcgctcaaatcgctcgacctgtcgaacaacttgttcgtcggggagatccccgcgagcttcgcgtcgctcaagaacctgaccctgctgaacctcttccggaatcgcctcgccggtgagattcccgagttcatcggcgacttgccgaacctcgaggttctgcagctgtgggagaacaacttcacaggcgggatacccacgaacctcggcgtggcggcgaccaggctgaggatcgttgacgtgagcacgaacaagctcaccggcgttctgccatccgagctgtgcgccggccagcggctggagacgttcatcgctctgggaaattcgctattcggcgacgttccggacgggctcgcggggtgcccgtcgctgacgaggattcggctgggagagaatttnnnnnnncgatgaac

SEQ ID NO: 442 - DNA, 1094 bp, Zea mays
  misc_feature (798)..(1089): n is a, c, g, or t
ctatttacaaggacacaaacatccaaaagcacactaaatggccatttcatcttcaccagaacatttggtgattggcaacttgggggcactaccagttttccttcacaatctttgacttctcgaatatgaattttccttccttgtatttctgcgtctcttcatatgctctcacatacttccagcccaacacctcacggcagtcattacagtagatatcagcaactgtgtgtagccctgtcatgaggtgtctatcctccttcgcccccacaactacgttcatggcatgagagaacagaaacgcacggccattcctcccctaaaacagaaaaaaaggaagaaggcatcatcatccaggcgccagcagaagactcagctagttacaaagaattttccagtccctaatgagtaatgacacagagcttacaaacggtttcagacacaatacttgggatcctggtttttggttgtgcgtttagcaccaagtcaacgagaaggtatccagtattccattcttcccagattcccaagctcccatttggggaaaaaaagatatccaaatgtgcccggaaaattacaaataaaaatatgaatggataggtgatgcaaagtttagttttttaaaatatctattaatggataggctctgtttggttccacccaactcaagtttagctaaggccctgtttggtttggggtgactaaagcttagtgactaaagtttaatcacttttagtctctaaataagcaaacatggtgactaaagtgaggtgactaaactttagttctttagtcaccaannnnnnnnnnnnnnnnnnnnnnnnnnnnnnnnnnnnnnnnnnnnnnnnnnnnnnnnnnnnnnnnnnnnnnnnnnnnnnnnnnnnnnnnnnnnnnnnnnnnnnnnnnnnnnnnnnnnnnnnnnnnnnnnnnnnnnnnnnnnnnnnnnnnnnnnnnnnnnnnnnnnnnnnnnnnnnnnnnnnnnnnnnnnnnnnnnnnnnnnnnnnnnnnnnnnnnnnnnnnnnnnnnnnnnnnnnnnnnnnnnnnnnnnnnnnnnnnnnnnnnnnnnnnnnnnnnnnnnnnnnnnnnnnnnnnaaaaa

SEQ ID NO: 443 - DNA, 442 bp, Zea mays
  misc_feature (368)..(368): n is a, c, g, or t
  misc_feature (430)..(438): n is a, c, g, or t
tgctcacttgggcggaagcgacgccgatgacatataaaacacgatccaacaagctcaagcctgtcgttgatcccctgtaaataacctgggtggcgttgctctttaggcagccgacagccggggattgctccattgaaataattcgccggcgtaaattgttgctgttccaggtgacatgatcgtatccctccctccctcccgttgtccctggaagtcattagatgttaccgctgtatatgtgcgtaacctgtgttgcttataagtccatctgagttgtatgccaagcactagtgaccaaataagtaaagtaaatttctcaagtgtctggtcgacctgggtgtcaagcgagggcagtatgtacaaatcanatggacttataagcaacacaggttacgcacatatacagcggtaacatctaatgactttcagnnnnnnnnngagg

SEQ ID NO: 444 - DNA, 532 bp, Zea mays
ccccttcggctccggcagcagcagcagtctcttcccctcgttcccgcggaccagctcggagaccgcggccttcgctggcgcgcggatcgactggaaggagactccagaggcgcacgtgttcaaggccgacgtaccggggctgaagaaggaggaggtcaaggtggaggtcgaggacggcaacgtccttcagatcagcggcgagcgcaacaaggagcaggaggagaagacggacacctggcaccgcgtggagcggagcagcgggagattcctgcgcaggttccgactgcccgagaacgccaagacggagcagatcagggccgccatggagaacggcgtgcttacagtcactgtgcccaaggaggacgccaagaagcctgaagtgaagtccattcagatctccggctagacctcggtctgcggtcgtcgtacctgcgtggtttgaggaacggcagttcgcctcggtcgttctgtgaaataaaattgggttacaagaattatggcgtttgtcaatatgatcgtaatgtcgtaggat

SEQ ID NO: 445 - DNA, 593 bp, Zea mays
caccaatttgtatcctagtggtaaaaagagtttggcgttacctgtttctaacaggatgcttatatgattacagcttgatgtaacgtcatctcaacttcttgtgacggatcgtgatttcaaggatccaagttttggggaccagctccgtgagactgttttttcactgttagatcttaaagtagtacccttatttaatgagaatgatgccatcagtacccggagacagccatatgaggtctgttttcttaattgcttctgcacggccgtacaccaaccttccaatctaataacagctgggcccttggttgtgttcctacttactactgattgtaataatgaatttaatttacaggattcatctggtatattctgggataatgacagtctagcagctctgttggcagcagaacttaatgctgatcttcttatcatgcttagtgatgtggagggactctatagtggtccaccaagcgatcctcagtcaaagattatccacacatatgtcaatgaaaagcatgggaagctaattagttttggagagaagtctagtgttggaagaggtggcatgcaagctaaagtgtctgctgctgcta

SEQ ID NO: 446 - DNA, 463 bp, Zea mays
gcgtcgacgaatacttggaggttggtaaactcacaggtctcatttgttgttatttctgaagtgttgctgcaactctgacatgcctgcactccatgggcaactgcagctcaagtacatctgcatgggcaacttgggttgagttctgaaatctggcctgaggctagaaacgcatggaagagatgatgaaccgagagaccaagaaggcaggcgtctagctacaagaccggaggaacatggctgaaaggggccggccactggttgtgggggagcagttttcgaataaagcgaataagccgcggaacatgaacaaaagaaagccgaaatgagttgtaaatgacgtgaactataaagtatggcttcgcctccggacttttgtatacgtaatcatggcactacttgtctatagtgtctccaaagacgtccatgttacagaataaaagcgtatagggtggatgctacgtta

SEQ ID NO: 447 - DNA, 721 bp, Zea mays
gagatcatcagaatcctcaccactaggagcaaacctcagctgattgctacattcaatcattacaatgatgcatttggccaccgaatcaacaaggtgcatacatatttcatcaacttatcttgttctttgctttataaaatcgtacaagatgtgaccttattctcatatttgtcctgcttatatgtgcttctgcattgcattcatttaccaaatttgtaagatgcatactaacattgcatgctgtcccttgtttacatgtataacgatccacatgaataaaaatcgctccttcatattctgaagcagaataataagctcacatgctcttaccgatatactctctgttcttacactgtgttataatacactgatgaatccattcgtctaactagtaatgaccatgtgtgagattgagcaagttgtttactcattttagtttttgttctcatcaagattaacctcatccaatagttagtgttcagacccagttttgataatttctatgttccttatgtctggatcagttgccttgtgttgttttgtccattaagatcgatcattttgttggtctgttatcatccgcagcttgttctgtttggcctttggcatagacttttcatgacgctctatcaaagctatccatgttcagaactgtatatacaactgtagtcgaaatttcttttcttgatcatttaatgggtccacatttccctcaagtctt

SEQ ID NO: 448 - DNA, 446 bp, Zea mays
tcgcggaggtaaaagtaaaacccatcattcggttcaggttcagttcagcagcaatccgttcgtttctgatggccttgttgttccaggtcatccggagctccatcgtcgggcttggtacggacgaggagtccctgacgagggcgatcgtctcgcgcgccgagatcgacatgaagaaggtgaaggaggagtacagggccaggtaccgcacgacggtgaccagcgacgtcaacggagacacttccggatactacaatgtcatcttgctcactctggtcggccctgagtgaatgaccatggatggacgatggatccatataggttgaagacattgtttgcgacttgtagtttgcttgaacaagatcacactcgtttttgtttgattgaacgaaacgacactagtgttgtttgttcacatatgtgtacagaactgctgagtgaaatggtga

SEQ ID NO: 449 - DNA, 373 bp, Zea mays
tgcccgggcgtaccaccacatgtacgaccgccccctggagcgcgccgtcaagagcgagacgtcgggcaacttcggtttcggtctcctcaccgtgctccgctgcgccgacagcccagccaggtacttcgccaaggagctgcacagggccatgaaggggctgggcaccagcgactcggtgctcatccgggtggtggtcaccagggcggagatcgacatgcagtacatcaaggcggagtaccacagcatgtacaagcgctcgctcgccgacgccatccacgccgagacgtccggcaactaccgcaccttcctcctctccctcgtcggccgcgaccgcacctagtgatgacgatgatcgctgtttcgtctctcatct

SEQ ID NO: 450 - DNA, 567 bp, Zea mays
agcgtcgagaaccggtgccgcttcgtggtcgaggtcgtggacgctctcgtccgtgaaatcggcgcgagccgggttggcatcaggctctccccgttcgcggactacttgaactgtgcggattccaaccccttggcgctaggtcactacatggtggaacagctcaacaggcacgaggggtttctgtactgccacatggtggagccgcgaatggccatcgtcgacgaccgtaggcagattccgcatggactcctgccgttcaaggcggccttcaatggcaccttcatcgccgcgggcgggtacgacagggaaaaagggaacaaggtggtcgccgaaggctacgcggacctcgtcgcatacggaaggctgttcttggccaacccagacctgcctaaaaggttcgaggtagacgagatcctgaacaagtatgatcgttccaccttttatacacaagaccctgttgttggctatacagactaccctttccttagggacgacagcgaagacttagctgctcaagcttaatggcgtggatgatcgatgtaatcacggttactgcacgatcgagat

SEQ ID NO: 451 - DNA, 1172 bp, Zea mays
tgttttactaaacaggttttgtaaaagtgtttgttgaacagtaattgtcatatatttccttaatgatgtgcacttgcagaaacatcaaagagtacgcagagttactggtaatggcaaccacaatctctcctatgcagggagagaccttcaactgcaagagacctacttaaaggtgcttcttggaaatagcagtcgaagcagcagtaccaatgcatcaagtacagtcaccgattcactgctaccctcactagttttaaatttatcatcaccagaagtagaagacgcatcaaagttttcagctcctgctgtggtggaaaataattggtttaaacgatcactgccttcaaaaacttggaaattaaggtatgatccatttgttctcctgtctcgcactataattaatttgctgggtcttgttctctttctttttgtatggtttctattcgatgtcaggtgaaatctcttagcctcttttgaatgaaaatgtgtattgcttaaattttattactaagccataagacatgtttaggtactcttaggttaaagttgcatagtggccaggttcatatctgacaagcttaatcctctcttatacatatgaacttaattttgactaaacatgcatgtagtgtaattttatgaaacatatttaattatatattgttcttcagttcttgattgttgaaaatttatttctgaaatagtattacaaatggggggtaaggcttgtctcggttattcctttcactcacgtggagctgttagcactgggtctttctttcttctattacaaatggtaccagatccagcacttctgattctcgtttagctagccatgaagtaagcttgctgaactgtagcagatttcaagaaattgagttaatgcatatacacacatgaaggtggaccacctatatggttagtggtagtaagtcctatacgaccccactttattgagtcttgtagtcatatatgttaaactaggtaagcatggtgatggatcatctcttatttgtatgtagatgagatgcaattactgtgggggtattttaaattcttctgagtgcattattttatgttaatgcaatacattttttttcagaactgttgattccacccttagtcatgaagagagggagcgtaggaggaggagagctgctgtgagatcagct

SEQ ID NO: 452 - DNA, 468 bp, Zea mays
tcctcctgctcgtttgttacaccggtacgccttcgccatgatatataaatatacatgcaaaaaaaacattgtgtagattacacatgtttgtttgcgttttgcagggacgcaaggcgggccggtgactatggtgtcggcgaggaagtgcgagtcgcagagcttccgcttcaagggaccttgctcgagggacgccaactgcgcaaacgtctgcctgaccgaaggtttcaccggcggcgtgtgcaagggcctacgccaccgctgcttctgcaccagggactgctagtactgcctcgtctcgcctcgcctcggctcgtgtcctgcgtgtgcatatatagccgcagcggatcagtaaaacatgcatgcatgcgttaccgaatatttggcagtaccagcaagttaatggattaaaatattaaataatatgtcatggaacaaagcctgttttgaacgtggaactgctgagtgcta

SEQ ID NO: 453 - DNA, 915 bp, Zea mays
taacccagcgatggttattggtcccctgctgcagcctacactaaataccagtgctgaagcaatcctgaagttaatcaatggtatgatatatatgtccgattaacttttaagctggcctgtttgtagagtagttgaaatctcatcgttttcatatcattgcagggtcatcgtctacatatcccaatttttgctttggatgggttaatgtcaaggatgttgccctggcccatatccttgcatacgaggttccctcatcaaatggaaggtactgcatggtggaaagagttgttcactactcagaactggtgaacattatccgcaacatgtatcctacccttcctcttccggacaagtaagttcatacaggtgctatttggttcatgaaatataacgtaaatgacaacgataataatgtacacttgagtactagtagtaataagtttgaataggccgataccaatatatagtgtggtatctgattacggttggagttaaacaaacatgatttaacattatcagttacctattacgttacaaatatgtgaaccaaacgacaccatattgcattaatcattttctgtatgtgatgccttcctcttattcacaaatgcaatgcaatgtatacatatggtttgtttggaacaagcaactctgtggtgttttttacttggttaatatctttagggacaagtgttttgctatgacttcagagcatcgtgatatgataaaaagcattgtcacttcgtcagcagtgtttgtcttagaatgaatgaaatattacttagaatagttcgtagaacgaataagataactaagagtatgttcctcttggcaggtgtgcagatgacaagccgtttgtcccaccctaccaagtatcaaaggagaagataaaaagcataggcatcgagtgatcca

SEQ ID NO: 454 - DNA, 691 bp, Zea mays
ctcgccgtccttctcctcctcgagtaagcggtgcgtgccctgcttctttcttcaattttcccccgatccatggctcgtgcgtgggttccctgctcctagctccactcccccgtccatggcttgcatctatgctgcacagctcggttgctgttgcagttcaacctacttgttactccaaaaagaaggcgggcttatccaagatattgatcaaaatttccaccttttcgcgtcgaatggcgatgaattgaaggatccacccaggccaagcactggtgctctgtgcttatcttttagcgagcgaagtggtcatttccccctctcttctttatgggaggaaaataggaaatggtgtgccaagtgtatcctcaaccattctactgttccaaacgtgcagtatacatcggcatacagtcgatccagttgcaacaccatagtacggtgctgctccatctccatccagtagctgtgcctgtatttttgtccttcagatttaatcttgcgtttcttgccccaaacacaggctggaagggaaggtggccctcgtcaccggtggcgccaccggcatcggcgaggccatcgttcgcctcttcatggagcacggcgccaaggtctgcatcgcggacatccaggatgaggctgggcagcagctgcgcgacgccctgggaggtgacgcgcagggcgccatgttcgt

SEQ ID NO: 455 - DNA, 545 bp, Zea mays
  misc_feature (535)..(540): n is a, c, g, or t
atggttgagatcaaccagaagatcattgccgtcggagagtccgacgaaatccccctagtgaagaacctgaagaggattcctcttgtcgcctctctggtgtccgagatcatcgccgcatacctcatgccccccatcgagtctggctcggttgatttcgccgaatttgagccccggctcgtttactgattctgtacaaagatttatccttgagttattcaccctgaaagacaagctgctggtgctttctgccgaaggggccttgaatgaatggtgaaaaccgctggatggttagaggatctgcatcttcttgtgttcttctgtaaaatactgagacttgggcagcataaaaagcttggcaaatttctgttgtgtggcatctccatgtaagtaacagtggactgcatgcagaagcgagcgttccagttttgcgacagaagggggcgtccgaagttgttgtactgctagtgaacgtcgaactagcatgataaaatgtatcccagcacatttggttgattgtgtaacactagaaagccannnnnncagcg

SEQ ID NO: 456 - DNA, 545 bp, Zea mays
  misc_feature (30)..(30): n is a, c, g, or t
  misc_feature (114)..(114): n is a, c, g, or t
  misc_feature (117)..(117): n is a, c, g, or t
  misc_feature (173)..(173): n is a, c, g, or t
  misc_feature (188)..(188): n is a, c, g, or t
  misc_feature (208)..(208): n is a, c, g, or t
  misc_feature (236)..(236): n is a, c, g, or t
  misc_feature (251)..(251): n is a, c, g, or t
  misc_feature (263)..(263): n is a, c, g, or t
  misc_feature (300)..(300): n is a, c, g, or t
  misc_feature (304)..(304): n is a, c, g, or t
  misc_feature (324)..(324): n is a, c, g, or t
  misc_feature (352)..(352): n is a, c, g, or t
  misc_feature (381)..(381): n is a, c, g, or t
  misc_feature (405)..(405): n is a, c, g, or t
  misc_feature (417)..(417): n is a, c, g, or t
  misc_feature (465)..(465): n is a, c, g, or t
  misc_feature (535)..(540): n is a, c, g, or t
atggttgagatcaaccagaagatcattgcngtcggagagtccgacgaaatccccctagtgaagaacctgaagaggattcctcttgtcgcctctctggtgtccgagatcatcgcngcntacctcatgccccccatcgagtctggctcggttgatttcgccgaatttgagccccngctcgtttactgatnctgtacaaagatttatcctngagttattcaccctgaaagacaagctgntggtgctttctgccnaaggggccttgnatgaatggtgaaaaccgctggatggttagaggatctncatnttcttgtgttcttctgtaanatactgagacttgggcagcataaaaagnttggcaaatttctgttgtgtggcatctcnatgtaagtaacagtggactgcatncagaagcgagcnttccagttttgcgacagaagggggcgtccgaagttgttgtactgctantgaacgtcgaactagcatgataaaatgtatcccagcacatttggttgattgtgtaacactagaaagccannnnnncagcg

SEQ ID NO: 457 - DNA, 1222 bp, Zea mays
atggagaggaggtttggtgagaagagaacccagccctgagcccctgagccccctccccccgctattgtaacaagaaatgggaactgaggagttctccttctcctcttgctgcatgctgctgtgctgactgagtcactctggactgagttcaggtaagtgggacggcgccggcgacctcaccgagaaggagatcatcaggttcgagaggaactccggagtggtcagcggcagggtgcgggagatccaggtgagtggagtagaagtagaacagaagtagtagtgtaggcgtgtagctggcaatgaaatgcgcagaatggtgtaggcgggaaatttggatccataccattaaaagatcaccactttggatccatatcattactatctcacttacatgtgggtccacatgagtcaatgacatgtggggtccatggtatatatctaaagtttggatcttttaatggtatagatccaattgttccgtcttcttttgctcactgcctgccatgtctctgcaaaactccccaccgcagctgcaaaactaccagaggaagatggagcagaagatgcagagggaagaggacctccgcatggggctcaagctgtacaagtcggtgaactgacagcgctatgcgattgcttgctttgcttcagttccggaaaaaaaaagtctctttggactaacggggggaaaggaaagaaatgcagggacgggaagtacgaggaggcgctggagaagttcgagtcggttctggggtcgaagccggagcccagcgaggccgccatcgccagctacaacgtcgcctgcagctactcgaagctgggccgggttcagtgactctcactggctgctcgctatcttgttcttcaggtctgctactctgaactgaaggaaggcggctcatgtcttctctgttgcttcgtttgtgcaggtagaggctgcgctttctgcgctggaggatgcgctcaagtcagggtatgaagacttcaaggtagtataatacttgttctgcagtatgaaacacatggtttgttgctactgatctgatggcacgagacttggtcgacttcttcttgcaggcagttcgcaccgacccggatctcgcgaacctgaggaagtcggaggagttcgagcccttgctgaagaactacgacgagtcgttcatcaacgagaacgccatcaacgccatcaagtccttgttcggactcggaaacaagtgaggcg

SEQ ID NO: 458 - DNA, 213 bp, Zea mays
gcgagcacaagaccagctcctaaggtcgcagcgtgtgcgtgtccgtcgtacgttctggccggccgggccttgggcgcgcgatcagaagcgttgcgttggcgtgtgtgtgcttctggtttgctttaattttaccaagtttgtttcaaggtggatcgcgtggtcaaggcccgtgtgctttaaagacccaccggcactggcagtgagtgttgctgt

SEQ ID NO: 459 - DNA, 837 bp, Zea mays
cagcatccaagtcgactgtttccattcctgatgatgctacgacggtgaaagaagcgcccgctcaggcacggaagctaaggtatattttatacacatccatatccatgctaaaatgaaacgctagtgagtcgacaggcttaacaaccacatcgttttttcgcccagtcgtggcggacaccatagtcttcatgttactttctggactactagtttagactttagagtcgggcatctgaactgtctcgtgtgacagggaaatcttatatgtggccgccatgcaaatctgagccagtagttctcgtagtcttgtagactagatagctcgttttgtttacccgttcggaaagatgcctcctgttgaataataaagtcttccaaccagcaacttggtttcattgaaaaaatgatgagcagtgtagtatcaaacttcctcttcgcccttctgcaacttgctgttttgtaaaacgcatagataaaagcaggctgtccacgcgaccattaaaccctgcccatcttaccaattgattgtacacacaacacagttcagtcatcagatgtgttctttttttttgtgtggcacagtatcgattcgtcgctcacaagtgaagaaagggagctgaagcggaagcaagcccgcgtcagagccacgttcgtgcaggacctgctgctctctactctattcggcgactgatgacgaaccagagcgagcctggtattatcactggaaggtgcagagttgatgtgggcgtgatgtatctttctaagttattgtaagccggtctctgtcttcacaactgacgatctgtgtgtggtacgcaccacgcacgcaagtcgcgg

SEQ ID NO: 460 - DNA, 388 bp, Zea mays
ccgcggagccaggtccgcgccatcggcccgctgctgacgggcctcatcgtcggcgccaacagcctcgccggcggcaacttcaccggcgcgtccatgaacccggcacgctccttcggcccggccctggccaccggggactggacaaaccactgggtctactggatcggcccgctgctcggtgggcccctggcaggcttcgtgtacgagtcgctgttcctggtgcacaagacgcacgatccgctgctcaatggggaaatctgacgaccatcagcccctgtgttgtggcgcatgatgcttcatgcttgtttctgtaaaacaggtcatttatctgcaagcatggtacatatattggccacggtaattagagaggcttgctgtaaagcagtag

SEQ ID NO: 461 - DNA, 778 bp, Zea mays
gacaggacattgttgcgctttctggtggtcacaccctggttggtggattattattattttttttgtcaacttttgaaagctggtgcttatgcacaattgtctctttcttgtagggaagatgccacaaggacaggtctgggtttgagggagcctggacgtccaaccctttgatctttgacaactcttacttcaagtacgtgatcttccttgatactgtgctgtactttgttggttaaactgaagacaacactgactgacagggagcttctgagcggagagaaggaaggccttctgcagctaccaagtgacaaagccctcctctctgatccatccttccgcccacttgttgacaaatacgcagcggtataatatatctttgatccttgtcatatttgtcgggatgggtttatgctattgttacctgggatgggttgatttgtaggacgaggacgctttctttgctgactacgccgaggcccacctgaagctttcagaattggggtaagcggtgctgatagatctatcatctatttctatgtattatgattctatgtattatgactgaatgattgtatctcttgcactatgcagatttgctgaggcgtaaagtgagagagaacgaaccagaagagtgtggtggctgtcgtcggccggccggccttgtgtttttgttgtctgcttttctcttgaatgaagatgtgatgaactcagctgaagatgtagtgtgtatgttgtcatggtttatttttctattttatttatctatctataatatcta

SEQ ID NO: 462 - DNA, 617 bp, Zea mays
caaacaacccagaacagacttggcttattccattcaccgattgacagggcaaccgtttcaagcagatggcttcatcagggcagcgaccttctggacagacggcctctccatcagaccagaccaccaggccttcacatgcgggtaggcgtcgagcacagatgcgtagggcgtagcaaacaggcagagagtgacagacacatggttcaggtcggcgaggctgaggaagtctccagcaaggtacttgcacttggtcaggcgtgcctcgtacacctctagcaccttcttcagcttctcaaggttctcatccacaactttctggtcggtggttcccccaagcataggactgatgaggacctggaagaggatgggattcagtgcagcggtgtactggttagcctccacctcgatccaaacatccaccattgctgcctcctcgaggtttccttccctcaacagctctggcttgtttttgcgagcagcgtacttgcagattgctcgtgattctatatagcacacagatggaaaacatttaattaagaataaaactaggaaagcaacatcattagtagatgcaaaatgattctacagcactagcatttgactatctcttttttttt

SEQ ID NO: 463 - DNA, 371 bp, Zea mays
tatgaagcggactaggacatcgccggaggggaagaagaacgggacatcgccggaggggaagaagaacgagagcctcttctgatgcttgacttcgtgtacaagttgtagctgaatgttcctcaaaatataggattaactagttctgtaacactaacaccccggcttggttatgacttagaaactgttaggccatgtttggttcacatctcctaaagtttagtcacttgtttaaaaatgttaaaggaggtaactaaaaaaaaaacctcttaaataggacattatagggactaatgtttagttcctaaaatttaggagatgactaaaggaaccaaacatagtttactaagccttagtaaacgtgtgaataaatg

SEQ ID NO: 464 - DNA, 478 bp, Zea mays
tatcagattgaagaggtatcctcttctgcactgttctatcttctttgaagcccagtgatgctgtttaccaaatctgctttccaggcatatatggttttaatggttattacaacttgcctttctttgcatgggcaggtggtgtttcgatgttgaacttgtatacctgtgcaagcgcctcaggatcccaatggtagaagtatccgttaattggaccgagatacctggatccaaagtgcgcatgacgagcatcatgcacatggtattcgagctcctgctgatcaaagtaggttatggactggggatatggaaaatcggctcgtagatccttgacattctatgctgactagtttctgcaactcagtttggaggaatactgtacaattttccgcaaaacctagttggtcgccagcaaatccatttggaggaatactgtacaattttccgagactttcaaatcgagagcatcaattcacatgta

SEQ ID NO: 465 - DNA, 1263 bp, Zea mays
  misc_feature (1156)..(1156): n is a, c, g, or t
  misc_feature (1165)..(1167): n is a, c, g, or t
  misc_feature (1257)..(1258): n is a, c, g, or t
cgggcagcggcggcgttcgcggctctcgcaccgccgcctccttcggagctaaggttcgttgcttccccacaccccaccagctcctatgcctgacgtgatgcctcctagccgtgatacccgagcccatctactgtcgccttgctactctatccgcggttccgccgcttccattcccctgctagccccaccggctgccacttccatggtcggcggcccgcacgtgctgcctgctgctgccctgggggggaagggggtataggattagatggctgccgcctgccgctgacggctggctcgaccctgcggctggctgggcggttgaataatggagttctgtggtagcatgttttgtgtggattattatgtttcaaaccgcgtggaaatggatgcagttcataggatgtcaacggctcagagtgaggtgttcctcggctgggtgtttgtactttgtagggccttccttttcatatatctccctgcaaggcaataacaatcgtaccatgtgtttggtgtcctgcaatggtcgggtctgttgcttcttgtttttttgactccttgtgagatttctggcaggttgcgatttgtgagctcccattccaccccatcagctcagagtggctaggaggacatggtgggacgtaagcatctcctagatgttttcgtgcatttctcgtgcttacttaaaatattcagctaatctgtttggtatattaactacattctaaatcgacatgttcataatgattttattattgtcctagttgcgtgatacgtggttgcgtacctaaaaagatactcgtgtatggtgcatcattccgtggagaatttgaggttagtcatgttactgtcttattatggtagaactaatgtgggtatccaaaatggttctgaagcggctaacatggaatctaaggacacacttgccttcattgtagattgtatatgaactgtagttttgttacaaatgcaggattcgaagaattttgggtgggagattaacggagatattaacttcaattggaaaacgctattggaaaataaggtcaggtttaaatctctaccatgactgtgagcatgttctccgcaactgctgaccctgaaggaatatcatattgcccaaggtcctaattttttcttctcttcagactaaagaaanggttagatnnnatggtgtgtatcagaggatccttcccagtgccggtgtgacaatgattgaaggggcaggcagtctagttgatgctcatactgtgaagtagnnagccc

SEQ ID NO: 466 - DNA, 962 bp, Zea mays
ccctctgtcagcacatatagcatgcatctgagcgattgcatgcctaaacaatgtaactgttgtttctttacaatgacacacagtggcctgaccaactccaactacacggagcttgcccagctacacgagatgtacaaggaccagggtgagtacgtctcggtcggtcggtcgcctttcagagagacatcgatcgaatccagtttctcttctggttatgcccgttttcctcatgtaattaattatttgggtcggttatgattcataatttggcgtacgtgacgacggacgaccttcagatttcgagatccttgcgttcccgtgcaaccagttcggcgggcaggagcccggcacgagcgaggagatcgtccagctcgtctgcgctcgcttcaaggccaagtacccgattcttcacaaggtaaatttaattctgtgcgcgcaaacctttcttataaatttctgggttttcttcttcttcttcttcttcttcttcttcttcttcttttgcatgtccaagctgaaatagacaacgatcgatcacatgcaattaataacaacacgtgttttcggcgtttgttttttgccggccgtaaggtcgatgtgaacggcgaggacgctgcgcccatctacaagtttctgaaatccagcaagaccggccccatgggcgaagacatcaagtggaacttcgccaagttcttggtggacagacaggggcatgtcgccgagcggtatgctccgaccacctacccactcagcatccaggtgagtgaggaggcgcgcgcggttcagcttcctcgatcggtcatctcatgtgatcttactacagcactgacttttttgcgtacccgcagaaggacatcaagaagctgctcggcgggagctattgaattgaatatccggagacaatataatagatagatgcatgcactgccacttgaaacgcctgaaataagcttgctatgttt

SEQ ID NO: 467 - DNA, 1077 bp, Zea mays
  misc_feature (58)..(58): n is a, c, g, or t
  misc_feature (666)..(666): n is a, c, g, or t
  misc_feature (704)..(705): n is a, c, g, or t
  misc_feature (727)..(727): n is a, c, g, or t
  misc_feature (946)..(948): n is a, c, g, or t
  misc_feature (997)..(1001): n is a, c, g, or t
  misc_feature (1059)..(1060): n is a, c, g, or t
  misc_feature (1072)..(1073): n is a, c, g, or t
ttgtccctccttgatatagaatattagtttttatctgtgctacttatttcaccgtcanagacatagacatcttttgtttacgctggatagaaaacattattgctgtacactgctaatcgctgcactgttttcgattgtttcagtggcttaaccaactccaactacactcagcaggcccagctctatgagaagtacaagaaccaaggcttgttcttgattcattgctcttgtatattcttagggttgtagtgcttatctggccttatgcaatattggcttatctttatccaactatcggttgttcaccaatttaaacaattccagttgttggggatgctaattgctaagtataattgtcaatttgtgatatatatatgcaggctttgaaatcctcgctttcccgtgcaaccagtttggtgggcaggagcctggtaccaacgaggagattgcccagtttgcctgcacacgcttcaaggctgactaccccatctttgacaaggtaactgtttttcctcaaccagaggtccagagctatctcagtgcaaatatacagttatctaacttagcaggatgatgtgaggatgatatcactgatggtcctaactcctaagagcttgtttggttaggggtggattgaaagaaattggagaggattaaatctccttntagtcaaaattgaatagaaggggttttaatccccctcnnccccctccgatccctgtcaaancgaacaaggcctgagggtagaatggtcagttgtggggtagtactgacctctatctcttatcaggttgatgtcaatggtaacaatgctgcgcccatctacaagtttctgaaatctagcaagggtggccttttcggcgacagcatcaagtggaacttttccaagttcttggttgacaaggaggggcgtgttgtggatcgctatgctccaaccacttcaccnnngagcattgaggtaaactgccagcgctgcaattcacatttgctataagcnnnnnactagtatgctattgtcatcgttataacgtttttttaatataatctctgtagaagganntcaaagaaaggnngttt

SEQ ID NO: 468 - DNA, 909 bp, Zea mays
gaactgtttaccagacttgctagcttgctagggaacttttggtcctttttcttagataaggtactctgaacagtagtctcgtttacctggcagctagaataatattggatattacttacgctaatttctagacgatgcaaagatcgcatggcagaatacatcaatttggaaactaacaacatgtggtagaaatacccttagtcctataactcgacgatgcgttgttatattggtttttagttggccacaatcagacaagttgcagaagcgtgtttaaagacgcaatctgcatctgcatctcaccatctaaaaagtacgattaatcagccatggtgagaatttgctggcacgcgtattgatattttggatagacctgacaggttgacatcaacgtgcaaaccagagctgtgtgttcttatattgctaataattaagaaagctgattgcattctaaactcgggttttgcaggtgcgcgtaaacgggccagatgcggcgccggtttacaagtttctgaaagctagcaagcctggtttgtttgggtcatcaaggatcaaatggaactttaccaagtttctggtggacaaagatgggaaggtcatcgagagatacggaacctcgacagctccaatggcaattgaggtctctttccctctctgtctctgtctctctctccctctccagacgtctgcctacgttttctttttgatgcatggattcgtgtttcttggactctgcagaaggacatccagaaggcccttgaggaataatttttgtgagcttgtctcgtctcatccaccacacacttgcagcagaaataggcacttgctgaaatattccgtcgtagtaacattcagaccggacgtctttgcttatctgtagtaaaaattctgtgtaatgttaccctcctt

SEQ ID NO: 469 - DNA, 596 bp, Zea mays
gaccttaaagctagtaacattctcttggaccaggatatgaaccctaaaatttcagattttgggttggcaagaatctgtagctccaatgatgctgaaggaaacacaaagagggtggtcggaacatagtaagaacacatgagtttatcaacattgttagcttgtttcctcttaattagtattgggtgatcaagcaattctaatatgttaggataacatttttatcttgcttaatataatgatttcagtggctacatgtctccggagtatgcctctgaaggcatctactcggtcaaatctgatgtgttcagctttggtgttctacttcttgagatccttagcgcgaaaaggaattcaggttttcaccaatatggagactttcttaaccttctcggatatgtaagtatatgctttctccacaaaatgcacgcaagttgttatggcataacagctgtacagatcatggaggcttgatgagctttctgctgttctgcagacatggcacctgtgggagataggaagatggcttgatcttgtagaagcatccatttcgaaagagatgcatgaagcagaggctaggcggtacattaacatcgcac

SEQ ID NO: 470 - DNA, 721 bp, Zea mays
  misc_feature (655)..(659): n is a, c, g, or t
  misc_feature (685)..(693): n is a, c, g, or t
  misc_feature (704)..(713): n is a, c, g, or t
cgtgagcaagagcagaaatactttgatgaaatggttcagaagtgcaaggtaaaaactaggctgcttttagtattacagaatatcaatgttgttgatacctgattgatgatgtttcttgcatgcataactaccatattgttctggaagtgacatttgtagttgaaatagtttatgttgttattttgcttagttacattatttctcatggttttgtagcaagtacataatcaattttgaaagacgtcctcaaatattttaattggctatatgggtatttgaagtattcatttaatgtggtgtttttgttttgctaaataatttattaattgtctacatattattgtctgtaggatgctggtgcaaccctggttatttgccagtggggttttgatgatgaagccaatcatttattgatgcatagaaatctgccagcagtgagatgggttggtggtgttgaattggaactgattgccattgctacaggtcaacatgctgctatatctcactctttatgtcattattatgtgactatgaattgcatgtcgttacattcccttacataaccgactgcaggagggcggattgttccgagattccaagagttgagtcctgaaaagcttggaaaggtataactcttctgtattcgttctttagnnnnnaaaacagctgtttgaatgtttctgannnnnnnnnatacttggatnnnnnnnnnnacttattt

SEQ ID NO: 471 - DNA, 555 bp, Zea mays
ggaagtagcagcaaatgcgcacgttggacaggatcatgtattgcatcacatacgtggttttggtgtagcgttggatgttcttatcaactacctaagttcagaatatggaaatgcatttgagcttggtatgttaatgccttgagcctttgaccacagcaatgtttcatattttgtttgaagactgtgggggtctgtggtacctgaccttatatgccactgtaacttgtcctgatatatatatttttaaaaacagctaggatatttgcgtttttatctggtccacccaattatggggctgggcagctggatataaatgaggaccaaaattctggtaaagcaaggggtgctgatcatatattgcttcaagaccagacaagtttctacagaaatctggtaactttgcacaaagatcagtcaatatactatgataatattttagaatatatctgattggcatatcacaggctactagtgctgttcaagcaggtgtatgcgtggacctttttgcaattacaaatgaatacactgatcttacttctctgaaagttctgagtg

SEQ ID NO: 472 - DNA, 757 bp, Zea mays
tgagagctatactggcaggtatctctattggaaattttcaaagctaacaatgactccaactccattgttggagtggaagcacgcttactgtcaattccatttaaaaaaaatcctttgtggtagatatactatgaacagagcgccattaaaaattctagttagatgcttcctgaagctctgaggctttctaattcgccacttcgttgaaaacagaaagcagcggtatgtctactgcactatacttgacagcattgcgaaggtgactggcatcataaagtttgatctgcatgctgaaccggaaagtggtgtgaaagaacttgaagtgggaggaaatgtacaaggcatatatgacctgggacctggtagatttggttcagaggcgatttttgttcccaagcatccaggtgtgtctggagaagaagatgacggctatttgatattctttgtacacgacgagaacacagggtactctttttcttggctctgcatcctcttatcctgcacatatcgccattcatagaaggcctgaaatgtctaatagacaatggttttgatgatgccgaaaactcaagaacccaacatgtgcctcttgctcttggtgtttcaatttgacggttgcaatttggttcggcatgtgttgttattgtggatgcaggaaatctgaagtaaatgttatcgatgcaaagacaatgtctgctgatccagttgcggtggttgagcttcctaatagggttccttatggattccatgccttctt

SEQ ID NO: 473 - DNA, 708 bp, Zea mays
ttcaactggtatacccccattttagccagtgtctggctattatctactccttttatgtgcttctctcatgacctctttgtcctgtgggttttttttgttttgtatcttgcaggtttatatccacctgttgagaagctcctggaacagtgtggtaaattccaactttttgacaggttgctaaatttcctgatggcgcaaaagcacaaggtatatggttttctctagtcactgtatcgtatatgcacactagttcaggtctgctacatttatagtatctcatttcaactgtgtttctgtttgtaggttcttgtattctcgcagtggacaaaagtgctggacattattgaatattaccttgattcaaaaggccatgctgtttgccgaatcgatggtaatgtgaaactggaagaaaggaggaggcaggtaatgttgtagcccgtgacagtatgttaattgttactgcaaccattgttgtaaaagctaaaagacgactgccattataagatgtgctctgccgcacttgtgtgcatttttcggtgaggggagaggcaatcttgaagcagttgttttgttaccatttcctcatttaagttttggttgcttctatttttacatggcagatagcagaattcaatgacgtgaatagcagcatgcgtatcttcctcctgagcacaagggctggtgggcttggcatcaaccttactgctg

SEQ ID NO: 474 - DNA, 531 bp, Zea mays
caccgccggtaccacgaggagacgggcgtgaccttcgcgtcgctctacccgggctgcatcgccaccacgggcctgttccgcgagcacatcccgctgttccgcctgctcttcccgccgttccagaagtacatcaccaaggggtacgtctccgaggaggaggccgggaagcggctggcgcaggtggtgagcgaccccagcctgaccaagtccggcgtgtactggagctggaacaagaactccgcgtccttcgagaaccagctctctgaggaggccagcgacgccgacaaggccaagaagctctgggagatcagcgagaagctcgtcggcttggcgtgatgcccaccgtggccggcgccggcagccggcgacagtttttcctacctaggacatgctcattagttggtctcactctcagtcgagtagtcgacgtgtggtgcgcccgtgtcagagtgccaagccaagacagaaagtgagtacaaacgtgtaaaatatgtgctactgcgacgtgatggtttgggcagtggactgtat

SEQ ID NO: 475 - DNA, 350 bp, Zea mays
taactggatcaggctgctgcatccatcaccacggccggtttgtgtgcagcataccgccactgtcggatcccacaaaacagatgcagaatccaaattagcatatcgcagacctaataatccaataaccacaatcaaacagcaaggctaacgacactacacaccaaatgaccattagggtccaatccagagcgtggcgcactgcagtaccgtaccacagtaccagcgccaccattgtacttcagcagccgtcatatgccaatggcattgccagtgacacaggcaatgcatggctaatagtggactagtggtaggtagttgctctccgtagggagcaccatattacaggtgca

SEQ ID NO: 476 - DNA, 482 bp, Zea mays
tccattttcagactgagctagttcagctgtcatttttttttcagccaaaggtcgcgttcttttggacctgctcttgattcgttcgttcgttcgtttggattgattgattgattgattcctttcgacttcccttcaccacccccctgctccgtcaagcgtgcctctgttcttctgccattgctggatcgcgtttgtctgtttgttgggttgctggcgctgcggccatggatcccttccacggcattgtgaaggaggagttcgacttggacttcgacttcacctgcgcgtctgcggcggcggcggcggcggcctcgtgggccgtcgccttgccggagatgccccggccgatggaaggactcggcgaggtgggacccactccgttcctgaccaagacatacgacgtcgtggacgaccccaacaccgacaccatcgtctcttgggggttcgccggaaccagcttcgtcgtctgggacgccaacgcc

SEQ ID NO: 477 - DNA, 482 bp, Zea mays; identical to SEQ ID NO: 476

SEQ ID NO: 478 - DNA, 368 bp, Zea mays
ggcggacggcgacgaggggcatggcggcagtggggaaggccccagcggcccagaagtgaagccaatgctgttcggcgtcccaatcggggccaagcggctacgcggtgcgcgtggtgatggagacgatgtagatgacggtgaggacaacgacgaggaacaagatgaagacgacgagaggcaaacggcgcggaagcagggggttaaagcggccaggaggaacgagacgtcggatctggacgtgctgacgctgtccgtgcgggcggccgcggcggcgaggacgggcggaggatcacgtgaccgcaaaagccccattaccgcccaccccgataggagcctcagcctagggctgaaatgactgacactcgtgt

SEQ ID NO: 479 - DNA, 489 bp, Zea mays
tcgctcgtgaggcgcagcaacgtgttcgaccccttctcgatggacctctgggaccccttcgacaccatgttccgctccatcgtcccgtcggcggcctccaccaactccgagactgccggcttcgccagcgcccgcatcgactggaaggagacgcccgaggcgcacgtgttcaaggccgacctccccggcgtcaagaaggaggaggtcaaggtcgaggtcgaggacggcaacgtgctggtcatcagcggccagcgcagcagggagaaggaggacaaggacgacaagtggcaccgcgtcgagcgcagcagcggccagttcgtcaggcgcttccgcctgccggagaacgccaaggtggatcaggtcaaggctggcctcgagaacggcgtgctcacggtcaccgtgcccaaggcggaggagaagaagcctgaggtgaaggctattgagatatctggttgagcatccaatccaatatggacgtggaaggaaggt

SEQ ID NO: 480 - DNA, 628 bp, Zea mays
  misc_feature (505)..(505): n is a, c, g, or t
  misc_feature (516)..(527): n is a, c, g, or t
  misc_feature (538)..(542): n is a, c, g, or t
  misc_feature (583)..(590): n is a, c, g, or t
  misc_feature (592)..(611): n is a, c, g, or t
aatatatgaattcccatgctcacttttatctgatggggttcgaaattcacttcggtaccttaaacttcgttgttgtgctctccgtcccacagttgaacttgcccccatgagaagcctaacaagtttacatttgtcctttgtgagcattaaatggaatgggttaaagcgcctcctttccaactcccttgctctggaggaattagagctagtatgttgtgacaagatcgtttgcctcaagataccttctgccctgcagcgtctcaacagccttaatatttttggatgctcggccctcaaagtgctagagagcaaagctccaaatctctctagtctttctctttcagattttggaggcgggctagtcttctcacttgtgaaaacattgcaaatgaagaaactaatcactgaaagtactgtctatgatgctcgtaccaggctgccatccattatgcccaatcttgaaactcttgtcataaactcatgtcagcaggtatatatatatacnctatttaaagnnnnnnnnnnnngatatgaatgnnnnncatttgtgattatctagtgcataagttatctgagatgcatnnnnnnnntnnnnnnnnnnnnnnnnnnnncaatgctgcctaccaaa

SEQ ID NO: 481 - DNA, 613 bp, Zea mays
  misc_feature (591)..(592): n is a, c, g, or t
gacactgctcccgacgagcgccaggaagtccgtgaagttgggcacgtacatggcggcgagtccgacgacgacgaccagcagccacctaagccaccagcagtaccgcttgccgtggagcaggcgctcggcgacctcgtacacggggttcatcatcaccggcatcgtgaagaagaggttgatgcagagccccagctgcacggcggccgacagccacccggctccgaggttggtggtgatgatgtcccgcgtggcgtcgccgaacgcgacgtagcccatgacgccgaacagcccgtacatgacggcgatgaacgccatggacagcccgagcgtgacgccgaacttgctcttgttcgccgcctctgcctccagcggcagcaccatgccgatgccctcgaacgcgtacacggagacgccgagcccgtagagaagcgcgccagcgccgccgaaggcgaccacgggcacgggcttggcgagccaggcggcgacgtcctggccgaggaccacgcccatggcgccgaggtcaacgacgtcggcgaagatgctgagcggcgcaagcagcgtcagcgtcttgatggagttgacctcggcgcnntgggcgtggtcctcggccagg

SEQ ID NO: 482 - DNA, 571 bp, Zea mays
tgcgtcgtcttcgatttctcggacccgaacaagagctcagtggagaaggatatcaagaggcaggcattgctggatcttatagagtttgtcgagtcgaccaacgctcgcttctcggaggcagccatcgcggcctgctctaggatgtgtgccatcaacctgttccgggcgttccctccgagttgcagatctggctcatcaggtggtggtgagggcgacgaggaagagccaatgttcgaccccgcgtggtgccacctgcagcttgtttatgagctgctgctgaaatttatcggatcctcgtccttggacgcgaaggtagggaagaagcactttgatcactcattcatcgtgaagctccttaatcttcttgactccgaggatccaagagagagggattgcttgaaaactattctgcacagggtatatgggaagttcatggtacaccgtcctttcatccgcaaagcagtgagcaacatattctaccagtttgtctttgagactgatcggcacaatgggatcgcggagctgctggaggtctttggcagtgtcattagtgggtttgccttgcctctga

SEQ ID NO: 483 - DNA, 456 bp, Zea mays
gccggtcggtttgtatgcaactacgtgtactaccactctcttcggttcgcggagcaacacggcatcaaatccctgttcgtgcatgttcccctcttcttgacgatcgacgaggaggtccagatgcacttcgtcgcttccctccttgaagtcatcgctttctcctccaactaggaacagcagttggaaggtgcgtatgctcagctttccttcctgtccagttcattgctgtaggacagaatagcagagtgagcgtaacactgtcctgtccgggttggtttcctgtttgcagatcagcgtctggattcctatctcaaggatggatgtaaagctggaatgctgcatgtaggctgaataaggtggtgtggtcattggcgatagatgttaatcttgctccacaggttgtgtttgggaatcgggagggaaaaaaagagaggtcattggcgatagatgatgatc

SEQ ID NO: 484 - DNA, 521 bp, Zea mays
gtaactgaggaagttgctccggtcgtcaccgtctccgaggagccggcgccggaagcggcgaaggaggtggtggagaagccggaggaggggaagaagcccgacgaggagggtgacgagaggaagaaggccgaccccgccgccgagaaggagaagaaggcgaggaagccgcggagcaggaagcccaagtccgccgggctgcaccacccgccctatttcgaggtgagcaaagatgccgtcgtcgtcgtcgtcgtcttgtcggttactcatccgtgcttggattctcattctgatgatcggtcgctgtgtctgctggggacctggggtgatcgaggtcagatgatcaaggaggcgatcctgtcgcaggacggcgggaaggtcggggcgagcccgtacgcgatcgccaagcacatgggggagaagcaccgggacgtgctcccgcccaattaccgcaaggtgctggcagtgcagctgcgcggcttcgccgccaagggccgcctcgtcaaggtcaaggcttccttcaa

SEQ ID NO: 485 - DNA, 375 bp, Zea mays
ccttgcctttcgtcgccgtccagctccaccttctcgtccaactcctcgtcaaactcctccagcgcctacaccaacacggcaggaagagccggcggcgagccctccgagcctgcttcggccggagaagggtttgatgcgctcgatgacatcgaccagctcctcgacttcgcgtcgctttccatgccgtgggactccgagccgttcccgggggttagcatgatgctagagaacgccatgtcggcgccgccgcagccggtgggcgacggcatgagtgaagagaaagccgtgccggaagggaccacagggggagaggaggcctgcatggatgcgtcggagggggaggagctgccgcggttcttcatggagtggctcacg

SEQ ID NO: 486 - DNA, 694 bp, Zea mays
  misc_feature (674)..(677): n is a, c, g, or t
  misc_feature (684)..(689): n is a, c, g, or t
acaattttgtcatagacgtttatattttgggttgtagaacttgagtttagttatttgattgtctttgccttgtttttgttattatattctgcacttgtgcaacattgctaccctacagttacatttctcgtgggcatgccatgacaggttgcagaagccgaagacaaaactcctgggggccttatcctcactgaaacaactaaagagaagccgtccataggaacggtgagagttcttgccagcagcttgtctataagaattatgtatttctcttctttgcttgcgctagttgcagcttacatgtgtaggagatagcactagcagaagttaaaaagctctgtttcgtcgggtgcaggttgtagctgttggcccgggtcctctggacgaggaaggcaagagacagccactgtcagtgtcggcgggcagcacagtgctgtactccaagtatgcagggagtgagttcaagggcgcggatggcacggcctacattgtgttgagagcgtcggatgtgatggctgtcctgtcttgagcatttcgtttccggctcgttaatgtagtttgcagccaatagttgtcatgtggtatgaaacgatcgctttgtggtggtcatcacaccatgctggtgatcatcacaacatatgctgatactgttccggacaatcggctagaatttnnnntgtggcnnnnnnaaacg

SEQ ID NO: 487 - DNA, 394 bp, Zea mays
tgttcgagatgcccaccggcggcgccgccatcatgcgggagggccccaacctcttgaagctggcgcgcaaggagcagtgcctggcgctcggcaccaggttgcgctccaagtacaagatcacctaccagttctaccgcgtcttccccaacggcgaggtgcagtacctccaccccaaggacggcgtctacccggagaaggtcaaccccggcagggagggcgtcggccagaacttccgcagcatcggcaagaacgtcaaccccatcgacgtcaagttcaccggcaaggccaccttcgactaatcacacttcacgtacgccgcacgccccagccgggatccaaattaaagaacttcttcttctattaattacagtatattgtaatttagctgctggta

SEQ ID NO: 488 - DNA, 276 bp, Zea mays
gctggatgccaaggtcctgagcaaaatccccaggggtgcggtcaaatccaaaaagcagaactagttaggataagccgcagattgtgaatgcccgtatcatgagtatcgggcttgtggttttgcatggcatatgtcaatctgtctgttggcttcagcttggttcttctgcgactactttgttgatgttattatagtcctatgtatgtcactgtgtacatgacagagatgttcggatgctacgtctagactactgctgtgctgtagcttgtaaattcc

SEQ ID NO: 489 - DNA, 1032 bp, Zea mays
tgagttcccaacctgccagcatgtcttgttttttcttgaactcagttggttacactgctgccttagcatacataatgctaaggagatagtaagcatcgaatactgattttgcttgacaaattgagttgtacgattgttgatcagactacctagccatttggaactcagtggtttccacatacttgggtacttcgtacttcgcagttaagagaggaaactatgctctgctgtctgctaatctgtaatttatcaagaacaaacagtgttgtgggttacttgactgacagcaactgatgaaggattgaaacaacctcctaattaaggctgaacaaaatgaactcattttagcttaaagacagtgaaatctgagttaacgattccagttcctcacaattcaatttgaaccaatttattcacatggctttctttgagttcaattgaagctgtgcaggataatctcctactaacatctggttactgcattttttttgcatttattaggtccagaagcatatgcagatccgaatggaggcgaaccagaagtacatcgacacgatactagataaggcgttcaagatagtatctgagcaactgagtggcttcagcatatctgaccaagacctaccgattctcacctctgctagggccatgcttagccctgcagatcacttgagttcgtctgtcttcccccagctctccgtcagctccgttagccttcacaatcctggtcctggaggagggaaaggccttccgcatgttgccgacagccacgtgttctcccagaggccacctgaacaattcaagcgcaaatcacgttgagaagcattgctagctcgacgcagatgcatgacctgatcaagggcacactggaaaatcagaggaatttcgtctgacatgtgcacggtgcaatcgttcacccatcctcccgtagcacatctgtgaaaatcaaggttatcttggtctatttcggtacatctagactgacctttattaatatctaatgtaatgcctaagtggactagataagtaatt

SEQ ID NO: 490 - DNA, 456 bp, Zea mays
gtccgatcgcaagaagcaagcgacaatgtcgccggcgcgcagcagcagcagcaacgtcttcgatccgctgtcgctggacttctggccgtcgtccgccgacccgttcggcgtcgtccggccgctggcggagcagtgccccgtcctcaccaacgtgcgcgtcgactggaaggagacccccgaggcgcacgtgttcagggccgaccttccgggcgtcaggaaggaggctgccaaggtcgaggtggaggacggcaacgtgctcgtcatcagcggcgagcgcgccagggaggaggaggagaaggaggaggccggcaaggacgaggcgtggcgctggcgcctcgtcgagcgcagcagcggcaggttccagaggcggttccgcctgccgcgcggcgccaggctggaccaggttcacgcgtccatggagaacggcgtgctcaccgtcaccgtgcccaaggagga

SEQ ID NO: 491 - DNA, 1297 bp, Zea mays
actggtgaacataagttttttcttgataattatgtttttaacattgcttgcattttatttttgatctttttgtcaactaaaaacatttgcattcaacctatccaccttccagttctatgtggaaaatggggagctatcttgccagatgtatcaacgctctgcagacatggggcttggtgttccattcaacatcgcatcatattctctcctgacatacatgattgctcaagtttgtggtaggttttaaatgccttactctaatatttccccttagtccaatgtttattgtgcaccttaatacaaaccttattggttgtactgtatatcagtattctagtttagacttaatttaatttggaaccatttattctgcactttgattttcgtttttacgtgtagcaataaatcttccattttatttgtcataccgcacacacaagtctcggggctatatgttttcgaatatttgtcgcccgctagttcatttttgtactaaaacgcgacaaataaaaaagaacagagggagtagatatttttgtaacgagttgtgaataatttgtttgctgcaagaatttgtgatgccatctttgtatgttgtttgtcccttcttttcttctgatgtttcttgtacctaactgatagaagccagtagcatgtttttcaactctaaccctttgtgtcttaactttaaccttttgtgtcttaatcttgcaagatctttctcctggagattttgtccatgttataggggatgcccatgtctatagaaaccatgttcgagcactggaggagcaaattcagaagatgcctaaaccatttccagtgagccactcctaatagaactgttttgatgtttctttttgtttactttctgtgaccatgcatcttctaagttctatgtgggccttatgcacagattttgaagataaatccttcaaaaaaggatatagattcttttatggcatcagacttcaagctggttggctatgacccccaccagaagatagagatgaaaatggcagtgtaatggtaatatagatatcctatcatttctcctgatggattgtcattatcttttgtcattacaagtttgcttgctcgccggcacaaaacagagttctagttctcgttagtatgcatttttgggattaattttatctgtcaattacatggacgcttcatgttgtcatgcactggtcttttcatcgatttgtcactgtagagtgtggaactagatgcatataggcagcaaaattttggtatagttgcttcacgctttgctttgttaatttttgca

SEQ ID NO: 492 - DNA, 1017 bp, Zea mays
  misc_feature (631)..(633): n is a, c, g, or t
  misc_feature (675)..(677): n is a, c, g, or t
  misc_feature (995)..(1000): n is a, c, g, or t
tgcagcggcagcgagggggagcagacgaagagggcgaggagggaggagaagaggaggcaggcgaaagggaaggccgtggcgcctcagatcgacacgggcttgttcagcaacgtcccccctgagctgttcctgcagatcttcaagttcctctcctccgaggacctcatctcctgcgctctagtctgccgcttcatgaatgctgccgcgtccgacgagaccctctggcgtcgcctgtaagttggctggggaggctgcagtatcgattcgttgccaaatgtggcgcaactcgatcgagacttacatattgcatgcctttccgatgttttttccaggtactgcatgaggtggggactggcctccaatgccaaattcagggagtgcgcttggaagaacctctacatacaggtaaattcatccgctcatcatcactgcttctaattcgaggtagtcagggtctcagggagattttaaatgacatttttagttagttttagtgctcacaggtgatttggatatggtctagttacatgctgtaaatgtgaaccaatttgggcactaggtgcaggtcgttgaagtgcaaagtttccatttttacgccatgctcagcagaacaaaatagtagtattgttgnnnaatatttttgtttggtgctactgttgtattaatgaactgctnnnaatgtcgtttttttgttgtgtttaatctccagagagatagagaggatatggttgaatttgtgaggaatactcctacagagttcaaggagtactatattcagatgcaggctgcaaaaaggagtcaagctccccgtccgtcagaagtaattactaaattcagactcttgtttaatctctgtcacatgtccatcttgtagtctcccttcactccaacaaaattgtgttgtgttgatgaaacttcaagtgctcttcatatggattttgaaggtcaacgacgacaaggttatgcttgataagacagtagctgaccaggtatcnnnnnnaaaaacagccgggggct

SEQ ID NO: 493 - DNA, 783 bp, Zea mays
  misc_feature (772)..(777): n is a, c, g, or t
gcatctcttccgcgtcggaaagatcttgcgagtgaaggtcatatgttccattcttccttatttttcccagaacacagctccctcatgctgttggagctgcctactctctgaagatggacaagaaggacgcgtgtgccatcacatactttggggacggtgggacaagtgaggtagatgaaagctctccagccactgaccagtcgcttgccagtgccattatatccagccttcctgacagatgaacatttctcagggagacttccatgcagcgctcaacttcgcggctgttatggaggcaccggtgatcttcttctgccgcaacaatggctgggccatcagcactccgactactgaacaattcagaagtagcaacagcgtgtcttcatatactgatccatggcagttacaagtaaacaatgcaatgtcgtgttaaaattctagtcgtgttgcaggtgatggagttgtcatccgtggccaggcttatgggatccgtggcatccgagtagatggcaatgatgctcttgctgtgtacagcgcaatccatgctgcccgagaaatggctgtaactgaaggaagaccaattttagttgaggtgctcagtagatccatggagtttcattacctgaaatgcacaaaaaaaacttcagtatataattaatctgagtatcgactaatgagatttcaggcactgacttaccgagtcggccatcactcgacatccgatgattcgaccaagtacaggccagttgatgagattgagcattggcgaacnnnnnngggatc

SEQ ID NO: 494 - DNA, 519 bp, Zea mays
gtgctggtgggcaaatcgcagcgggtgaaaggcgcggaccacgcgctggagagcatccacaacatcagggaagcgctgccggagctgtgggaggaggccgagaaggcggaggacgtgctctaccccgaacgcgttgcgatggagacctcggtcaccgcgtaaaacccctgaatgcctccggtgcaccgtcagccgaactttctcgacatctccaggaccgcatcaacgatcacatgtcactcgctccccgagccagggccggtgatgatctcgcgctggaactgaatccaccagcaatggccgggccgaggatcgatttccgacagcaggaagggtgcagcatgtaaagggggaacagatgagatcatgtttgtttgggttggtcccccgttgtatatgtagttatgtatcagccagtcctttgtttgtaaattaccagtatttagaagtaataagaaaatgggggtttacgtgtacgtttcctgtgctctgtcatctgaagcaataaaactggttagc

SEQ ID NO: 495 - DNA, 519 bp, Zea mays
  misc_feature (301)..(301): n is a, c, g, or t
  misc_feature (332)..(332): n is a, c, g, or t
gtgctggtgggcaaatcgcagcgggtgaaaggcgcggaccacgcgctggagagcatccacaacatcagggaagcgctgccggagctgtgggaggaggccgagaaggcggaggacgtgctctaccccgaacgcgttgcgatggagacctcggtcaccgcgtaaaacccctgaatgcctccggtgcaccgtcagccgaactttctcgacatctccaggaccgcatcaacgatcacatgtcactcgctccccgagccagggccggtgatgatctcgcgctggaactgaatccaccagcaatggncgggccgaggatcgatttccgacagcaggangggtgcagcatgtaaagggggaacagatgagatcatgtttgtttgggttggtcccccgttgtatatgtagttatgtatcagccagtcctttgtttgtaaattaccagtatttagaagtaataagaaaatgggggtttacgtgtacgtttcctgtgctctgtcatctgaagcaataaaactggttagc

SEQ ID NO: 496 - DNA, 457 bp, Zea mays
cttccgttccctagatagttctcatgtgattattatccactgctactgctatatatatggcctactatacagattgatcctgcgctgagcaaagcctacgcgttcctcctcaagagcatttgcccgtcaaacagcggccggttcttccccaacacgacgacgttcatggacctcatcacgccggccaagttcgacaacaagtactacgtcggcctcaccaacaacctgggcctcttcgagtcggacgcggcgctgctgaccaacgcaaccatgaaggcgctggtcgactccttcgtgcgcagcgaggccacgtggaagaccaagttcgccaactccatgctcaagatggggcggatcgaggtgctcacggggacgcagggcgagatcaggcgcaactgcagggtcatcaaccctgctaatgccgccgccgacgtcgtccttgccagtcagccagatt

SEQ ID NO: 497 - DNA, 658 bp, Zea mays
ccgccgccgccaagaaggggtcgcttagggtaagcccatctttttctcggaattgaagacgggtccgttttaatttgatctgcgctggacgaatttagctaatagtctgatcgaattgaatcgtcgtgcagttggatgactgggtgctgtgccggctgtacaacaagaagaacgagtgggagaagatgcagctggggaagaccgccgtcgccggcgtcggcgccaccaaggaggaggcgatggacatggccacctcgcacacgcactcccactcccaatcacactcgcactcgcactcgtggggcgagacgcgcacgccagagtcggagatcgtggacaacgacccgttcccggagctggactcgttcccggcgttccaggacccggcgatgatgatgacggtgcccaaggaggagcaggtggacggctgcagcgccaagagcggcaacctgttcgtggacctcagctacgacgacatccagggcatgtacagcggcctcgacatgctgccgccgcccggggaggacttctactcctcgctcttcgcgtctcccagggtcaaggggaaccagcccgccggagccgccgggttgggacagttctgagctgaggcgaggatggagccatggatcaggagatgaagacggttgcgaactct

SEQ ID NO: 498 - DNA, 336 bp, Zea mays
gaactgactcccaggggagatacccccggggaggtcattgctcccgagcccgcaaagcttcctgccgctacaaagcctttggtcaagctggggtcggaggaaaggtcattggtctctccaggaagatgagacggtccgatgcttccgttctgtatagttccatggttcttgatgtgtacaggttgtagcttctcatggtagcagagtgcaggctaaggttttttacatgtgaagcctgcccacctgtcgtcccgtagtttggctcggttgtactagcaggtagcaataagtggtgctgtggagctatgtcttagggaaatcgtatggtagttgcat

SEQ ID NO: 499 - DNA, 616 bp, Zea mays
ctgataatgagtatctgttttgccttgcacaatgttagttggctatttttctgtgaggtaaattgcctttatgttggaggttgccattcacactgtccatttccggggcatcaggtgccatcatggatagctttgctgtttgtggcattgagctgccatcatcatgggttgctatgttaacaatgcttgtatactgtttaagacaattcaactcttaacttttgtgtttttgtatataagtttaattttcttacctgtatgctcgcaggtacctctgtgcaagtgaatactgaattggaggagaatcttaggtagggaatatagataacaggcgctccatatataaacttcgttattaggtgctgtatggactatggttcacatatttgtaacgtgaacggtaaccgataatgttaaaacatgtttgtttaagtccaaccgtaatcagataccacactagaaactgatatcatcctaaatcattattcttgcaatttaagttagtggagaatctttagcgggcagggctagcaactcacaatgtgaagagtgggcgtagccgaacacctcaagactggtttcatggctgtattacatgccaagtgcttttccgacg

SEQ ID NO: 500 - DNA, 510 bp, Zea mays
ctgcagcccgggacagaggacgcggaggccgtcgcgctcgggctcggcctctccgacttcccctccgccgggaaggcggtgctggacgacgaggactcgttcgtgtggcccgccgcgtcgttcgacatgggcgcgtgctgggccggcgcagggttcgccgacccggaccccgcatgcatcttcctcaacctcccgtgacagccacagacggtcacggcgccgaggcgtacgtcctcctgctttgctctgctctgcgcctgatgatgagtgcaaggaaatggagcgctttgattcttctgctattggttgcatctgctaattgatttagcagtggtggtaaggtacacgcacgacgagctgactgcgtggttcttggcttgggccttagtatatgatgatgatgacgatgatactagttgtatgtgtgacgtgagagacgatcgcgacgacgaccttgaattttagtttctgagatgagaaaggtcaactagtggcctctgtatgacttta

SEQ ID NO: 501 - DNA, 199 bp, Zea mays
ctcaaaagcaccaggttaatcccttctcctaacccaactcacgtaagaacctaagacactaggcctgcgctttacacaaaatgtctagtaatagcagccagattagtgaccaaaaacttcctacaaggctctatcccgtaagtagaggggcgctacccaagggcgcagcagcaatggcggaaactcattttccacagta

SEQ ID NO: 502 - DNA, 1129 bp, Zea mays
ctctgttccttttggtttgcgcactctcccttcatgcaaacttcactgaaatgacaattgcccactaataggaccaatcagatacttcattttactgctttacctttggaatgcaggctgaaactgattctgatgaagtttatgctcaaattatgctgcaaccacaaacagaggtgagtaggttcacgtatataatttcttgtggatctcaatcctctcactgcattattgtccgtttctttgtatgttcagtatagtactgtatctcactcatgatctttcttttttgcaatcaacttttctaactatattgcacagtcagtattacatgtgaatgtgttgacttattttcctaattcactaaattagcaaagtgagcccaccagcccagatcctgaaccacctgagcctgaaagatgcaacattcattccttctgcaagaccttgactgcttcagatacaagtacccatggtggattctctgtcctcaggaggcatgctgaagaatgtttgccccaactggttagcgccataatttataacatacctgggtgcagtatttgagttacggctttttaagcgggatgatttttatctgcaggacatgactcagaatccaccgtggcaagaactagtggctaaagatctccatggaaatgaatggcatttccgtcacatctttcgaggttagtttctgatctcaatgtaccagttaaacctactttttagttccatagtattatagtgttgtttttatagttctgatgtggcgttaattttgaatgaacttagttcccctgattcaaaaacaaatttcctgtgattattttgatcacaaacattgatgctttcataatgatttagattactatgaactcttgaagtatttgctgtttcttttagggcaaccaaggaggcatctacttacaacaggctggagtgtttttgttagctcaaaaagattggttgcgggtgacgcgtttatcttcttgaggtgtgacagaattgcatgttgaagctgtcttgtacatttatggatcaacctgctaactgttcttcatctaacagaggtgagaacggagagctgcgagtcggggtaaggaggctcatgagacaactaaataacatg

SEQ ID NO: 503 - DNA, 423 bp, Zea mays
gtggcggcttctcggtgccgcgctactgcgccgagaccatcttccccaagctcgactaccgggccgacccgccggtgcagacggtgcttgccaaggacgtgcacggggaggtctggaagttccgccacatttaccggggcacgccgcgccggcatttgctcaccacgggatggagcacgttcgtcaaccagaagaagctcgtcgccggggactccatcgtcttcctgcgcactgagcatggcgagctgtgcgtcgggatacggcgtgtcaagcgggtgtcctgtggtggcatggagtgcatgtctgggtggaacgccccggggtatggggccttgtcggcattcttgaaggatgaggagggtaagatgatgaagagtcatggtgggtacatgagaggtagggggaaggtgaagatcacggatg

SEQ ID NO: 504 - DNA, 407 bp, Zea mays
ggggcagatttgtgaatgcttggcaagtccagcgtattgcctacccttctatttgcggcggccttggagatttatgttacccactgccactgatggagtcggaaagccaggtcatggccatgatattggagcagatgccaccgcgtacaagtgcttctcctcccaacaacccgccgcgtccaggtccaggccaaaaagtgaacaccataatgctcttcggcgccacaatccacgttgtgcagagtgataccgacgatgatggttatgaacagctgaatcgagatcctcctcctaatgctgctggtggtggtgatgatatggatcatgacagtgctgaaaatatataaactctgattctgtaatccatccattgcttgaaaatttgcaattgcatcgtgtggaactaa

SEQ ID NO: 505 - DNA, 669 bp, Zea mays
ttttctcaggtcagcaagcatcatgtcaaccgaattttaaccctatagccgttttggttttgcattcatccagacgtaactccttcacttgaattgtttcaggatcctctcagagctagtgataaggtattgactagttgtggtccatacatgatgaaggaagaagatgctatggtgtatagaaggccataccttgtctctggttcctcggggtttgcacttaatgcaataagcaaagctatgaaaaaggaccttaaggtttttctctttatctatctctttgtgttttgttttagttcatatgttctaaattggatgtttttaaggcttatattgaatccatgagaagcatattaagaagcagttcgtggaaaacaaagacaacagtatgctggggcatgagagatcgttggctaagctatgatggggtggaagatttttttggaggcctaaaccagaagattgtagaactgccaatggtttgtcatgaaaacccagctattttcaactttaactcattttcatgactatttatgcatggggtggtgtggtttgtgtagcatgcataaggacatgtggttgtatgcgtgaacgaagaacacattttctggatttatttcttccttttccttcatttgatattatattgtcatatcattttgtgcaatg

SEQ ID NO: 506 - DNA, 876 bp, Zea mays
atttttgccggccctgtctccggtaagacggattccgattccgttgttttcttgccaaatccttcgcagcttgggggcggtttcgctccggttcttgcgcttcggctccaggccatggagcagcggaggtggctcgcggtagccgttttgatgtgcctgctggtgctttgctccgggagaggtgggttgttggcccttctttggtcctcccgtttctcgctgccggaaaggaaaaaaattgtcttttgaatcggtttcccctaccgtttcgtgcaagcggactctgcctgccggttgattttccttagtttatgtattgcacatttcatcagattcttattttacccgtaccttttggattcagaactgaagaccaaacatgtgcccatatatgacccagtgctggcccggacacttgctgaatatacttctgctgtgagttcacctgaccttcttgatgctgtcatcattcacatccacatccacgttggattatgttattgttgaatacgtcctttttctagtgaaatatgctgcattcatcgtggagttgaacttggtgcttttgtgcaggtctatactgctgaccttacccaactgtttacatggacatgtgagagatgttgtgacttaacagaggtattttatatttgtcatcaccatctgacattctataattttaccaatggttttcaaattcacatttggcttggtttgaaatcttcattaaatttatttggtagctcaggggttcgaggtgatagagctgattgttgatgtgaaaaattgcttacaggttactgcttctgccagtgcacctgaaccgttttctttttacctagtaataggcttttgattatattgatgatgatgtgt

SEQ ID NO: 507 - DNA, 519 bp, Zea mays
cgtttggctggacccactcgccgtactggagcgaggagagggagaaggaggttccgaccgccgaggcggtagctggagtgctggactacatcaggagcctggggctgtcggacgaagaccttggcaggctgctgaagaagttccccgaggttcttgggtgcgacctcgacggcgaggtgaggccgaatgtgggcaagctggacagtgactggggaataaacgggaagaccctgcggagccttctgctgaggaaccccaaggttctgggctacaatgttgactgcagaggggattgcatggcccagtgcacccgctgttgggttaggttctgatgatgattggttttgttcttcgtcgccacatcgttggtcaggaacttgggacttggttttgcttgctggccatttttctgtaagctagcacctgtcgaatgtagcacaatcgctagctgctggatattgggttggccactgttagttcttatgtacgtacaacagattcaagagctaaaccatgctg

SEQ ID NO: 508 - DNA, 921 bp, Zea mays
gttttcggtgaagtttgacagttctgatattcctgcgtctggtgatagggcctttggggcttacatagctccagtcaaagggaagacctcaggtaaactaaacagaggcttgccatttcaacttcattgtacaaactgtaattggtaagaccctagtgacctcaggcaaactgaaatactgaatactctctccgttctaaaatagtattcgctttggcttttgatttttatgtctatattcaattggatgatgatgaatgttgacacatatatagaacacatacaccaagtattgtatgaatctaaaggcgaaacgaattttattttgggacggagggagtactccgtaatgtttgcacaaagcaacagctcttatactgaacaatgaccagttagatggttcctttagctgtgtgtgattattttcattgaacattcataacttggcctgccactgttgtcttttgttatcacaattcactgcattgcacaatatgctacacctgtgtactttttctaagctatagtaatgcaaaatcatattccttatttttattcaaaacacgtgtgttttggggtccactcttgtagaaagagttgaagatgttgacctgctgattaggagggcagagagatgcttggaagcaggcgctgatatgatcatgatcgatgctgatgatgtttgccagcgtgctgaatctctgaggacagacatcatcgccaagattgtaggccggctcgggcttgataaaaccatgtttgaagcttccaactccaacacctcggagtggttcgtcagacgttatggcccaagggtacggactcctctccctcttggaaagcctcaagctgactaatgctaataccattgtttctcattgttcatttgatcccgatgctttgacatgtgtcggtctgcaa

SEQ ID NO: 509 - DNA, 554 bp, Zea mays
ggttcgagtcctccgaagtcaagtccaccccgttgcagccctacagcgaggtgttcggcctccagcggttccgcgagtgcgagctcatccacggccgctgggccatgctcgccaccctcggcgccctctccgtcgagtggctcaccggcgtcacctggcaggacgccggcaaggtacgtgaatagctagctattaagctatgcatgcatgaatccatggagttcgttctcgatctgctctcagacgatctaaccaacctgcgaattaatgtgacggccggcgtacacgtacgtgcaggtggagctggtggacgggtcctcctacctgggccagccgctgccgttctccatctcgacgctcatctggatcgaggtgctcgtgatcggctacatcgagttccagcgcaacgccgagctcgacccggagaagaggctgtaccccggcggctcctacttcgacccgctcggcctggcggccgaccctgagaagaaggagcggctgcagctggcggagatcaagcacgcgcggctcgccatggtcgccttcctcggctt

SEQ ID NO: 510 - DNA, 481 bp, Zea mays
gctagcataatatcttcatgttgggataggtaaggctcatttaatttcccccatctatatcatcccactttgtgctagcataatatctccctgtgttgctcgccacactcatgctgaactcccccttttttttcagcgatccgagcaaaaggccgtcgttctcccagctcttgtcccctctaaagcaactacaacatttagttgttacagaaagctgctgacatgcgtttcctgggacaaatctcaggatacatatattcaagtatttaagctctgttacagggctaaaattttcttttttgaagctcgtggaggagtctctgcggtatagatgtgtttgggcgaaggttctgcacatcagtaatcatcaccttgtgaaaatgcgagtctctgaagctgtgcaaaggcgctgctggagaaagcgtagtgtgtagtctcaagtgaagaaaagtggtgcgacacaaagtgttctgtgccatgg

SEQ ID NO: 511 - DNA, 337 bp, Zea mays
tcccctactggatccgcatgcgcactgacaataccatcaggtgacggccgcgacctcactatctcctgctcgtctggtctggattcggccgtcgctgaccccgccgctccattccgtgccgtttcaggtacaacgccaagcgcaggcactggcgccgcaccaagctcggcttctgagcgtcgggattggccggctgctgcgtcggaaggctagggtctaagagctatcttccttctgttttatcaatgtgtcagtttttctgtaagctagcaagtgttgctatgacgcttttattaagattctggtgagcggtgatgttaagagaaaattggcacta

SEQ ID NO: 512 - DNA, 411 bp, Zea mays
ttggtggttcgtcgatgccatgtttgctgtggagacccagcttctggacagcatgaacaaaagcaaggagcatggcttcctcggcttcaggaacactgtcagctctttcaacacatggatcgagaagctgaaggtcttcaagattgttccctaataataattcatccttgctattcacttctatactgttgttctgcatccttattatcctgctcatttatcagcaccagttctcttgtaatttagttccatttcaaacatcttgctatctgtgccaggtttgcatgttatatactagggacaaataaagatcaacacattgcaaaataggttattcttgtccagcatgggtttgattgaaattgtttgtgtattgaattactagctgaaaccgttcttgtttacgagcat

SEQ ID NO: 513 - DNA, 522 bp, Zea mays
gcaggggaagggggaggaggacgaagcgaagcggcgcgcgcggcaggtacgcaaccgcgagagcgcgcacctgtcgcggcagaggaagaagcagtacgtggaggagttagagggtaaggtgaaggccatgcaggccaccatcgccgacctctccgccaggatctcctgcgtcaccgccgagaacgccgctctcaaacagcagctgggtggcgctgctggggccgcgccgccgccgatgccgatgtaccccacgatgtattctttgccgatgccgtggatgcacccatcgtatcccatgcgtggatcgcaggtgccgctcgtgccaattcctcggctgaaacccccgcagcctgcacctgctgtagcagagccaccggccaagaaggctaggaagaccaagaaggttgcaagtgttagtctcctggggttgatttgcgttgcaatgctttgtgggtgtttgattcctgcagtaaatcggatgtatgactctgttgatgctggagaaggtgctgcatacggtcc

SEQ ID NO: 514 - DNA, 307 bp, Zea mays
  misc_feature (270)..(270): n is a, c, g, or t
  misc_feature (282)..(282): n is a, c, g, or t
  misc_feature (300)..(302): n is a, c, g, or t
agtgcagattggtggagctagtgaagctgaagttggtgagaaaaaagatagggtgacagatgctctaaatgctgcaagggctgctgtggaggagggcattgtgccaggttcaaattttttctcgagggatcatctccatcagatctcctatatcatctcctatatgtattatttttaggagatctcctaaaaccagccccctctcccctaaataaaggagagaaccccttctcctctatccctatagaaatatgagacaaattttagggnaatctgctgcancagcgctctcttataacnnnttata

SEQ ID NO: 515 - DNA, 784 bp, Zea mays
aggaaagtcacgatacatcagactacaacaaccctcatagcagatgcagccagtaaagatgagatccaggcgaggattgcacaactgaagaaggagcttgctgagactgattcagtttatgatactgagaaattggccgagagaattgctaagcttgccggtggtgttgctgttatcaaggttggagctgcaactgagactgagcttgaggaccgccaactaagaattgaggatgcaaaaaatgccacttttgcagctatagaggagggcattgttccaggaggtggtgcggcatatgtgcacctatctacggttgtccctaagatcaaagaagcaattgaggaccctgatgagcgtcttggcgctgatattattcaaaaggtaacttggctagcatatttataaactgatcagtgcctatgcagttagatggtatgaactgtatttgccagaggtccaatgttgttaatatgtttatttgtgctggtaaatgtgactaggatccatcatctattatgtgcgacactaagttcatgagtagacctataccgtcgtagtgtgtgttgctggcattggaattttttagacaattcagactagttcttgtcacagtagacacatatactggatcctttagagcaataaatcacgtttttacattatcttctctacttgtgcaggcgttggtagcacctgcttcattgattgcacacaatgctggagtagagggtgaagtggtagtcgagaagatcaaggagagcgattgggaggtgggctacaatgc

SEQ ID NO: 516 - DNA, 368 bp, Zea mays
  misc_feature (357)..(357): n is a, c, g, or t
ttgacagatcagggaactgtagcctttgtgagattaggcccaaagatatcctgatcagtgaaacacctaatttttctgccattgttccttttgcagcatcatatccatttgagatatggattattcctcgacaacatatttcttattttcatgaaatagatcaagataaggtatggagtgtttttaaatcagctagatatttcattttttactgaccaatagtccaatagtggtttagacttgtgtatacgaatatcactacatgttttgaagttcaaacttcccttcatattttctcttgtcgtacctttttcgagttcctgttaggttattgataaacttctgtgccaatagttnaatgcatctgc

SEQ ID NO: 517 - DNA, 262 bp, Zea mays
  misc_feature (250)..(257): n is a, c, g, or t
cgcggggctgagagggtcagggttggttagcagcagcagtaccggcttgttcgccggcgactgcaagaggaaggctcgtcgcccggcgtgctcggcctgggccctcaggcagagccggatcggcagcaggagcaggatcaggagcaagaggggcctcggcatcgtctgcaacctcgcgggacagtacgaggattccttcgacgacgtccagcgggtacgtcaaaaccaaactagtttcatgtcagcagtnnnnnnnncttgt

SEQ ID NO: 518 - DNA, 751 bp, Zea mays
  misc_feature (697)..(697): n is a, c, g, or t
  misc_feature (699)..(699): n is a, c, g, or t
tgctcttcgacggtgccaccctccctttccggttccgtccgcgtcttgcgaaatcaaaactcctaacctgccagctgccgtgctctgtgcttgcaggcgtctgcaacctctgcaacggcggcgtccgcttcgtgcgggagcacgaccccaacaggtatagccgcgctgctcaatcctcagtcaaagcaacagcgattcagccgctgaaaggttcttcccatgggttcgcaactccaacaggagcatcaggtacgtgccgctgcagagcgagtccgggaggaagctcctgcagaggtcagggaggtcccctgacgacatctccagcgttgttctcgtcgagaaagacaggtgccccaaccataagctcccttccttcaagaactgttgaatgctagtagctagtactagtgtactacagattgctagcttatgtatgacgatgatgataaggtgctcgtcttacgatgagtcttgcaggtctttcatcaagtctgaagcggtgctgaggataatggagtacctcaacctgcccttcccgcagctcgccgtcttcctcaagttcgtccctctgtaagctagctccctcctctgctgtccagcttaattaatgcactttttttttatgattcgcacaatcagttaatcagtttttcaacgaaatgcaactcctccctactgattctgttgcggcggttangntcctgagggacttcgcgtacgacaacgttgcgaacaacaggtacgccatgtt

SEQ ID NO: 519 - DNA, 548 bp, Zea mays
cgcggcgagggagccaagaggcgcctgcgcagcctcgtccagcgcggggaaatcgacgaagcgctcgtgctcttcgattccatggcctccggcggcggcaggaactgcccgcccgttgtcccctgcaacatcctcatcaagcggctgtgctcggacggccgcgtctccgacgcggagcgcgtgttcgcggcgctcggcccctccgccaccgtcgtcacctacaacaccatggtaaacgggtactgccgcgccggccggatcgaggacgcgcgccgcctcatcaacggcatgccgttcccgccggacacgttcacgttcaacccgctcatccgcgcgctctgcgtccgcgggcgcatccctgacgccctggcggtgttcgacgacatgctccaccggggatgctccccgagcgtcgtcacctacagcatcctcctggacgccacctgcaaggagagcggctacaggcaggccatggcgctcctcgacgagatgcgcgccaagggctgcgagccggacattgtcacgtacaatgtcctcatcaatgccat

SEQ ID NO: 520 - DNA, 513 bp, Zea mays
tttgaagctttttgggaagacagttatcatcccagacccaaagaaagtctgttcctcggatgggggagctggagatgatacacaagaagtgatgcaaacatcctgggttggaggaggggtggcagcataccctgcccataacggatggtttcttccgttccattctttccctgctcatatgtatgagtcgggggatgctaggatttcccctcttcatatgtggtggccttactacggttttccggccggccatccaagagggtttggcacagggctgcttaacgaaggcaccattgagagtgatgccgacaatagcccatcggttgaaactaattctgatcgcacgggcaatgttcatgttcagacgacgacccctaccattcacaacaatgctgtcaaggagtcagttgggccagttgagatgccagagtcgggtcctagcgttgagctgaaacccagcgcgaactcggcctttgtaagagtgaagccgagcagcagcgtcagcggagacca

SEQ ID NO: 521 - DNA, 508 bp, Zea mays
agcaaggtgtaccgcggccagctcggcgatggcagagtcgttgccgtgaagaagcttaggccgctaggaggcacggacgaagacttggagttcctgtcagaggtacgcgaactagactgccaaagcagcagccttgcgaatggcagggcagcaccagccattgcggttcctcttttcatctctgcgacaacgtgtgctggatgatattatgcgtagatcgagctgctgtcgaggctgaaccactgccacgtggtgccgttgctggggtactgctcggagagccagggccggcagctggagcggctgctggtgttcgagtgcatggccaacggcaacctgagggactgcctagacctgaagcgagggaggaagcccatggactggcagacgcgggtgagcgtcgcgctcggcgccgcgagggggctggagtacctgcacgaggcggcggcgccgcgcatcctccaccgcgacatcaagtccaccaacatcctcctggacgacaagttca

SEQ ID NO: 522 - DNA, 361 bp, Zea mays
cccgatgggaaggagaccatcaccgacgtgaaagcgcgggtgtcggacctggagaaggagtgcaagagcatgaagcaggagatccggcggctcgggaagccccggcggtcctggagcctcctcacaaggaagtgcggttttggggccaaggtgcaacaagcgcagactgccatgagcggcaaatagattattttcccacttcatttgtttattttaggcaggagcctcgatttcattccctaaggagtcttatcatctgtttgctacagtaacagttcctaatctagccatagctcctagtgttatgcaataattacgtgcggatggtttgcaactttgcacgggatgataataaacgtaa

SEQ ID NO: 523 - DNA, 971 bp, Zea mays
ctgctgcatgcttccggttattgcactgcatatgcctctctgctgcacgagagtgcaaaaatctaacagagcctcgttccctttaatttgcttcctctccagggtttgcaggacaagatggagctggtggccatcgatctgcaggacaaaccggcttggtacaaggacaaggtttacgcacagggcacggtactgtttctcggatgttcctgtctagctagctaccactaccaccctgagcatctccgtgaacactgcactactgtttctcggcagcaggtgccttccctggagcacgacagcgaggtcaggggcgagagcttggacctgatcaggtacatcgacagcaactttgacggccccgcgctgctcccagaggtacggtacctaccccaccataccgcctgcagtcagtgcagctagctagcgtaacacttgcagagcagcagactgaggatgtgctggttttcctgcaggatgctgcgaagaggcagtttgctgacgaactgttcgcgtctgccaacgcgttcaccaaagccctctactcgccgttgctgtcccacgcggccgtgtcagacgaagttggtaagaagaccgttggccattgcttagacagaaaggattgcgatttgggatcattggcacagttgctgacatagctcgaactcgacgtttcttcttcgccagttgcggctctggataaactcgaagctgacctatccaagttcgacgacgggcccttcttcctaggccaattcagcttggtacctcgctgcattcttcccggcctgaaacgtggtttgatcgcccaagatattttttttactctttctaataacaatatgctcgaccccccttttcaggcggatgtagcgtacgttacgattctggaaagggttcagatatactattcccatcttaggaactacgacatcgcccaaggcaggtccaacctacaggaatcatcgacg

SEQ ID NO: 524 - DNA, 202 bp, Zea mays
gccgcccagctaaaaatcccccaggcgttcctgagcacccgtttatcatcacatgaccggagtcggccagaatttgccgtagctctcgcccccgctcgccgtgcgcttctcgtcccattcccccgggatcgtagattctcgagctgagctgagctgagctgagctgagcgatggatcgcgagctcagccccaggggcaatgc

SEQ ID NO: 525 - DNA, 491 bp, Zea mays
agacgcgctgtttcagctacagatacagccagtaagtgtatagctagtagctgtagtgacatgcatgttccttttcatgcaacaacaatcatgtattctctgcagcactctcaactcagcccttcttttttccttgctgtatttttcagtcaagcgagagcatagatgcagcaataggtgatgtcttaacgaagccgtggctgccgctgcccctcggactgaagcccccttcggtagacagtgtcatgggcgagctgcagaggcaaggcgtagcgaatgtgccgcaagcttgtggatgatccccggggctgcatagctgctagctcgtccctgcacgcagtgcaacaaaaggaatttgtcgacatgccttttatgttttgaattcccgtgaaccgtttatggagcactctcaactcgttcagggtcagatgaacagaacattataggagtacattctttgaggtttcaggtttgagggaaatcaacctgag

SEQ ID NO: 526 - DNA, 912 bp, Zea mays
ccattggcacacatgatgtttgccggggctgacttcattatcgtcccgagcaggtttgagccatgtggtctcattcagctgcaagggatgagatatggagtggtgagacttcctagctccgctttgttacagcagttcagattttttgttacagttcagatttgagtgcgcgtaggataaatattagcagccattttttttcctcatcatgtcacatcttgattcctgtaaagcgttagaaaataccacgtagttaagcagcagacaaagtgcaaaagaaaaagaatgaccatcgaagctgcaaatatatatatattttttggcagattcccatctgttcatccactggaggacttgtcgacacggttgaggagggtgtcaccggattccacatgggttctttcaatgtcgaggtaaagaacaacacggactcattgttctcacgctcaataaatgaaaatagcctttggttaatcttctcctccatttttttagtgtgaaactgtagacccagccgacgtgacagcagtagcgtcagccgtcacgcgagccctgaagcagtacgacaccccggcattccatgagatggttcagaactgcatggcgcaagacctgtcctggaaggtacgtataggcacatgtgtatatatatgccagccaagctctccgtttatcgttggcatgcagctaggtaactctttgtcaagataataaggatcaccgacccctctcgtctctggtctaggggcctgcgaagaagtgggaggaggtgcttctgggccttggagtcgaggggagtcgagctggtatcgacgacgcagaggagatcgccccacttgccaaggaaaacgtagccactccgtgagggcttggtggtgcctcggactcggaaacacgcgttggtgataggaa

SEQ ID NO: 527 - DNA, 920 bp, Zea mays
gccgctcgtcttatttgcactgcgctactttgcacgatagccttggcacttctttcgcagcatatatcaacacttaaatttcaatttggccaatatagagttatacaattccggcagttacgtatccaaatttgtctgcaggttcagttattatgttcagaatctaaatctgctggttctctctttcaggtctagcttgaaatctgggtgtgtaaaatctgaacccgcagtggaataacctgaagctgaaacctattacgcaggttggcgcctgggcagctgaagcccgtggatgggctgcaggagctgtgcggatggatggaaggccgcgacctgaagcgcgcggcggtgacgaacgccccgagggcgaacgccgagctgatgctgtcgctgttgggcctcaccgacttcttcccggtgctcgtcatcgggagcgagtgcgaccgggccaagccgttccctgacccgtacctcaaggcgctccagctcatcggcgcatcgcctcaacacaccttcatatttgaagtacggatgaagctctctctctctcgctcacacacacacaccgtaattcagtgaagaagctttgttgtttgtttcatcgtcactagtcgaaacagtcagtaaccaacggtaatgctgtctgtgcgtgttcgtgcatctcgttctgccgcaggactctgcatcgggggtccgggccggtgtggctgccggagtgcccgtggttggcctgacgacgaggaaccccgggaaggtgctgaaagacgcaggggccagcttgctggtcaaggattttcaggacccggagctgctgtccgtgcttcaacaggtggaggtcgaacccgcagcggagaatgcacaaggctgatgggtcgggcattgcggaaaatgtcatgctggacagactagccatcagcgat

SEQ ID NO: 528 - DNA, 387 bp, Zea mays
ccacagcaaaataacattgagccatctactgctcctaagctagggtataacatttattctctctatatatttcaattggttaactagtgttgaccagtgctataatgagttgctaaacacatgcagattgcaattaattccatgaagaagagtaaaactgccgtcttatgatgctgaaggaaactatttattgtgaagagatgatactcagagaaagacatatttgtggcagggagatttgagatatgaacttataaatgtaatgcaaataattttcagaccggaatggggtcgtggaattcagaggatgattgctttctagttgcatttgatgtttgatgagacttttctcatgtgaaacgtttattaaaacttcaaaatggtgca

SEQ ID NO: 529 - DNA, 754 bp, Zea mays
tatgatgaactcactcatcactagtcacatcgccaacaacacctacacaaacaaccagcatgttgtggcaagtcgtagtgccattgtgaaccacaataactttgggatgccaacggaggtcgttccacccgtggacaacatggacatgatgcaaggctatctaatggatgatacggatgccatgaggcttgttcagggacaacaacatatgccaaatgttgttcctaatcaaaggaggcatgcagtgaagttttggactacagatgagcacaggtctttaattaatttttgcattattcatttggaatctttgtcacatatatacatcttcgttcagtgttattaattttcagtacatttaataagcatgtggtagtattcataatttcataccatgagatgctgagatttgattttcactgatcattagagtatatatatatatatataggacatcgtctatttttatctgattattatattaatcttgcttacgtactatatatatataggaatttccttcgtggtctagaagtgtttggccgtggtaaatggaagaacatctccaagtacttcgtccccacaaggacaccagtgcagatctctagccatgcacagaagtatttccgcaggcaggagtgcaccacagagaaacaacgctttagcatcaacgatgttggcctctacgacacacagccatgggtgcggcagaacaactcctctagcagctgggaggcgctcaccttcactgctg

SEQ ID NO: 530 - DNA, 757 bp, Zea mays
  misc_feature (21)..(21): n is a, c, g, or t
  misc_feature (118)..(118): n is a, c, g, or t
  misc_feature (375)..(376): n is a, c, g, or t
  misc_feature (378)..(378): n is a, c, g, or t
  misc_feature (384)..(384): n is a, c, g, or t
  misc_feature (441)..(442): n is a, c, g, or t
  misc_feature (445)..(453): n is a, c, g, or t
  misc_feature (461)..(463): n is a, c, g, or t
  misc_feature (511)..(514): n is a, c, g, or t
tatgatgaactcactcatcantagtcacatcgccaacaacacctacacaaacaacaaccagcatgttgtggcaagtcgtagtgccattgtgaaccacaataactttgggatgccaacngaggtcgttccacccgtggacaacatggacatgatgcaaggctatctaatggatgatacggatgccatgaggcttgttcagggacaacaacatatgccaaatgttgttcctaatcaaaggaggcatgcagtgaagttttggactacagatgagcacaggtctttaattaatttttgcattattcatttggaatctttgtcacatatatacatcttcgttcagtgttattaattttcagtacatttaataagcatgtnntngtattnataatttcataccatgagatgctgagatttgattttcactgatcattagagtatatnnatnnnnnnnnnggacatcnnntatttttatctgattattatattaatcttgcttacgtactatatatannnnggaatttccttcgtggtctagaagtgtttggccgtggtaaatggaagaacatctccaagtacttcgtccccacaaggacaccagtgcagatctctagccatgcacagaagtatttccgcaggcaggagtgcaccacagagaaacaacgctttagcatcaacgatgttggcctctacgacacacagccatgggtgcggcagaacaactcctctagcagctgggaggcgctcaccttcactgctg

SEQ ID NO: 531 - DNA, 926 bp, Zea mays
  misc_feature (918)..(922): n is a, c, g, or t
cattgcataattctggatgatgttgaaattatggttggttttctgtacctttgtaccaagtgataaaaccttgtttaggaacatgaatatctcattgttgttttctttcgtttctgtttgtgtatcaggaaaatgctgttgttatatattcaatcgtagggtggaaatcatccattggaaaatggtcacgtgtacaggcaagctttcctctttaccatttcatttttattcatttcaaaattaatgaatcctcaatcctcattatgtatgaagcttaaaaagcttgtcttaggattctttctcaagttcaattcaagaagcatgactgcatgagcattgtcctagtgttacaatgatcattctctctgccaagattatgcttctgaaatctgaacagttcagtgcacctagttttcttgaatcgatgtttgatagttccaaccgcaaagctaataaattccacgttgaacattggatgcaaatagtttagttacaacatttgaaatcggtgcgactatgcatgcctgtatgatctactcttttcctgagcacatcagctggcttcatttaatggaagttttgttctgaattcagggcgaaggtgatcacaatgccaaacttggcattactattcttggtaagacccaaattgatgatttacaacagtattccaaataattttgtgataatttcgtttctggaattgacatcctattttaacacaggtgaagccgttgatgttgaagatgaagtagttgtagttaacagcatcgtgctcccaaataaaactctcaatgtcagtgtccaagaggagatcatcctataataaccatcgttttttttgtctaattccatataaggtctgagtaccaatcacatagtttaagtttattcgttctcaccatgtaatgtaacctnnnnnttag

SEQ ID NO: 532 - DNA, 262 bp, Zea mays
tcgactcgctcgtgcgcctctacggcaccaacgccgacgccttctcgtcggacttcgccgcgtccatggtcaggctcggcaacatcggcccgctcacgggttccgcgggggaggtcaggctcaactgcaggacggtgaattcgaattcgtgacttcaggacggtgaatgccaccattttgaattggtactgctctttttcccccacaaggagttgtagaatttgcattccttcaacgatttcgaatttcgaatttgctgtga

SEQ ID NO: 533 - DNA, 356 bp, Zea mays
ctcttcacctccgacgccgcgctcctcacgtcgccggagacggccaagttggtgctggacaacgccaagatccccgggtggtgggaggacaagttcgagaaggccatggtcaagatggccagcctcgaagtcaagactgggcaccaaggacaggtcaggaagaactgcagggcgatcaatcactactagctaacagagctggttgttgatcagcttgcaccactgcaatgtggaagaccttcagaaaaagaaaaactgcacagtacgggtgatggatggtgaaggatcaatcggttcagttgtgttggtgtttaatttgttcatgacctgcaagcgtgtggttgttgtatgatatg

SEQ ID NO: 534 - DNA, 1191 bp, Zea mays
  misc_feature (1137)..(1137): n is a, c, g, or t
actttggtgagggagttggattcagtggcgggtctgtggaggtacactcttcggtataagcaggctcgattgcggaataccattgcgatggactcctgatcttgttttctgcctgtttattttttgctcattggataggtgctggcagctacccaaacagctggggaatccggaaagaaatggttccagggaacagcagatgctgtcaggcagttcctctggctttttgaggttcttcctgggccatgtgtaatactctacctttcagagtatgctatcactatgtcgaattaaccttttacctgatgttattctgtgaaggatgcaagactcaaatgtatagaaaacatactgattctgtctggtgatcatctgtatcggatggattacatggattttgtgcaggtctcctatctgctgcaagttgatgttgtaatttcaagtttcagtcttatttttcattgcttgacaaaggtatattataatattgttttgcagaagcatgttgactctggtgctgatatttcagttgcgtgtgttccaatggatgaaaggtcatccagctttgtcccttttaaatttgttccttgctttttcttggtaattaaactagtattcagttggctaacaaagcaatatgccaatatgatgatatcttagctacctatactgtatgcactgtttattcagtagtgcatatttgtttatgactatcatcaatgttcatgctggaaagcttcggatatctcatgctttgcattttataagaactagaatcactttgtttactgttgtcatatcccacgctaacatattcctatcttcttattttgtttttttatctcatatatacatgcagtcgggcatctgattttggattgatgaaggccgacaggaatgggcacatcactgatttccttgaaaagcccaagggtgcagatttggaatcaatggtatggtacaccccctctcactgaccccaaagatgaacaactacttaatgatttattcagacaagtatagattgactgcatattgcctttcttttgcataattagtatttttgtcatgggcttccttttatgttgcatcatcttctaaattatttgagttgaatcctatgtctccctaacttcntttcaaatgctatccttggatttatttactttgtggaaagatttttaaatactc

SEQ ID NO: 535 - DNA, 480 bp, Zea mays
gttcgtgccgcgcgcggtgctcatggaccttgagcccggcaccatggacgccgtccgcacgagcccctacggccagatcttccgcccagacaacttcgtcttcggccagtccggcgccggcaacaactgggccaaggggcactacaccgagggggcggagctcatcgactccgtccttgacgtcgtccgtaaggaggccgagaactgcgactgcctccagggtatcgatctctcatcatctgaattgaatcccatcatccattgtttcggaatttctgttgcgttgtctgtctcacatgatctgttcgtgccatcaggttttcaggtctgccactcgctcggcggtggcacggggtctggcatgggtaccctgctcatttctaagattagagaggagtacccggatcgaatgatgatgacgttctccgtcttcccatcccccaaggtgtcggacacggtggtcgaaccctataacgccac

SEQ ID NO: 536 - DNA, 891 bp, Zea mays
ggaagagtacccagataggatgatgctgacgttctcagtttttccatcacccaaggtgtctgatactgtggtagaaccttacaatgccacgctctcagttcatcaacttgttgagaatgctgatgagtgtatggtcctcgacaacgaagctctctacgacatctgcttccgcactctgaagcttgctacacccacttgtaagtttgcattgctacttttgctcagttactgcaaccacagcttcagtatcaatccataatttatttcatactgtatagtattgtggtagtcatcttcgtttgaagtgctgtgacacaaaactttctttgatgtcttgtgatgctgcattgaattacattatatggtccttgtctgtcatagatgcatatttattgcaatcatgtgctacttgattgaattaatttgtatgtcaggcacatgcatctcacaagcattttgtcaccatactatctgttctaaggtttgctttgtgctcctactgtcctgagatgaccatttcatgattccctgccttatttcttgcatttgtttctgccattaagatatgaatctgaatgttgccatttttatgctgttccagtcggtgacctgaaccatctcatctctgcaaccatgagtggtgttacctgctgcctgcggttcccaggccagctgaactcggacctccggaagcttgcggtcaacctgatccccttcccccgcctccatttcttcatggtcggcttcgcgccgctgacgtcaagggggtcccagcagtaccgcgccctgaccgtcccggagctgacccagcagatgtgggacgcgaagaacatgatgtgcgcggctgacccgcggcacgggcgctacctgacggcgtcggccatgttccgc

SEQ ID NO: 537 - DNA, 351 bp, Zea mays
caagtccagcgtgtgcgacatcccgcccgtcgggctgcccatggcctccaccttcgtgggcaactccacctccatccaggagatgttccgccgcgtgagcgagcagttcacggccatgttccggcgcaaggctttcttgcactggtacaccagcgagggcatggacgagatggagttcacagaggccgagagcaacatgaacgacctcgttgccgagtaccagcagtaccaggacgccaccgccgaggagtacgaagaggaagagcacgacggcgaggaggagcacgcctgatctggacgccaactcatcggtgcaaagcgtttcagtttcatcgctcctatggtacacaa

SEQ ID NO: 538 - DNA, 1100 bp, Zea mays
gtccgtcggcgcggaggtcgtcaacggcctcttcctaaggtatatagcagctagattttacaggaacgcaagtgaatgctgtcattcatactcatgcactgatgctggcagcaataaaactgcattctgcttgtaccacctactctactagtacaagttcattttagtacaagttcatagtggaaaaacatttgaccttaatttgtgcatgcatgtcagtttagatagcttgtgcgtgcgtgttaaggctctcaattctagtagtactgtcacaatttgaaattgaattccattcatgtgtgaatttgacaacttaccagtactagaattgaattcgattccattgcttaattgatatgtgaattaaatggaatttgattcaaaacgaatcgaatgggtcaaaagtgcacatggaaaaaaatggatctgcatgcatgcttcaaaagccaactctgaaatcttgaatgccagttgctgtgcaagtgaaggcgcggtgtttgatgtacctgattgttttgctcaggtacgaggcgcccaaagagccgaacggctcgtacgtggtgcactacaaccactacgacggcagcaacggcaaggtcggcggcgagaagcggtcgttcgaggtggacgcgatcgtgggcgcggacggcgccaactctcgcgtggccaaggacatgggcgcgggcgactacgagtacgccatcgcgttccaggagcgcgtcaagatccccgacgacaagatggtgtactacgaggagcgcgcggagatgtacgtcggcgacgacgtctctcccgacttctacggctgggtgttccccaagtgcgaccacgtcgccgtcggcaccggcaccgtcacgcacaaggccgacatcaagaagtttcaggccgccacgcgcctccgcgccaaggacaagattgagggcggcaagatcatccgcgtcgaggcgcaccccatccccgagcaccccaggcctaagaggtacctggtggctttctcttctctcggtgcaagaatataatgtcggttgctggatcatgtattcatgtatgtatgcctgatctgactaattggccaacaaataaaataaaaataaaatgca

SEQ ID NO: 539 - DNA, 762 bp, Zea mays
  misc_feature (655)..(655): n is a, c, g, or t
  misc_feature (664)..(668): n is a, c, g, or t
  misc_feature (685)..(686): n is a, c, g, or t
  misc_feature (752)..(757): n is a, c, g, or t
gatttcggctgccgcgttggtttaacacaaaccacgcgtccatgcctgccgcttccgcaggctccatgccactgccacctgggtggcgttttctttccgggggcacatcacacatggcgtccgtccgcgtaggcacagaaggcttctcctggagttcagtggctattccctactaactgctaacttttcgctcggtggcagcagcttctggatcgggccatcggggtcggtggatctcactgttttcttttcctgctgcttgctgcatttttcgcagggtgtgggagctgagttgggaggaggactgctgctgcagccatgaaggccctcattctcgtcggaggcttcggcacccgcctgcgcccgctcacgctcagcgtccccaagccgctcgtggatttcggcaacaagcccatgatcctgcaccaggtcagcgcgattcctccgtctctgggacaaagttcagttctttgtttttagtcattagatacagcgcagggcgaaccggggaagttcatattcagctgtaggaattgcctatggtttcctgttgctgaattgatactgtatttggttgttctttcttggactgaatttactgaatgaatgctgtgatacccacccagatcgaggctctgaaggaagttggtgttanagaggttgnnnnngccatcaattaccagcnngaggtaacataacaggcccgtctctgtctgtctgtctgtctccatcagcaagcaagaagcaagcgnnnnnnaacct

SEQ ID NO: 540 - DNA, 350 bp, Zea mays
ggactacattactggcttgcgtctttatctagactcgattaggaagaaatcagctgccaagctagctgctggagcacatgttgttggcaatgtgctggtgcatgagagcgccaagattggagaaggttgcctgatcggtcctgatgtcgccattggacctgggtgtgttgtggaggacggcgtgaggctttcccgctgcactgtcatgcgcggcgtgcgtatcaagaagcatgcttgcatctcaaacagcattatcgggtggcactcaactgttggacaatgggcacggatagagaatatgactatcctgggggaggatgttcatgtgtgtgacgaggtatacagcaatg

SEQ ID NO: 541 - DNA, 900 bp, Zea mays
ttccccaggtacatgggctatgtacttcccatttcatatgcatattgcagatttaaacttcacattgacataatgttttatatttttgttggatcatcatggatgatatgcagaataggcagactgttcttttttctgctacacaaactccagaggttagtagatcttttatgctgcttgtagtcaacttttcattcatgatttatataatttgctcttatgcggtgatgccccacaggttgaaaaatttgctaaactgtcatttgagaaaaatgaagaaagtaaaaaaaaacctgtttatgttggagttgatgatgataagtcaaaggtaaggaattggtttacctggttattcaactgtccttccaagagtcttctgtagaaaaaaaataactatggtgctttgtcaggctactgttgaaggcctgcagcagggttattgtgtcatttctagcgataaaaggttcttggttctgtatgctttcctaagaaagaagcggaataagaagataatggtgttcttctcatcatgtaattcagtaaagttccacgctgaacttctgaatttccttgggatagagtgttctgatatccatggaaaacagaagcaacagaagcgaactactacattctttagcttttgcaaggcagaaaagggcatcttattgtgcactaatgtggctgcccgtggacttgatattcctgacgtggtgagattttgacttcttattttttaacgctaaacttaattcttgttcacggctaacagaagcatctggtttcttctttaggattatatcttgcaatatgaccctccagatgaaccaaaggttggtgattctaaacagagcctgtgaaattttctacacagtgcttgctataattattatttgcaatttc

SEQ ID NO: 542 - DNA, 348 bp, Zea mays
tcgtgcgcggcacctacaagggccgtgagggcaaagtggtgcaggtgtaccgccgtcgctgggtcatccacgttgagcggatcacccgcgagaaggtgaacggctccaccgtgaacgtgggcatccacccttccaaggtcatggttacaaagctgaagcttgacaaggaccgcaaggcgctcctcgaccgcaaggcccggggccgcgccgccgacaaggctaagggcaagtttactgccgacgacgtcgccgccgctgctggtggcgccgccgccactggcgcgtctctccaggagatcgactaggcgcttcgcggggatctgatggtggtcctaccgcctattactc

SEQ ID NO: 543 - DNA, 921 bp, Zea mays
gatgcgctcgtgaggctgaggtgtacccatcttctcagttttttatattttttcaacaaggtgttctgttacctgtgtggatgtgctaatgatcaatacttgttcagcggaattactgcagagggccaaggtgtgaaggttgaatcctcagcagttccttcagccccaactccagatgttgctgaagcacaggtaaactcaaccaatgatttggctgattgtgcagattccttatgatttttggctgaaaattgtcagttgctttacaagctcacatccacatagttattttgtgctgatcgctgacttgaatcattattggtcactgaagttactatcaaccgtatggttcaaatatcagaaaaatgaaacttgtacagttgtacactacttgagttacatagtttggtaactgaagtccattttctaataaccacaggccccagctgctgaggaggaggacgatgatgatgttgacctttttggtgaggagaccgaagatgagaagaaggctgctgaagagcgtgctgcagctgccaaggcttctggcaagaagaaagaatgtatgtcagtgtgcatattttttctgtttcattctctcatcacactgtgttgacatgtgctgacactaatctataatgacacccttggaccgctatatcattttttgaagctctgtttgatatccaaaaacttgtgatttcatcaatcttctttccatacattgtcagctgggaagtcatcagttttacttgatgtgaagccatgggacgatgagactgacatggccaagctcgaggaagctgttaggagtgtccagatggaagggctgctctggggcgcatgtatgttacctcagttttccgcgcattaatttagtcattcatgaacttgttttttttaccatttagtatggtttct

SEQ ID NO: 544 - DNA, 497 bp, Zea mays
ttacccgcaagttcatgaacaagccagtgagaatcctcgtgaagagagatgagctgacccttgagggtatcaagcagttctatgtgaatgtggataaggaagactggaagctggacacactgtgtgacctgtacgagacccttgccatcacccagagtgtcatctttgtcaacacccgccgcaaggtggactggctcactgacaagatgaggagcagggaccacactgtttctgccactcatggtgacatggaccagaacactagagacatcatcatgagggaattccggtctggctcctcccgtgtgctcatcaccaccgacctgcttgctcgtggtattgatgttcagcaggtgtccctggtcatcaactatgatctccccacccagccagagaattacctgcatcgcattggtcgtagtggtcgtttcggtaggaagggtgttgccatcaactttgtgacccgcgacgacgagcggatgctgttcgacatccag

SEQ ID NO: 545 - DNA, 540 bp, Zea mays
ttgctactggtatgaaggttcggatcatgggtcccaactatgtccccgggcagaagaaggatctgtatgtcaagagtgtccagcgtactgttatctggatgggaaagaagcaagagtcggttgaggatgttccgtgtggtaacactgttgctatggttggtctggatcagttcatcacgaagaatgctacactcactaatgagaaggagactgacgcttgcccaatcagagcaatgaagttctccgtctctcctgttgtgcgtgttgctgttcagtgcaaggttgcctctgaccttcccaagctagtcgaaggtttgaagcgtctagcaaagtccgatcctatggttctctgtacaatggaagaatctggtgagcatatcattgctggagctggtgagcttcatcttgagatttgcctgaaggatctgcaggaggacttcatgggtggtgctgaaattattgtttccccacccgtcgtctccttccgtgaaacggttcttgagaagtcctgccgtactgtcatgagcaagtctcccaaca

SEQ ID NO: 546 - DNA, 361 bp, Zea mays
gcaatacttgtggtggcaccggtgaattctccactccttgcaacacctgtgggggtgatggccgggtgcgaaggacaaagaggatcagcctaaaggttcctgctggagtggattctggaagcaggctgagggtccgatctgagggtaatgctggccggcgaggaggccctcctggggacctttatgtcttcattgatgttctctctgatcctgttcttaagcgagatgggacaaacattctctacacatgcaaggtttcttacattgatgcaatccttgggacaaccgtcaaagtccccactgttgatggaacggttgaccttaagataccctcagggactcagccaggcacaactctggt

SEQ ID NO: 547 - DNA, 408 bp, Zea mays
gtggcttgaccccaatgaagttagtgagatctccatggcgaactcccgtaagacttatccgctagctccccccctccgattaattgctcactgggttggggttgtatggatctctgggtgaggtggatgctttatctggtttcatatattggatcaatggctgcattattcttttctactatcattttgcagtgtcgtttacctacggccaccattgaaaacactattggctgtagctgttccagtttgttacgtgtgtaccagtgcagtttctaatttgtatgtgatactagttaacctgacgcaattatagatatcttgaaataacaagcccagtttatgattatttcattttatgtactgcttgtattgtttatgtatatgtgattgtagtttttggtaggactg

SEQ ID NO: 548 - DNA, 895 bp, Zea mays
ggctcgcgcgatgatggccgacctggccggtgagcacgtcgcaggttgaatttgatcacgcagcgaagcgcagcccagggttggtgatgctagtgttgtttgtttactgcactgcagctggacagcacggccccaacgttggccaggcgatcttctccctgtggatggccctcggcagcgtgcttggatacttgtccggcgccaacgcgaaatggcacgagtacggtagcctgcctcgaagccactcgtcccctttcgttttgctctgttttcctttcctttcctttccttcgctgaatcgtgctgctggttgatccttatctccatcagctggctcccttggctcaaaaccgcggcgtgctgcgatgcctgcgccaacctcaagggcgccttcttgactgcggtggtgagttattacgagcacaccattgtatcgttgtcgttgcttcgccctctcgttgcgctgtactgagattttggtgtcgattgatcaggtcctcattataatcagcatgtctgtcaccttgtggctcgccggcgaggagcggctcgacaaggaaagcgtcgacacctccggcggcgcgtgctctgcgttcatggatctcttcaagagcctcaagaacctcccccctgccatgttcagcgtgctcgccgtcacggccgtcacatgggtacgcgtacgtcgttgcttgcaagcgggttttttttctagtttgactccatctgacctatgtgggtctctctggacggcggatatgatgtgcatatgcagctctcgtggttccccttcttccagtacaacaccgactggatgggccgggagatcttccacggcgagccgcagggctcgggcagcaaggcggacctgtacgaagccggcgtccgcgagggcgcc

SEQ ID NO: 549 - DNA, 798 bp, Zea mays
  misc_feature (777)..(780): n is a, c, g, or t
cttccaccttcgggtccgggttcaccccttccatgtccttcgtatcaacaagatgctttcgtgtgctggggctgataggctccagactggaatgaggggtgcctttggcaagcctcagggcacctgtgctagggtggacattggtcaggtcctcctttctgttcgatgcaaggacaacaatgctgcacatgccagtgaagctctgcgtcgcgccaagttcaagttccctggccgccaaaagattattgagagcagaaagtggtgagtgcatgatgaattcattgctgccatgaaaccaaaatgccatagcctaatagcttgcataagttattttttattattgttttttgatttgcactgtcttgtccaggggcttcaccaagttcagccgtgccgactacctgaagtacaagagtgagggtagaattgttcctgatggtgtcaacgcaaaggtacagctatcacatatcttgctacatttagatatatctctgaattagttttgggatagtaatgtaatttccattgatacgcatattttgaaatggagctattcttacaatgtttgctccgtcttctcttcggcagtatattaaccagttcataatctaattttaacttctcctgacttattacagctgctcggtaaccatggaagacttgagaagcgtgctcctgggaaggctttcctcgaggccgttgcttaagtccaatctacagttggaatgcgaatccagacgttttggtttagcctatcttattttgctttgtgcaacnnnnattttaagtgtatggggt

SEQ ID NO: 550 - DNA, 357 bp, Zea mays
  misc_feature (7)..(9): n is a, c, g, or t
tcaacannngagcgcctctggtcgatggtgcccgccgaaaaggcggcggaagccgtcggcgacaaggccccgcagatcgacgtcacgcagttcggctacttcaaggtgctcgggaagggggtgctgccgcccaagcccatcgtcgtcaaggccaagctcatctccaaggtcgccgagaagaagatcaaagccgccggcggcgccgtcgtgctcaccgcctagttttcagtccttattcgcctcttggttttgagatctatatctggactagcagtgctttcttgtctcacctatttgtgttaagaagacgtagtttttaaatccattgctccttcctgtttggacagtgctttcata

SEQ ID NO: 551 - DNA, 491 bp, Zea mays
  misc_feature (53)..(53): n is a, c, g, or t
tgggcattgttatttgaaataggtaaggacaaatgcttatattggtagtgtanctctaacgcttgatcacttgttttagatggtgaagaacatgtccagatgtcctgtttgctagtacttttatgttctgaatgatttttgttcctgctttgtataatttatgtcctaaattgaattggtagtctggcttgaaattttatttgttatttggagaattggggggcaattaggttatgatcccaaattctcaggtactatggcacatgaaggcaatgcatctattagtgatgtttcttgcatgtgttaacatatattcaatgtctgtttgcgcacagggacctacattgacaagaaatgtccattcactggaaccgtttctatcagaggcagaattattgctgggacatgccacagtgctaaaatgaacagaaccatcattgttcgcaggaactacctccactttgttaagaaataccagaggtaagtggact

SEQ ID NO: 552 - DNA, 1274 bp, Zea mays
  misc_feature (36)..(37): n is a, c, g, or t
  misc_feature (649)..(649): n is a, c, g, or t
  misc_feature (665)..(665): n is a, c, g, or t
  misc_feature (724)..(734): n is a, c, g, or t
  misc_feature (736)..(736): n is a, c, g, or t
  misc_feature (746)..(748): n is a, c, g, or t
  misc_feature (750)..(755): n is a, c, g, or t
  misc_feature (760)..(764): n is a, c, g, or t
  misc_feature (767)..(769): n is a, c, g, or t
  misc_feature (771)..(773): n is a, c, g, or t
  misc_feature (777)..(788): n is a, c, g, or t
  misc_feature (791)..(807): n is a, c, g, or t
  misc_feature (809)..(809): n is a, c, g, or t
  misc_feature (811)..(811): n is a, c, g, or t
  misc_feature (814)..(828): n is a, c, g, or t
  misc_feature (831)..(852): n is a, c, g, or t
  misc_feature (856)..(865): n is a, c, g, or t
  misc_feature (867)..(870): n is a, c, g, or t
  misc_feature (872)..(883): n is a, c, g, or t
  misc_feature (886)..(888): n is a, c, g, or t
  misc_feature (890)..(896): n is a, c, g, or t
  misc_feature (900)..(900): n is a, c, g, or t
  misc_feature (904)..(908): n is a, c, g, or t
  misc_feature (912)..(919): n is a, c, g, or t
  misc_feature (921)..(922): n is a, c, g, or t
  misc_feature (927)..(940): n is a, c, g, or t
  misc_feature (945)..(946): n is a, c, g, or t
  misc_feature (948)..(955): n is a, c, g, or t
  misc_feature (959)..(959): n is a, c, g, or t
  misc_feature (964)..(965): n is a, c, g, or t
  misc_feature (968)..(988): n is a, c, g, or t
  misc_feature (992)..(992): n is a, c, g, or t
  misc_feature (994)..(1002): n is a, c, g, or t
  misc_feature (1005)..(1008): n is a, c, g, or t
  misc_feature (1016)..(1034): n is a, c, g, or t
  misc_feature (1036)..(1057): n is a, c, g, or t
  misc_feature (1059)..(1060): n is a, c, g, or t
  misc_feature (1065)..(1072): n is a, c, g, or t
  misc_feature (1074)..(1075): n is a, c, g, or t
  misc_feature (1077)..(1082): n is a, c, g, or t
  misc_feature (1084)..(1087): n is a, c, g, or t
  misc_feature (1089)..(1095): n is a, c, g, or t
  misc_feature (1098)..(1101): n is a, c, g, or t
  misc_feature (1103)..(1114): n is a, c, g, or t
  misc_feature (1121)..(1125): n is a, c, g, or t
  misc_feature (1127)..(1129): n is a, c, g, or t
  misc_feature (1133)..(1144): n is a, c, g, or t
  misc_feature (1146)..(1147): n is a, c, g, or t
  misc_feature (1150)..(1154): n is a, c, g, or t
  misc_feature (1156)..(1167): n is a, c, g, or t
  misc_feature (1173)..(1188): n is a, c, g, or t
  misc_feature (1200)..(1200): n is a, c, g, or t
  misc_feature (1203)..(1208): n is a, c, g, or t
  misc_feature (1210)..(1212): n is a, c, g, or t
  misc_feature (1214)..(1214): n is a, c, g, or t
  misc_feature (1219)..(1222): n is a, c, g, or t
  misc_feature (1225)..(1227): n is a, c, g, or t
  misc_feature (1230)..(1230): n is a, c, g, or t
  misc_feature (1232)..(1256): n is a, c, g, or t
  misc_feature (1261)..(1261): n is a, c, g, or t
  misc_feature (1263)..(1263): n is a, c, g, or t
  misc_feature (1265)..(1268): n is a, c, g, or t
attgaaaagcatgctgctcagctttgcgttcttgcnnaggactgtgaccagccagattatgtcaagctggtgaaggcgctctgtgctgaacacaatgttcaccttgtcactgttcctgctgctaagactcttggcgagtgggctggggtgtgttagactatccttctctaaaacttgtgctcctttttacatagtatttagtgttgctaccttgatagtgttactggattacttattttaacattcattttataactcaatgctccaacttccgttgaacggagaaaaaatagtattctctgtaaatgtcaagtttttacatttaatttttaatccatttagttgtgtgttgattcttcactagctgtgtattcttttatatgaactttggccttgatcgtaacaatctccactttcactccttgcagctttgcaagattgactccgagggcaaggcaaggaaggttgtaggctgctcctgtgtcgttgtcaaggtagcatatcaatcccttactttcctacaaattaattattttggtttaccttagggcaagtaacatgacatttcactgtttcatttcaattaccaggactacggtgaagaatctgagggccttaacatagtgcaggagtatgtcaagtcgcactngatgtaacacgtttcngtaatactctacatttggatctgggcttaatattatgcttgcgtcttgggcttgcctannnnnnnnnnnantaaaaaaaannnannnnnnccccnnnnntcnnncnnnttcnnnnnnnnnnnntannnnnnnnnnnnnnnnntntnttnnnnnnnnnnnnnnntcnnnnnnnnnnnnnnnnnnnnnncccnnnnnnnnnncnnnncnnnnnnnnnnnntannnannnnnnncccntcannnnnaacnnnnnnnntnnacatnnnnnnnnnnnnnncacannannnnnnnnattncttcnnctnnnnnnnnnnnnnnnnnnnnnactncnnnnnnnnnccnnnnactcctannnnnnnnnnnnnnnnnnncnnnnnnnnnnnnnnnnnnnnnnannacttnnnnnnnntnntnnnnnntnnnntnnnnnnnacnnnntnnnnnnnnnnnnttacacnnnnncnnnactnnnnnnnnnnnncnnctnnnnnannnnnnnnnnnncctctnnnnnnnnnnnnnnnntccacctctctnccnnnnnntnnncntcttnnnntcnnnccntnnnnnnnnnnnnnnnnnnnnnnnnnacctncncnnnncaccct

SEQ ID NO: 553 - DNA, 827 bp, Zea mays
  misc_feature (60)..(60): n is a, c, g, or t
  misc_feature (777)..(777): n is a, c, g, or t
ccaccccccgagcggccgccgccggcgagacaggggagcatggcgacttcctcctccttnccgccgtcttcttcagcagcgccttcgccgcctgcttcgcagaggtaccgtcagcacacccgcattccttttttctagcctcccgcgggcatcgcatcgcatacatccgtctaagaggcaaagtcgaagtcggagtcggagtcgtccaaattggcttgtagtaggctcaagccgtgacgagtgcttgtagtagctctgctttgttgaggctttgacgcaaattgaagagggatttgtttggcttgcaactggcgtgctatctgtctttttatttttttcgacttttaaggattattagtttggggctactggctgggctaacgttgccatttgcttcttcaattaaaaataggagtatgattatttgatctaaaaaagaatggatctcactgtcaacgatttgggtttggagccagctttgatttaccaatgatataatcaggtgtgcaccattcctttggacacagccaaagtgcggctccagctgcaaaggaaggcgccactaccgctgccaccggcggctgcagcagccacagctgctgctgctggaggcacgctagccacaatcatgtgcatcgccagggaggaaggggttgccgcgctctggaagggcgtcatccccggcctccaccgtcagttcctctatggcggcctccgcatcagcttgtatgagcctgtctgtactcctccacattctttcacctgtctcctcccatnaaaagtgacttcctcacgacaataaagggaattttcccttctctttactg

SEQ ID NO: 554 - DNA, 1363 bp, Zea mays
  misc_feature (483)..(484): n is a, c, g, or t
  misc_feature (1337)..(1338): n is a, c, g, or t
ctcacctcctctctcctccttttactgcgtttattttccttgaaccgctgctctgtttgtttgtggttgccaatgtgtcggggttgtgatgtgcttttggcttgttgtacctgcaggctttctttgatctggagaacgggaaccaggagctcaagagcgacctcaaggacctgtacatcaacaatgctatgtatgcgtaacgtttctttctatattctatcgcctgttgagatgtagtagcatgtggtgcatggttgtgacatttggtgaggatgtttgttgtgactttgcagccagatggatgttaccgggagtaggaaggctgttgtcattcacgtcccataccgcctgcgcaaggccttcaggaagatccatgtcagactcgtcagggagctggagaagaaattcagcggcaaggtgaatttctcgtttttgttttttctactgctgctcatggtttaggtttatatatgctaattgtanntactacataaaattgaacggggtaatgcgtttaatggccatgagattacatagatttatgcaacttctattactctagcgtaaaattggttgtcaatatccatctctttgtttcatgccattttttgggatttttactcgaactgtgcagaagcttttgaccccacttgtactacatatgcttcttctttttgttttgttagtgcttagtgtctgtgtgataaagatatgtctttttgtcataatatgcaccttgttatgagtctggtccttatggtgatttttgtaccctagcatatgtttagaattttttggcggagcagtcttgtttggtctacaatattagagtcaagtttgcaaggatgcttatcatgcattttacctggcacaggatgtggtaattgttgctacacggaggattgtgaggccacccaagaagggttcagctgttctgcgccctcgcaccaggactctgactgctgttcacgatggcatcttggaggatgttgtctacccagctgagattgtggggaagcgtgtcagataccgtctggatggttccaagattatcaaggtagatgcttccgtcttcctttcttcagatagtctacatgtcctactgaggaactgaaggatgccactggcatctctactgacaactgtattcacttgtataaaaacatctaaaattttggcttggcattagttacctagaatttctttgtatacatttatggtttgttggctaacatattgcagcaagttacttaaccttctcttgtaatggcattcagattttcttggacccaaaggagaggaacaacactgaatacaagctggagacctgcactgcnntctaccgcaggctgtgtgggaaaga

SEQ ID NO: 555 - DNA, 831 bp, Zea mays
  misc_feature (54)..(56): n is a, c, g, or t
  misc_feature (680)..(682): n is a, c, g, or t
  misc_feature (693)..(700): n is a, c, g, or t
  misc_feature (725)..(726): n is a, c, g, or t
  misc_feature (738)..(745): n is a, c, g, or t
  misc_feature (747)..(747): n is a, c, g, or t
  misc_feature (751)..(751): n is a, c, g, or t
  misc_feature (757)..(766): n is a, c, g, or t
  misc_feature (782)..(785): n is a, c, g, or t
  misc_feature (787)..(790): n is a, c, g, or t
  misc_feature (794)..(799): n is a, c, g, or t
  misc_feature (801)..(802): n is a, c, g, or t
  misc_feature (811)..(825): n is a, c, g, or t
cttcctagatctcctgagcctatgagtggttcctatatttttgtttgctccccnnnaagcagggacaaaaggtgtggtgtttgtggacctgctttgattaaaaggttcaaggaagagataaatgaactgggacttgatgatcaggtggctgtcagtgcatgctcacacgtgggaggtcataagtatgcaggaaacgtcatcattttcagttctgatgccaagggagaagtgactggtcattggtaagtactgttattaaattaacattaaacgttcactttgtcttgtgcaactatttttttacttttgcatatacacattcttgccttttataatctaattagtactcaatacaattgcaattataggtatggttatgttgttcctgatgatgtgcctgttttgctgcataaacatattggacaaggagaagttgtggaccatctatggaggtatcccccttgttgaacccttgtactcctatctgtacaccataggttgtgaatttagaattgtttactcatcatttacatcttatcctgatgtggagtcatgaatgactagatgtcggttcccagcctattgtgatgctctttcttatcctacaaagtacatgcttatgtgaacatgtgttcatattctatgaataatcataccaaaaacctgcataatgttctagnnnaattgcatttnnnnnnnnactgttaattcgttttttaacaatnnttaaattacctnnnnnnnngnattngaaatnnnnnnnnnnaaactatgtgcatttnnnnannnntatnnnnnnannggggcaaannnnnnnnnnnnnnnttcaaa

SEQ ID NO: 556 - DNA, 819 bp, Zea mays
  misc_feature (33)..(33): n is a, c, g, or t
  misc_feature (623)..(628): n is a, c, g, or t
  misc_feature (713)..(717): n is a, c, g, or t
  misc_feature (773)..(808): n is a, c, g, or t
tctttggtgtcgctcacatctttgcatccttcnatgacaccttcattgtaagtatcatatgcgccatctgtggttagaccttttcattcacttctccaagtttaactgaactgtgtcttgttgtaatatctgcagcatatcactgatttgtctgggagggaaactctggttcggatcaccggtaccatcctaaaaccttgggccatgcacgacctaggtggcagatgtatattgttttaactgagatgtgctaaacctaaaccctgtaggtggcatgaaggtgaaggctgaccgtgacgagtcgtcaccttacgctgctatgcttgctgctcaagacgtcgcacagcgctgcaaggtactcactcatttgtccgtctgtgtatccaaagacgacgttgtcttaatatttacattgaagccaaggattacgtagctctgctttagtgttgctgtatatctggataagtaatctgtggccggtattttgtcttcaggagcttggcattactgcactgcacattaagcttcgcgccaccggaggcaacaagaccaagacccctggacctggtgcccagtctgccctcagggcgcttgctcgttccgggatgaaaatcggacgcatnnnnnnaggaggtcctggatctttcaagggctggctggcctgtgctggttatccctgctttgtttcataatgctttggttctgtatactgnnnnngcgtttgtgctatgtgcagaggacgttaccccggtccccactgacagcactcgcannnnnnnnnnnnnnnnnnnnnnnnnnnnnnnnnnnntctcgtctgcg

SEQ ID NO: 557 - DNA, 776 bp, Zea mays
atatatatacatatgttttttataaaaaaaaattagagaggatacgatacatatatataaagttaccatatttacatacatacatgcagcgcttggctacaaaagttggaccgtggggtgggagcggcgggtctccggtggacatcacggcagagcctcagcgtctgaagagcatcaccgttgctactggcatcgccgtgacctcgatcgccttctcctacgtcgactccgccggccaaacccaatctgctggtcgctggggcggttccggtggagaaactgagccggtggtaagtggacactgcacatatatatatgcattagacttgtagtgtatatgctcagctcagctcgtctcggctcggctcgcgacggactctgaaattcctacacgcgccccgcagatccagctcggcgactccgaggtgctcacggagctgtccgggacgatcggcaacgtcgacggccacaccgtcataacctccatcaagttcgtcacaagcctcaagacctacgggcctttcggagcatggggggacgggagtgacactccgttcgcggtccccgtgcagcaagggagtgccatcgtcggcttcttcgcacgagctgggatctacctcgacgcccttggcgtttacgtgcgatccctgtgatgatgactctgacgacagaggcagctagctgctctgctctgctctgttctgctccaccggcttcatcgcgcggattccagtcaccctccgttttatttcctactgctacttgtgtcttgcctc

SEQ ID NO: 558 - DNA, 708 bp, Zea mays
tgtgggctctcataatatcacatttttgccataactggggaacattcattcttctaacatggatgcccacatactacaatcaggttgctaccatgttatgctgtgaaacgtttgactttccccattatttaaattatataatgatagcatatcatgccattggttgtgctccccaaatccttttatccaggttttgaagttcaatctaactgagtcggggcttctctgtgtcttgccatggctgacaatggctgtttttgcgaatattggtggatggattgctgatactctagttcagagaggggtctctgtaacaaacgttcgtaaggtaagttgtcttatccttcagtaattttgtttcatgtgtgaatttataagaatagttatgcttagaggtaccgatcttgaaatactttataacctcactgatgcagatcatgcaatcgattggtttccttggaccagccttgttcttgacactgctgagcaaagttcggactccagccatggctgtgttatgtatggcatgcagtcaggtttgatgcacttcagaaccaatcatatggatttataagtagcttccgacacggcaacaattgataacttgtctgttataaatgtctgctggttttactgtccattgtctcagggtagcgatgctttttcacagtctggcctgtattcaaatcaccaagacataggaccacg

SEQ ID NO: 559 - DNA, 685 bp, Zea mays
  misc_feature (674)..(675): n is a, c, g, or t
aagtgagagcaccaaaaagtaaggaaggttatgcatccataggtggcggttctcctctacgacaaattactgatgcacaggtatattgtgaccttttctggtctaattcagaactgtcaattggcatgactgccattcattgaatcttagcaatctggattttccgtttacctagaattggagaggacacaagtggataatggggaaactaattttgttttgattaattccagagccaatattcttgtcacatgacaaatcaacccatgcattagtgtcacatgaagtctttttgtggaacttgaagtaattgcatgctccttctcacttggttgacaaatgattctcccagcaattgggttgatattgtgatgactcatgggttaggcctaggaaatgtcctggtgatcttatactgtgagatgacacagaattttatttgctgtttcactgtttcattgccactagggtgatcttatactgtaaaaaacagtatttggggttttagtgtcattctggtcagttatcttttacattggactacaataggattagaatgcgaatggatgctgctatattactttattgaaattagagaataatgaatggttttcccactttccctaaaatgtctaaaatatgtctgaagctacactattagctctcatttgatnncttttatgaa

SEQ ID NO: 560 - DNA, 683 bp, Zea mays
  misc_feature (633)..(637): n is a, c, g, or t
  misc_feature (647)..(651): n is a, c, g, or t
  misc_feature (658)..(659): n is a, c, g, or t
ctcctagagctgttggagcactgattgcactttatgaacgtgctgtggggatttatgcttctttggtaaatatcaatgcctatcatcagcctggtatgcttctcatgacatagtaatgaagctctataattaagctatttgctatgtgcaattatgtgtgggctatgtaatttacaggtgttgaggctgggaaaaaggcagcaggagaagtattggcccttcagaaaagggttctgactgtattaaaggaggccatgtatggaacttctgacctgtgttctttctgtttctctgtgaagtgattggttatatgcatagtatttttggggcatatttctagttgtgatgctttgaaaatgcatttcgttgtatgacttgtatcactaggtgggactttgttttgaggaatggtgtggttcatcatattctcaccctcacttttttgtttggtttatggagttgaataggttcatctgccaccaccctatcccttgcaaagtaataattagtacaaacatgagggatgtactcatgggttggttcctcaaaatacattcgaagtgcacccaccccaatagctgtggcaatgtccatttctcctttgagactctctaagaaggcatttttagatgnnnnnactgatatannnnngaaaagnnttcctagctgaaaattacaattga

SEQ ID NO: 561 - DNA, 379 bp, Zea mays
gccggccatcgcgttcagcaggaaaacgtacaaggagatggtggtcggagacgtcacgtaccctgccggcgtgaccctggagctgcccgtgctgttcatccaccacgaccccgacatctggggaagcgatgcgcacgagttcaggccggacaggttcgccgagggggtggccagggcgtccaaggataggctagcgttcttccccttcggctggggcccgcggatctgcatcggccagaacttcgcccttctggaggccaagatggcgctgagcatgatccttcagcgcttccagttcgagctcgcgccgacgtatacccatgcgccgcgccgagttataatgctgcgcccgatgcatggtgcccagatcaagctcaga

SEQ ID NO: 562 - DNA, 476 bp, Zea mays
agcccgaatttgcatatttgactacgaactagcaaggcaaatcctttcgagcaagtctgggcatttcgtgaagaacgatgcgcaccctactttgttggctctggtcggcaagggactcgggttcatggaaggctctgactgggtgcgccatcgcagggtgatcaaccctgctttcaccattgacaagcttaaggtacacgcaatgcctagctctctctctctctctcgctttaaaaaagaagttcgtttgcagtatgcacgcgagcagcaagaacaatggccgtgctcattgcataaacagattgtgaccgagacgatgctggacttcgccgatagcatggcaggtgagttggaagctgaagcatcccagaacgagaacggagaaacacaagtggatatatacaaacatttcagcgatctgacagttgacaatatagcctacgccatctttggaagcagctacaagttagaaatgg

SEQ ID NO: 563 - DNA, 277 bp, Zea mays
tgtcctccagaagctgtgactgtgagcgccctaacaatctacgcgcgtacgtactctgagcgcactactgaagaaagttgatgagtatcatcatcaaaagttgttgtcttgctatcgttattaattcgtagggctatatgtatttgtgatccttccgtcgcttctagaaacaccgtacctgaatatcacagctagtaattatcaaataagataccttttccagttatataagatgcatgcatgcatccatgtaagtgccgctttcctttaatttgtc

SEQ ID NO: 564 - DNA, 414 bp, Zea mays
  misc_feature (407)..(408): n is a, c, g, or t
ggctgtttcgagctctcgctcagcgtcctcatggaggccatcgcggagaccaaggcgaagcgccgggacccggacccggagccagacgcggacggcaccaccgacatgtcgccggaagcgcaggagttcaagcgggtcatcgacgaggtcttcccgtacgtcagctcggtgctgtgggactacctgccggtgctgcggtggttcgacgtggccggcgtgaggagcaggatcctggccgcggtgagcaggagggacgcgtttctgcggcggctgatcgacgcggagcggcggaggatggccgacggcgtctgcggcgagaagaagagcttgatcgccgtgctgctcgccctgcagaagctggagccggaggtttacaccgacaccgtgatcacggctttctgttcganncctatt

SEQ ID NO: 565 - DNA, 379 bp, Zea mays
  misc_feature (10)..(12): n is a, c, g, or t
  misc_feature (266)..(284): n is a, c, g, or t
tgaactcctnnncggtaaaaagcccaatgtttcatattttagagtctttggtagcaaatgttttattcttgttaaaagaggtagaaaatctaaatttgctcctaaggctgtagaaggctttttacttggttatgactcaaacacaagggcatatagagtcttcaacaaatccactggattagttgaggtttcttgtgacattgtgtttgatgagactaatggctcccaagtggagcaagttgatcttgatgaactagatgatgaannnnnnnnnnnnnnnnnnntcctcaacggcgtgttctgcgtcggggacttcatcccgtggctcggctggctggacctccagggctacgtcgggaggatgaagaggctgggcaag

SEQ ID NO: 566 - DNA, 359 bp, Zea mays
tcggcttcaaggggcagcacttcgagctcctgccgttcggcgccggcaggaggatgtgccccgggatcgcgttcgcggagggaagcgccgagatggcgctggcgagcttgctgtatcattttgactgggaggcgagccggggccagaaccgggaagggacgccgtcgctggacatgaccgagatgagcgggataaccgtgcatatcaagtccggtctgccgcttgtatccaagccgtggagtggatcccccttgaactagtagcagaaaaacattgatagggcgcattaaagatggcaatggatacctaaaatccaaatacccgacggacccgatataaaggtgggtatgggatgattt

SEQ ID NO: 567 - DNA, 506 bp, Zea mays
acgatgcgctcgccggacggcaagaagctggacatgctagcggaggaggacctcggcagcatgccctacctcaaggcgaccatcaaggagacgctgcgcctgcacccgccggcgccgttcctcctcccgcactactccaccgccgactccgagatcgacggctacttcgtccccgccgggacgcgcgtcctcgtcaacgcctgggcgctcgggagggaccgcacgacgtgggagaagccggaggagttcatgccggagcggttcgtgcaggaaccgggcgccgtggacgtccacatgaagggcaaggacctcaggttcatcccgttcggctccggccggaggatctgccccgggatgaacttcggattcgcgaccatggagatcatgctggccaatctcatgtaccattttgattgggaggttccgggctctgcagcaggggtgtccatggacgagtcctttgggctgacgcttcgccggaaggagaagcttctccttgttccaag

SEQ ID NO: 568 - DNA, 380 bp, Zea mays
agagctggacatgctagcggaggaggacctcggcagcatgccctacctcaaggcgaccatcaaggagacgctgcgcctgcacccgccggcgccgttcctcctcccgcactactccaccgccgactccgagatcgacggctacttcgtccccgccgggacgcgcgtcctcgtcaacgcctgggcgctcgggagggaccgcacgacgtgggagaagccggaggagttcatgccggagcggttcgtgcaggaaccgggcgccgtggacgtccacatgaagggcaaggacctcaggttcatcccgttcggctccggccggaggatctgccccgggatgaacttcggattcgcgaccatggagatcatgctggccaatctcatgt

SEQ ID NO: 569 - DNA, 353 bp, Zea mays
atgcccaggctgagctacctgcacctggtgatcaaggaggcgctacggctgcacgcgccggtgccactgctgctgccccgggagtgccgggagccgtgccgggtcatgggctacgacgtgccggagggcaccagggtgttcgtgaacgtctgggcgatcgggagggacgacgggttctggggcgacggcgaggtgttcaggccagagaggttcgacggcggcggcggcggcgtcgacttcaggggcaacgacttcgagttcaccccgttcggggccggcaggaggatctgccctggcatcgcgctcgggctggccaacatggagctcgcgctcgctagccttctctaccattt

SEQ ID NO: 570 - DNA, 916 bp, Zea mays
  misc_feature (120)..(123): n is a, c, g, or t
  misc_feature (157)..(160): n is a, c, g, or t
  misc_feature (204)..(206): n is a, c, g, or t
  misc_feature (212)..(220): n is a, c, g, or t
  misc_feature (396)..(399): n is a, c, g, or t
  misc_feature (410)..(412): n is a, c, g, or t
  misc_feature (417)..(419): n is a, c, g, or t
ctgaaccctggggttcctgaccagctctgccatcgcccactcgactgagatgactgttgtgtccattccagcagtgatcatatcctgaacatgatgaacaaaccatggaagattagtacnnnngaagtgatgcagaaggtgtccggtcatgaaggcnnnnaggttgatgccgagctgcgctcctgggcacacatgccggccaannncgaacnnnnnnnnnttgaagtcgctgcccttgatgtcgatgttctcctccaggaaacgctccggtctgtactgaagcgggttactccagaccttgggatcacgcgctaccgcccactcgctcaccatcacgttggcgcccttggggatgttgtaacctccgatcttgacgttcgagctggccttgtgcgnnnncatgagtggcnnnggcgnnngcagccggagtgattccttgacaacggcctgtaggtaggggaggttctggaagtcggtctccagcatgacgcggtcacggccaaccacacggtcgagctcctcttgcagcttcttctgaaccctggggttcctgaccagctctgccatcgcccactcgactgagatgactgttgtgtccattccagcagtgatcatatcctgaacatgatgaacaaaccatggaagattagtactcgcatcaccaacaagaattaccaggatcgattttttttacaaatcaattggcagtcacctagtggcatattagctaactggcctaacctttgcacattccacgtgttggtggtaggtaaaatgaacataaagtgcaaccatttccaactacaaaataaacatacagtttccaaattccacctccttgcacctaccctaagactgatgtctcgctctgacacaaactacaagctgatactgaactatacagtaacctttataa

SEQ ID NO: 571 - DNA, 618 bp, Zea mays
  misc_feature (609)..(610): n is a, c, g, or t
accgctccggcttgaactcgtcggcgtcaacccagtacttggggtcgcggccgatggcccacgcgttgatgatgacccgtgacttggctggaatcgtgtacccgtccagctcgcactcctcgatgctctcccggggcaccagcagcggtgccggcggatgcagccgcagggcctctttgatcaccagcttcatgtactggaggttgctcgcctgtaggtcgccctctgtcaccaccgtcttcccacggaacgcctccctgatcagcgcctgcatcttcttcatcactggtgggttccgcatcagctccgacatcccccactccatggccgaccccgacgtccccgtcccgcccgcgaacatgtcctgcgcatatatgcacacgtgcgtacgtgttgccattgaatataattaatggagatcgtgtaggactgaataatatactatatattaccagtatgatggccttgatgatgctgttggtaagttggaagccgaagccgcctttctcctgcaggccgatgagtacgtcgacgaggttctcgtcgacgtcctcggcggcggcgccgcccatgatcttttcgtcgcggatgcgcttgcgctcctcgatnntttcctcg

SEQ ID NO: 572 - DNA, 581 bp, Zea mays
gctggtccgcgccaagtccgagagactgaggaggaggtgggacgagctactcgataggctgatcgaggatcgtgagagcaagtatgaggcggcggcggcgggggcgagtgatctcaaggtcaaggacgatgatgacgataacttcatacatgtcttgctctccgttcgacaggagtacggccatattacgagggagcaaatgaaagctctcctgcaggacgtgtttatcggggggatagactccacatcttcgctgctcgagttcaccatggctgagctcatgcggaaaccacgagtgatgaacaagctccaagccgaggtaaggagcagcacgcccgaggggcatgatggagtcgtcggcgaagacagcctggagcacatggcctacctgagggccgtcacaaaagagtccctccggatccataacgtgacgccgctcctggccccgcacctgtccatggatagctgcaccatcgatggctacacggtccccgtcggggtgcaggtcctgatcaactcttgggccatcggcagggacacgcgctactggggcgacgatgctgaggagttcgtccctgaga

SEQ ID NO: 573 - DNA, 974 bp, Zea mays
gctccctgtacgacgtctcctgcttcgcggctggccttgctggtaccatctcttctccttctttccatctcagggttccaaacttctgaattgcttcgtgagactgggggtgtgcgtagctgaatttcttcccgtttggtcgccattgcaggcaacgtcttcgccctcgccctcttcctgtcgccggtgtaagctgctagccagcaccctcaccgtttctttaatttccttttttcgtctgattgttctggttgatcctaagggatgcaccgctgacgaatgccctgctcctgctgctgctgctcgcctgctcctcgctttctgcacgccgtcctccaggccgacgttcaagagggtcctcaaggccaagtcgacggagcagttcgatgggctgccctacctgctgtccctgctcaactgctgcatctgcctctggtacggcctcccgtgggtctccgacggcggcagggccctcgtcgccaccgtcaactgcaccggcgccctgttccagctcgcctacatctcgctcttcatcttctacgccgacagcaggaccactcgggtaagtaaattcatgtgcttgccgtggaatcgtgttgccttgcctgccctcttctcttgccgtgtctgtctgaccgaccgactgacaccagtctgctctgctctctccatctcctcccgtcctcgatccgcagctcaaggtcgcggggcttctggtgctagtggtcttcgcgttcgcgctcatcgcacacgccagcatcgccttcttcgaccagccgctccggcagctgttcgttggcagcgtcagcatggcgtccctggtctccatgttcgcttccccgctggctgtcatggtacgtatggtatgccattccagggggctgtgtatacttctcgatcgacttctcttctcccaggccgtgtgtctcatcgtcgcttctttgcgtgcttcgtcttggctgttcagggtgtgg

SEQ ID NO: 574 - DNA, 475 bp, Zea mays
  misc_feature (151)..(151): n is a, c, g, or t
  misc_feature (429)..(435): n is a, c, g, or t
  misc_feature (438)..(443): n is a, c, g, or t
atcttcggagtcgcttaggccgagcgaccgaagcaggaactcgacagcctttcccttgtcccagtcgatcaccgggcgaacctctaaaacctgcagcgtagcaaaagaattttttttttcgttgagtcttggagcaagtatcaagatcaanggcagtcgcagtagaacagtctaggctcctaccattcgcccgttggttactttgagacgagggaaggcctccaagacttgtttcacgagtcctgcgaccactttccagtcctgaaaaaaacaatagcataaagctctcagtctcaggtaaattcgctactgcttccctgtaataggcgcggtctgaatctgatgcatcctagtaaaaataaaaggatgtctgaagccgtaatttcatccatttctctaccgacaaaaaaaaggaaagataaacagatnnnnnnnatnnnnnntgaaagtttcaggggcacgcaatctcaccttc

SEQ ID NO: 575 - DNA, 411 bp, Zea mays
ctcgccgaggggttcgaggagcgcgtcagggacagggggctcctggtccgcgggtgggcgccgcaggtgaccatcctttcgcaccccgcagtgggcggcttcttgacccactgcgggtggaacgccgcgctggaagccatcgcctacggcgtgccggtgctgacgtggcccagcttctccgaccaattcagcagcgaacggctgctcgtcgacgtcctcaacatcggcgtcaggtccggcgtcaaggtgcccgccatgttcttacccaaggaggcggagggcgtgcaggtgtcgagcgccgacgtggaaaaggcggtgggcgagctcatggacgagggtcccaaggggacggcaaggagaggaagggccaaggacctcgccgcgaaggcgaaggtaaccatgatggaaggt

SEQ ID NO: 576 - DNA, 725 bp, Zea mays
tcgactgggagctgaccgacgaggagcggctcaagatcagccagatcccgcagaggaaggttgtccagactagtagcttgttctcgcaagagggtgagttcacggctgttgatccagcggaacttaatattttagaggaataagggggaaaatgacccgccacacatacactgcatcagtgttgcactgttgctgcatacagaactcagaagtgtatttcgtagaccatttgaataaggctgttggaaacggtgacatctagtgctgtttgtgtttcgttgccgggacggtaacatctacagttaagggggcgtttgagaacaaagtttttctgcagtattgaagcaatactgtagtattgagcaatactatggtattatatactttgaggtgtttggcaactcatctgaaatttctgtatactaaactgtagtattgtaaatactgcacttgttttgcagttttggaaactttggtctcagccaaagattttttctgtaaagagagcgtcagctgggtcccgctctggctgattggtctcaaccaaagtttttcccaaacatcttgatgtattggatactgttgtattccaaaactgaagcattgtaaactgtagtaatgtcatgactaaagtataccttagtatttgaaaaactacagtttggaaaaactgtgttcccaaacagggtctaatgctgcaatccattaacggaactgagggtaat

SEQ ID NO: 577 - DNA, 725 bp, Zea mays
  misc_feature (98)..(98): n is a, c, g, or t
  misc_feature (110)..(110): n is a, c, g, or t
  misc_feature (186)..(193): n is a, c, g, or t
  misc_feature (202)..(209): n is a, c, g, or t
  misc_feature (264)..(264): n is a, c, g, or t
  misc_feature (272)..(272): n is a, c, g, or t
  misc_feature (292)..(292): n is a, c, g, or t
  misc_feature (298)..(298): n is a, c, g, or t
  misc_feature (307)..(320): n is a, c, g, or t
  misc_feature (322)..(335): n is a, c, g, or t
  misc_feature (337)..(358): n is a, c, g, or t
  misc_feature (360)..(362): n is a, c, g, or t
  misc_feature (409)..(409): n is a, c, g, or t
  misc_feature (507)..(507): n is a, c, g, or t
  misc_feature (510)..(513): n is a, c, g, or t
  misc_feature (549)..(549): n is a, c, g, or t
  misc_feature (555)..(555): n is a, c, g, or t
  misc_feature (657)..(657): n is a, c, g, or t
tcgactgggagctgaccgacgaggagcggctcaagatcagccagatcccgcagaggaaggttgtccagactagtagcttgttctcgcaagagggtganttcacggctgtngatccagcggaacttaatattttagaggaataagggggaaaatgacccgccacacatacactgcatcagtgttgcnnnnnnnntgcatacannnnnnnnaagtgtatttcgtagaccatttgaataaggctgttggaaacggtgacatctagtnctgtttgngtttcgttgccgggacggtnacatcnacagttaannnnnnnnnnnnnnannnnnnnnnnnnnnannnnnnnnnnnnnnnnnnnnnntnnngcaatactatggtattatatactttgaggtgtttggcaactcatctnaaatttctgtatactaaactgtagtattgtaaatactgcacttgttttgcagttttggaaactttggtctcagccaaagattttttctgtaaagagancgnnnnctgggtcccgctctggctgattggtctcaaccaaantttttnccaaacatcttgatgtattggatactgttgtattccaaaactgaagcattgtaaactgtagtaatgtcatgactaaagtataccttagtatttgaaaaactncagtttggaaaaactgtgttcccaaacagggtctaatgctgcaatccattaacggaactgagggtaat

SEQ ID NO: 578 - DNA, 596 bp, Zea mays
ggctgtggctgtcgacgatgcctcatcacttaaaccccctgctggtgtatgaccttctgcatcgtacagatccatatgggggctatagccctttgcaagcatgacgatgcatgtttcccccttgcagagcaaacaccaccagggccctgctgctaaccaaaaccaaggcctgataccagattcatcggtgtattcccctggagatggggcccccaaggatgtacagtccctggacaagttctgaatttatgtccctgctctccatgacctagttaagggcatgttcggttccccgggaatgggcatgttcggttccccgggaatggtcgttctggaatgaatcctggtcggatttcttcactaatttatataagctttgatcggttggaacgattctcgggaggaatttcaggataaacgaacagggcctaaggcgtctccatgacctggttaaggcggcataatacggctttcacatgatgtttctaggcatatatgtaaaaaacaagtatattgtgtacccaatagtctgtagcctgttccaatcacattggttttgacatgcttgtatcctatgggtaggcggccgttgtgct

SEQ ID NO: 579 - DNA, 662 bp, Zea mays
aatgttaccaattgttcagtgatgacatatcaactacagtagatatcacgccacgttaggatgcctcaaacgtttcacccttcctttcacgttgccggtggttgactagattgggcagtgcatcgggatgtggtggagatctgaatttgaggccatcccgtttccctacatgcctccacgattccgtgctgcaaaggtacagagttgtggaaaattctgctagttaattttatcttcgtcggcattgtgccgatcgacctgagcgtgtgagtcctgtcttgccctgaaggaatgcatgaagctgttcctgatcaggctgccgatgtcccggcagttcatcgtgcccaggaacatgaagctcctggccgtgcctttgtcccagattcatggcaatgctcaggtatatgtaggctcgtgccacagtcagaaggttctatatgtagttcagggccaaaactccctccctaacgtcgctcccatctgcaggtttacggtccaattatagccgccattccgagcctactgtccaagttctccttcaacgtcatcagcgactgaattgtgcaaaccaaccagaatgttgaggggttagtagacgcatgcatacttggctagttgaagtcatagaacagtgtgcgataccgatgggagcttgtattgag

SEQ ID NO: 580 - DNA, 654 bp, Zea mays
  misc_feature (634)..(634): n is a, c, g, or t
ctggagttggaaggctggatgcacttttaatttttaacagagtttctgagaatgatccagtaagttctctatattctgtatctgtatagattgtgaccctttggtacagagctcctgaagttttgcttggagcaacacattactcaactggcgttgatatgtggtctgttggatgcatctttggtaagtctgttctccttttttagccttgagtcatgatgccaagtactttgtcttgtactggaaacttgacgaattatatgtatataatgtacggagtaaaatgcaataactgatgcatgatcttgtacaaggaatttagtagtgccccagtccaaactgtctacatcattgaatttttatgaccaaccaaataatatattgtgtttaggcttaaaatgttgccttcgctcctcttgattcaagagatggtgcattcaaatgattttgtactgttgaaatcttttaccccatcgtgacgttcgtagctttttaatgcagctgaaatggcccgacggcaggctctctttcctggtgactcggagttgcaacagttgcttcacatcttcaggtccttttctttccttctgtatccagtaatcggtaccataatatgagcagtaccttccttagntgctacaatagtatgattct

SEQ ID NO: 581 - DNA, 780 bp, Zea mays
aaagagaaaataaaatacgatgtcactaatatctcattgattactgattacaagtcaacagtttataatactttacaagtatcagaggtgaaacttggtgtacgcaaggccaaaccttttagacgaactgcattacatctgcaacttataatgatgataggttagaatatgacagttctcgtagagagctaaccctgccatttgaacactagctgcatggaacttaagtaaaatttctgttcccctttgatctcttagcctgttatagaacacaataagctgtcaccgcacaccaagtagacgggatacttctctgtccagttgtacacctcaccttgcaacatgtttactcactcaaaaactgtcatttgcagcaagacttgtctgctttcagatcagtcaaaaaggccatgatctcctatgctcccttgttctttcatctgttgctccaccagggggtcagggctcttcatgtatctcttgatcctcctgtaggtccaataatgtaatatacagccatatattaataaaacattcaatttagtcatttcgagtttggaaatcaaataatacagtaactattacctgtcctgttcattcagagcaggaaaagttggcatgaattccttcatcttgggcagaggaacttcacggaaccactcatggttcaaggcatcagcagcagatatgcgctgtatagaaggaacaagtctattaaggacatgcaaaatgtgtacaagagaatcaggtggtgcactagagaatgtatattaccttctc

SEQ ID NO: 582 - DNA, 517 bp, Zea mays
tgaagattctggtgccttcacttcttgtgttggcactaggtggttcagggctcctgagcttttatatgggtcaacaaactatgggctagagattgatctctggtcgcttggatgcattttggcagaactgatgaaattggaggctttgttcccagggatatctgatattgatcagattagtagaatcatcaatgtcctgggcgatataacagaagaaacctttccaggctgttcaaacttgccagattacaacaagatttcctttaacaaagttgagaaaccgacaggccttgaagcatgtctgcctaacagatctcctactgaggttagcatcataaagcagctaatttgctatgacacagcaaagaggaccagtgctgttgatctgctgaatgatcggtactttaccgaagagcccttgccggcacctatagaaggattacatgtcccggcatcaaaggacgaggatgatgacagctcaacagaagaatggggtaattacagggatggtgtctct

SEQ ID NO: 583 - DNA, 683 bp, Zea mays
ttagtattcccatttgtgttaccttttacatgattcatactcatatttaaattgaaaatgtcgtgttttacagattagcgatgatgatgatgcaaacatcagtgatctttttgaggaagcatcagacttcattgatcatgtggatcatgttgggggcaaggttctagttcattgctttgaagggaaaagtcggagtgccacagtcgtacttgcctatcttatgcttagagagtaagagtctttaacttactgccacttgcgcccgaattgcatgataatggatgcacaagaatttcatcggagctttgctattgacatgatagagctgtacttttcaggggctttactcttgcaaaagcctggaacttactgaagaaagtacaccgtcgagcgcagccaaacgacggcttcgcaaaggctctcctggcccttgacaagaggctgcatggcaaggtatctatggactggcaacacaagcggccagaaatgaaggtgtgtccaatctgcagcaagaatgttggtctaagtacgagttcactcaagctgcacctgcagaaggcacacaagcgtctatctgcaggcagtgtcgacagcgccatgaccatggagatccaaaaatcgatcgagtcactccagatcagccgaggaggaagcctgagcccgtcccagaagctgaccaaggt

SEQ ID NO: 584 - DNA, 1253 bp, Zea mays
  misc_feature (1241)..(1250): n is a, c, g, or t
atgagatgatgactgcgtccagaacaataaaaaataaggaaagatgcaattccaatcttcctatccttacagatgtcaattctgggttgatagaccttaaggtcacatgaaaaatagtaaatctgttaatagattgttttagtcgtggtgagttattggttttaatagagaagcatgatagtgatgatatagtaattactgtgcagtcttacttcctcagcatcaggtaggcaagaacaacagtcgcacttcgactttttccctcaaagcaatgcacaagtactttgccacgcaagtgatccacataactgatgaaatcagaaccatcttgaaagagatcaccaatgtctgcattgtcatcatcgtttatctacatagagaagcaattcaacactgaaagatatctaaactgagtcttctgccttatgctaaaggcaaatgattttccatccatgcaggtattatgtagaactcaccgagaaattcctatactcaaaaaggtcaggcttctgcgattctgactgtccaatttcatttgcacacaagcacaatatatgggtgatgccaaggtgtttaagtgtgtgtgttgaccgagcagcaagagcaccaccaatatacaggtaatctgtgatctgtgatggacgctcagtacttgcagcatcagagatcaaagatatcctctcgagaatgtgctcaagtcgaacctaacaacagaattgctcgataggttcaattaatgtgtacacgtagttagtacagagtgtacatttagatttaccttcaactcgtaagcatcaacaacagtgctattatcagtgccttcaaaaaaacctgtttgaaaattgttgtcttgacacaactttactacttcagtcctcagcatgtcattccattgttctatctctttgcttaattcactgtctatctgtaaaaatgtgttcaatgactaatagaatcacatgataaacttgccttgtttgtttaccctctagattatataatccagcttaaataagttaaaagacaaacaaacaacacaaattattaggtgaattatataatctagatacttaaattatgataatccataagcaggtcatgaggcccttcttacgtaaaaaaaatcatgaagccatttagctatttggcttcctgcaactaaatagtgggacaatctataagagtgaaaaaaacaactagaaacctacgtcagacagtttataatagacaatttatcaatnnnnnnnnnnaag

SEQ ID NO: 585 - DNA, 1158 bp, Zea mays
  misc_feature (1108)..(1110): n is a, c, g, or t
  misc_feature (1118)..(1120): n is a, c, g, or t
  misc_feature (1144)..(1146): n is a, c, g, or t
tgccctattttcttcttctgtgtacctgttgattgtaagttaaccatttccctggtaagttctcctaattaaatgctcctttgaacttcagagcaatgtgagagggagaaagcacgagtcctagtccattgcatgtctgggaaaagtaggtgtgtatggtacatatgtatattttttcatctgggggagctataatctttcttatttctgcactgatttgactaatgttatcgcgacactatatcagatcggcagcttttgtaatagccttcttgatgaagtcgagaggttggagattggcacaatcttttcagtgggtgaaagagcggagaccacaagtgcaactgtctgatggtaacttcatgaattgtgcataccttttctgtcatttttgttctcagatacccttgaagaaaaataggaagattgatgctcaagtaggctcttattgcaaaaattgttatgcttagctacacgagcgtgtgaattacacaataagattgggctactcaacgtgcacacaacacaagtatgcatatcaaagtgaaatgatgcatcatcatttgttgcaacacataatttattgtagtgacttgatctcatgttaattctgtttttgcactgggtgacaagtgacatgtgggtgtttggggaaaaactgatatgaggaacccagccctgatccaaaatgtcaattatggtgccacagtaataaatagcataaaacttatcatggtaagcgcaaagtaaggtgaaattagttcatgtttagtttattattaatgtatagcaagtagtccttaggacttcttgagtccgctagctactgaaatcatggagaggcaacaactaatgagttgaatttctacctgaaatgacctcagtagtttaggtaatacaagttctcacacttaaatttggaccttctagccacacaaataatagtgcatttaccaagtgctaacattagtgatgaacttgctttctgcagcagcacagcagcagctgattgagtatgaaaagaagctttttggttgtaatgatggcagcataccagctcaaccttttgctccagtggattcgctcccttctcttggatttggttttnnngaaaaccnnncaggcgacatccaagcgcctaccnnnaatcagcaggct

SEQ ID NO: 586 - DNA, 369 bp, Zea mays
atgcgccgcaagaaggatggcgaccttggccagctcccgctcccagtcccggccgcgcttctgcttgggccggccgtcgagtcgttctagccggcgctgtacattttttcgtccgcgggtggagctgtttaacctgctgtaccgtacttggtttttttttctttctcttccacttctatatttagtagttgtgctgtactatttagctagagctctgaattgtagaagctttattaggtcgagttaggtagtagagattaagatttccatggttgattaggattgttagggtatgtatggccatagtacttgtggtagtagttaagaacttggtgaggtgtttggcctgacctacgaggaatgatgttg

SEQ ID NO: 587 - DNA, 686 bp, Zea mays
caccctaatgttacaaaggtgaatattttcatgaattcctgtgcatgttcatgtctgtaactccggatagatgcttgtttatgtagtaaagctgttgatccttagcttgctgattattaccaaaatttgcccatgaccagttcatagcaggtatcttccataaaaagtttttccttttgtgctattggagaagtacttgaatgcattgtgttgttttttctcgcagtttgttggtgcatctatggggaccacagaccttaagattccatcaaacaattccaatggtgctgcacgtacaaatttgccagcaagagcatgttgtgttgtggtagagtatcttgctggaggaactttgaagcaatatttgataaagaatagccgacggaagcttgcttataaagttgtggtccagcttgcattggatttggccagagggtaaataacacttaagctgaaatactgccatgaattgttttctctgaatccactgctaactgtctggagatttcctttgcagattgagctatctgcactccagaaagattgtacatcgggatgtgaaaagcgaaaacatgctgcttactccacagagaaaccttaagattgccgatttcggtgttgctcgtgttgaggctcagaatccaaaggacatgactggtgcaacaggcacacttggttatatggct

SEQ ID NO: 588 - DNA, 251 bp, Zea mays
cgcggtggttgctaccacagttgactcctccgcgccgccgggggcggaggccaaggtcgccaattcttctgcagaaacaaggaggtgtaaacggcgagatttcagcgaaattcaaggaagtgagcccctaaaaaatcttgggacgcgaactgggtacagagcacggctccaacacgaagcaaacaaatcgccgcgcgatgggagggtgggagcgatggagagagagaaagattcggatttggattcgattg

SEQ ID NO: 589 - DNA, 499 bp, Zea mays
cctggtggccacgttcttcctcgaccgcgtcgggcggagaccgctgctgctcacaagcgcgggcgggatggtggtgtcgctggtgacgctggcctcggcgttgcgcgccatcgaccggctcccagagggacaggcgacgtcgctggcgggcgtgagcatcgcggcggttctcacgttcgtggcgtccttctccatcggcatgggcccgatcgcgtgggtgtacagctcggagatattcccactgcggctccgcgcgcagggctgcgcactcggcacggcgatgaaccgggtcatgagcggcaccatcaccatgtccttcatctcgctctacaaggccatcaccttcgccgggagcttctacttgtatgcaggcattgctgctgccgggtggctgttcatgttcttcttcctgccggagacgaggggcagcaacctagaggacaccgagaagctcttcggcggtggcgaccacgacgaggacaaggaagatggacacgat

SEQ ID NO: 590 - DNA, 588 bp, Zea mays
atgtctctcctgtggattggctgcctcatggacagtgtgctgttgagctctatagagagcagcgtcgcaagacatcgatatcacatgacaagctattactcaaggctgcaaaagaagctgccagacaactttggatgaatcacagaggtggtaaggtagaatatagatggatgaacacctgtggaaaggatggagtcctgacaagtgcaattaaggtagtaactcgatcacgaacactggaacttactttctgtctcttaatgaattacttataacacactcatattttatatgttgtgctatttatttcactatttcagacaagagttaaaatggagggtgcagcatgggaggtgaatgctcatttggaaagtaagaggatggacgaggactacgattccactgatcgggagtgcttttcatgcttctatgatctgcacttgtctgctgtgagttgccagtgcagacctaaccgctttgcttgcttaaaccatacaaaccttctctgttcatgcggaatggacagaaaaaccgtcttctttcgatatagcatggaggagcttgatactcttgtagcagctctggagg

SEQ ID NO: 591 - DNA, 355 bp, Zea mays
cgagaatcagagagcagtaggcatggtccacattcgtcaaagcgtgcataatcccaacatagcactaaacatgcagtcctatgctcctggtggctgcaaatccatggcaaaggatcttcttgagaggtaacgtagacataacactgagcggatcctaactctcgcttcactttatgagattgttgatcttatgcttctttattaattctaggttcttgctggcaagcggactgaatgagtttgttgacataagccaagtagagaagtttgtccagtagttcttatgcttattataggatcttagatttacctactctgtatatgtaacagctcagaacctagctaggagttcact

SEQ ID NO: 592 - DNA, 377 bp, Zea mays
gacgctagacagaagattcttgctgatggatttggcttcaagtgccgttgccttcggtgcttgtctggagactagaaaccatgtctactttcttcctgagcatgagtttgtcttcgattgtagcggattgaagcggttggtgctgaataccatcagaatcttaagttgcaatcttctgtacactagttacagccacgccaattgagttgtggttaagcattactttgccttttgcacttccctaccacgacatgctagaaatgttgtggtgtaaatgttgtagccgtttttgtttagcttcttgttcagtccttagtgtcagaaataaaatttcgataatactcggatcatttgaataccggaaaccttgtagctgt

SEQ ID NO: 593 - DNA, 574 bp, Zea mays
tcctcctcttccatggtgtcatccccatcatctccattgttatcatcatcatccttccactgactctccacctgacagcgatcacactcgcaccggaatccataatcctccagcagcctgcgctgcctatcagcatacctccaattagccgcaaagtagctgatgcagacctccctcccctcgggtatgtcatggagtgcacgcaccacaatgtcagtgttccctggcccaggcctgtcggggtaatcgaaatggcacgcattgggcaggcagtcatggttgaacagcgaagcacgggggtagactgcgtaggcccgcgccttcaggagctcgagcgacatcccgtgtcggtacggctccatgatggcgaagctgttgccccggtccttggcgaggagagccgccgttaggtctggcgacaatccctggggaagcatgtgcggcggcgctagggctgccacagcagcatggagccccgcggcgtcctgcgcgcccgggggcgggggcggcgccgaggagagagagagcatggagcgcatggttgactccgggagggagtaggcggagaggagga

SEQ ID NO: 594 - DNA, 503 bp, Zea mays
ggctgccctgtcttcacagtccagagacctggtaatcgctcaaatctcctactccctgaacgaacttggttgtccaatccaacttgtcctgacacaaaactgatggcactataatatcgctgctgaactgacgctgtccctgtctgtccatgaccagattcggcatcgctgggcgcagcgctgagagctgcccacgggtggctgtgcaacgcgcaaggtagcttcgtccccatctcgtgcctgtaccagggcaacctggagaagacctcccttggctcgaagctggcagtcccggccggggacaaggagcaggaccgggagctcctccagaagtacaccatcctgatgaggaagagaatggagatcgagagacgcctggtggagaagatcgggcgatcgtagggataaaaaaatcatgaagcgctgctgaggctggcaggaccgaataatttgtgaataagtatggattatctcgatcgtaggaaacaaattcatggcaggac

SEQ ID NO: 595 - DNA, 1296 bp, Zea mays
gctcgtattcgcctcatctcgcagcagcagcagaagaacaagggtatggcgaaggatgggggtcccgactggaacggcctgctcaagtggagcctcgcccacggcgacagcaccaacccgccgcgtgctctcaggtatgcaattcccgcgttcagatgccttgcttcatccccttgctctcgtcctgtgccacaaccctaatgactccgtgttcatcagtgcacatgcatagattttttttgtcttactccctgtactctagattttgctgttttactgcgcgttcctttttcccctaattttaatttgtgtgactagtaggtttaatatctgcttccaaaattgctgcgcttagttgaagagaagtggaacaaaatgttagtgtggttcttaatttcattggtttggttctgcagcgaggaagacagaaaatggttcatggatgctatgcaagccaacacggtagatgttgtgaagaggatgaaggagatcactcaggtgatgaaaacaccagaagatgtcttgcagtctcagggcgtgacccctgagaacatcgaaggtattgtctggtggcattacaatgcttccttagttgattttattttctctacgaaaatggcttggcccatttttgattcattgaccttttgttcagttattgcttatatgtttagtaatcggtgaagatcctcacacttctagtctgactaggttctttattgcttatatggttagtaatcagtgaagattctcacactcacttctagtctgactaggaacacgagagtatttagcgcagcagcagcatgcacacaactcttagtatgtgcagcagggtgtggtagcaagatgtggaaacacaataaacaaagaaacaatgtgattgtaatggtctagggctctaggctgttaattgatctgccaaatgatttccgtaacgctcaaagctaacagcggatgccctaagtactattatatttctttggcaaaagaaattcatagttgatggtcatggtcatataaggaattcatgattgatggtgtttatgtgctttcgcttgcctgctaaatgacgtctccaatcttatttggtcgtgtatcctctttggagattgactttatgggcattggtatttatcatccttgttatttagttcttggtgttggatccggaataaaaaattacttactctattttcagatatgttggatgagctacaggagcatgttgaatccattgacatggcaaatggtaagatacatagttgtaatcatcattctcttgtaaatgcttgt

SEQ ID NO: 596 - DNA, 703 bp, Zea mays
catggttgctcatctttgtttgtcgaacctctgaaatggatgactccaggtaggcttgatgttattaccttcctcttggagtatgaatctgtatggctgatgaaatttttatttgtgttgtgcaaagaaaaaaaaagccatataagtcctgcgcatatggttggttcctattgaacccatatacagagtatgatgcttaggtcaccttattactgaaacctgaataagtgaatatacttgatgtttgagcaattgcacaccctgtttggtcttagtagcacggttttattgccccatccttcgttaactaaaacttacatggtttcacctgcgcctttgttcacctagcagtagaagacggcgctttggagggaaagctatcatgcatccactgtggagctcggttgggatacttcaactggtcaggaatacagtgcaactgtggtagctgggttactcctgccttccaaattgttaagagcaaagttgatatcagcaccatctagacctgtgagcaaacgactggcaagtttgagggacgaggagcgcgacagcagtgacgcctgacggtttaatgttttgtgtaccatatgaacgctacgtatacaggtgaagcaatagcgtattttatgtttttccattgccgatcagaagctgtgtgtgacaaataccgtataaaatttcgcatttgctgatgtaacaa

SEQ ID NO: 597 - DNA, 427 bp, Zea mays
gaattcaacgtggtgtttcccgagcctggtgcgctctcccctgcccagtgccgatcgttggagaagatccttccgccgaaaccagggagccaactgtcggacatggagctggaccagtgcgaggagaccacccttcacgatgtcaacattgaagaggagatgaggcgcaggcagcagcagaagaagcaggaagcctacgatgaagacgaggaggaggatgctcaaccaagggtgcaatgtgcccagcagtaaaatccgtgttcgttggaactgttctccaaaagtttcagcaggattttttatccatctgatcatctcgattctttttggcaaaaatataatcgttttataaactttaaactgttagttccatcctagtgtcagggaaaaaatgagagcccggaatggcatgttccttgtttgaact

SEQ ID NO: 598 - DNA, 720 bp, Zea mays
aaatcttcggctgatcattctttcttcttttttcagcaagggctcgaagtctggtgcttcaatgaggtgccctgggtgccagggctcaggtatgaaagtcaccattcgtcagctggggccttccatgatacagcagatgcagcagccttgcaacgagtgcaaggggactggggagagcatcaacgagaaggaccgctgcccagggtgcaagggtgagaaggtcgttcaggagaagaaggttcttgaggttcatgttgagaagggaatgcaacacagccagaagatcaccttccctggtgaagctgatgaagcggtatgcttgttggagcatcagcgtgataagatctaaaggtctcttttttatgatttcaaaattatactgatatgttttgttactcgcagcctgataccgtcactggagacattgtattcgtcctccagcagaaggaccactccaagttcaaaagaaagggtgaagatctcttttatgagcacaccctgtctctgaccgaagctctatgtgggttccaatttgttcttacacatctggacaacaggcagcttctgatcaaatcaaaccccggcgaagttgttaaacctggtaagccatatcaaactgttactctgcctctgcagcaactgtatctgtcgctaatccttgcttgataaatctgagcagaccaattcaaggcaataaacgacgaggggatgccgatttac

SEQ ID NO: 599 - DNA, 676 bp, Zea mays
tcccgttcgacgaccggaacatcgtcgttctctaccagaaggtatactgggtcaatcatcagataaaacccgtaaaagccgaagcggtctttttgattatgctcttgcctactttacaatttaatttgccgggtctagattttcaagggcgatgctcagatcccggagtggctctctcccggcgcacggaaccttctccggaggatccttgagcccgacccggcggagcggatcgccatggcagagatcaaggcgcacccatggttccaggagcactacgtccctgtccttcctccgtacgacgacgacgacgacgacgacgattcagtgaagcaaatcggtgcgggtagtaaaaccactcatcacatcaacgcgtttcagttgatcggaatggcgtcgtccctagacctatcagggttttttgaggaagaggtacggtgtggtgtgtggacaacaaacatcttgggaacttccttttcttttttttctttttttttcctcctccatcacagcgatttgcctcttgctcatcaaaacagttcgctgcactactactgatatatagaccacagactgactgaattgagctcagagtaaactgttcttctaactctctgctgcaggacgtgtcccaaaggaagatcaggttcacgtccgcacaaccgcctgaggattt

SEQ ID NO: 600 - DNA, 441 bp, Zea mays
gtgctactacatgtactactacatggttcacttccatttcaagggggctctctggacgcggttttcgagtccataaagacacttgaacttgatttcagcagcaccccatgggaatcaatatcagttcttggacgggatcttattgggcgaatgctaaatcgagatgtctcttgtagaatgactgctgatgaagttcttagtaggttcaaacttcaaagagtctcatttagtgttgttatatttttttagaatttctttacttactgatacctatttcaggtcacccatgggtcgtgttttacacagaatgccccctgaaggtggtagctgctaatttgtgtctccctaacaaggttatagcacccaaaattccatggggcagacacaaatcagaatgtgactcattgtcagacgcaagccaaaggtcagaggatcaggatg

SEQ ID NO: 601 - DNA, 602 bp, Zea mays
gcttctccctagcttttgcttgctcttccacagcgcaaagctccgagatgatgatcaggcgaggcagcagcaacatctcctcacccctcgccctcctctgcctcctcctcctcctcctcctcctcgtctgctcctcctccaactgcgcggcagctgctcgcctcctgcctgccggtcctctccctcctctccgtgccgccgcccccagtggcggcgacgagcattccgcggcctccgaggtgacaacacaagacgtacgacgacactgatcaaatccggtgctcttcactttgagcgtttgacccctctttctcatcatcctgcttctgcatgtgcctgtgcagacgacgaagggagcggaggcgtgcgaggaggggaacgacgacaaggacgagtgcgtgcagaggcggctgctcctcgacgcgcacctcgactacatctacacgcagcacaagggcaagccgtgacggtcagcgaggagaacggtgctttgcgcatggtggagtacgtagatgaacgctgctgcggctagttaattaacatccggacggacgttgtcatccgtctagtagtagtagttagtatatatctatataatggct

SEQ ID NO: 602 - DNA, 542 bp, Zea mays
  misc_feature (532)..(536): n is a, c, g, or t
ctcgtgatgactgaggaaggtgacgctgacgccacgagcaatggcaacgacgacgacgagatctcctccgtctcagagtcagaggtgagtcaaaagggggagaaataaaaaaaaaaaagagaagaaaaatccatcgtccgtcccgacaaatctgcaagccttggttgggtgggttgggtgatgtcatgtcagtggagacgtacgagtacggcaggctaagaggcaggcaggctgcaggcatgcagctggctaatcgaagctgacctttgtccgtacgtgtcctgtctgtgcagacgacgggcgcagaggaggaggcgtgtgggacggagggcgacgacgacgacgaggaggagtgcctacagaggcggctgctcggagacgcgcacctcgactacatctacacgcagcacaagggcaagccgtgagccgagcccgtgaccaatgcatctcggcctcggcctcgccggtttgcatggatggcttggtttgttcagagtgcgtacattacatgcatgctgctgggaagaagtcnnnnncagacg

SEQ ID NO: 603 - DNA, 675 bp, Zea mays
caatcttattattcatgttgttatatgctctatttctggcttttattgtgtcatcatttgtgcttggcattatgtaccggtttccatattgtactcatgcacttttattctttgattgcctgttggtgcatctatattatcttttgcagcattcaaaatacgtaacatcttatgagtttttgactatttaagattcttctagatctttgctattaaagaattattttgacatgttaagtgattttttattgtttgtgttacacaggttgatacaatgatcattcaagccattggattattggatgatcttgacaaggagcttaacacttatgccatgagagttcgtgaatggtatggctggcactttccagagctcaccaaaatagttacagataatatacagtatgccaaagttgtgaagatgatgggcaacagagttaatgcagtcaaccttgacttctctgaggtgattattgacatctaaatatgatatacaattcatataaaagacattgtttagtaaggtctgttgttttcagatattgtcagatgaagagctagaaacacagctaaaggaggcagcagtaatatccatgggaacagaagttagtgaccttgacttatcgaatatcagagagctatgtgatcaagtgctggccctttctgagtacagag

SEQ ID NO: 604 - DNA, 405 bp, Zea mays
caccccttggcaccaattgaagacaagatcgattgtatgtatgctaactgcagaaacggtggtcaatataataataataataatatgtaggcttttttatatttatatttgcagcatgcatttcgtatgtttcagttgcatttaggttgtatgacttgagacaaactgggtttattgagcgtgaagaggtaagctcgcaaagatgttctgtatctatgcataccttttatgtggattcttttctagtaaagtggctaattgccatgccttgccttataggttaagcaaatggtaattgctatattgatggaatctgatttaaaattatcagatgacttactcgaggccatcatagataaggtaggcaataatcagctggaatgcccccaggattttttttttttt

SEQ ID NO: 605 - DNA, 231 bp, Zea mays
  misc_feature (217)..(217): n is a, c, g, or t
  misc_feature (220)..(220): n is a, c, g, or t
atgtatctcagatttgttcaagcactcgatgtcttttcagacgcgcacaactgctgccacggatgagattgcagcttatttggttttggttgtttaactgatcggttttaatttctggtgtgattaattggtagggggagattagtttagtcctgtccccggcgccggtgggatccaagcagcctaggtcaccggaccatcaccatcaccagcaggnggncatggaggagt

SEQ ID NO: 606 - DNA, 493 bp, Zea mays
attgccttggtaaaggtggtcaattagcggctgcttataagcttttctgtgagatgattgaaaatggctgcacacctaaccttgttacttacaatattatgattgcgctccaagccaaagcaagaaattatgagaatgttgttaagctgtacaaagacatgcaggttgctgggtttcgtcctgacaaaataacttacagcatcgttatggaagttcttggtcattgcggccatctggatgaggctgaggcggtttttattgagatgaggcgtgattgggctcctgatgagccagtatatggacttttggtcgatctctggggcaaagctggcaatgttgacaaagcgctaggatggtaccaagcgatgcttcaggatggtttgcagcctaacgtgccgacctgcaattcgctcttgagtgctttcctgaagatgaacagatttcaagatgcctacatcgtgctccagaacatgcttgctcgggggcttgttcc

SEQ ID NO: 607 - DNA, 380 bp, Zea mays
gcctacgccgtcttcgcgggccgcgaggccagccgcgccctcggcaagatgtccaaggacgaggccgacgtctccggggacctctccgggctcaccgacaaggagctcggcgtcctcgccgactgggagatcaagttccaggccaagtaccccgtcgtcgcccgactcgccgccgacgcctgaactcgtcagtctcggtctaaatttactctgtcctgcctcttgcggtgttcagtgctgtgcttgcttgcttgttgctagttgctttgctacccaataatctgaatggaaggacgtatgtgatgtgcctgctgaatagctcgagctcctagtccttgcatacactgctgtgctaccacatgacatgatgtactcgtgtg

SEQ ID NO: 608 - DNA, 540 bp, Zea mays
gagaagagcggctaccagaacgaggaggcgtacgctggaactggcgcgggaggatacggcgctcactatggtggtggccccgccgtcgctcagaagcaaggctacaggcagggcatatacgagagcgagagcgagagcgaaagcgagagcgagagcgacgagagcgactgcgaggaggcgttcctgccgcacggcggccggacgccgcagggcggcgtgcagcacagctacggctacgggggcggggcgtacatgcaggagaagcacggggctggcaacctcggcggggtgcgccgctacgagtcgtacgagagccgcgacgatctcggcggcggacgccgctacgagtcatcctaccagagcaccgtccagtacaccggctccccgaccaagaaccgccacgtcctacgctacggcgcgtaggcatatatacgctctggtccagttgcattgcagcacgtgcacctacgtatattcctatgccgcgtcgtgtgactcgtgtcgtataggcaggcggcaccgctacttggtgggccttgt

SEQ ID NO: 609 - DNA, 223 bp, Zea mays
tagttacctttacactccagtcgtcggataagaagaatgttcagcggctggctaaacagtctcaactgctgcagctattcaaattagtgttggagatgcaatttatagagataaaatactctagaagctatcgctgtagccggattaaattctgacctacttgtatagttttacacttacacagtgcaagtaataatatttaaggtagaagcagagagcactc

SEQ ID NO: 610 - DNA, 775 bp, Zea mays
cagcctacacgaggctgcccttcggtttcgcttgcttaggcagcaggggttttgggttcctgcaggtacggtgcagagcaaaatcagaagctataaaaattaatataagtacctaatgacataaataagtaatgttatctacttaactaatatcagggtattttttgcagatgaacttgtcaagttcatcaagaacgaagacgggagctttatcgatggtataaccaatgacccaaagggcctgttgagcttatacaacgcagctcaccttgttactcacgacgaggggacgacgacactacttgaagatgccatctcgtttgcaaggcagcatctggaagctgctaggagatgtagtctcaagtcccctctagctgaacaagtcggccgtgcccttggtatcccactgccaaggaccttaaagagggaggaagcaatagcttttatcccggagtatagctcatcacaacaagatcaacaagtgtacagccccgtgatactagagcttgccaagctagacttcaacctccttcagcatctccatcaagaagaactcaaggagatttctcagtaagctctgtactgtttttttttacatttcaatatatattgacatgattaaagtacgtacgtacgtacgtacgtacttaatggcagatggtggaaagacctctctggagaaatcggattaggctacgtcagggaccgcatcgtcgagtgttacttttggtcgtatactgtgcactacgagcgagggcaagcgcgtgcacggatg

SEQ ID NO: 611 - DNA, 1023 bp, Zea mays
gcatgtcatcagatataagtgacccttccacacctaggaaagttgaagatgccaagaacatttccatatataacgatgtgattgccttcacattgtttgagctagagacaatcacaaagagcttccgtgttgattatgttcttggcgaaggaggatttgggaccgtttacaagggttacatagatgaaaatgtcagggttgggctgaagtcactgcctgttgcagtcaaggtgctcaacaaagatggacatcaagggcacagagaatggcttgtgagtggaaacgttgttcagtaattttcatgctcacttgatcagtataccttttcattatatgcatggaaacatgagaaattgtctactaacatggacacatggtgtacttgtacactatgcatggcacattgacatggatacatgtagatatcattaggtccatgttgctaacaagcatgccggcaaataaaatacacatattggggattccatgcaatcatttttgtttctccatggctgtctggattagttctcactactttgttgcagtgttttgttgaccatgacatgggaaatagacaagctgataaggttatcaataatgagttcatgctcgtttacagacatgtgcagtccttgagtcatgctgttgttgacaaataacatattttatttgtcatgcttgaaaaatttaaaatatggtagcttacttgcatgaccggaataatgaacattaccgagaaaagaaacttgtggcgtgaagatggaaatccatgagaaaatgtgaatttatattcgaaaggttaagcaattgtatgtagctgcctgtaaaatgccattgagttatttttgcacatggtttgatagttatcatgcttattgctagcctacaaaattattgtgccagtattgttctttgctcaaaacaatgtaaaaaatggtttatccatcttttgtgtttatgtcagaccgaggttaactgcctggggcagttgaggcatccaaatttggtgaagttgatcggata

SEQ ID NO: 612 - DNA, 519 bp, Zea mays
agaagccgtagccggcacgccggccataaccaaccacctccgccggagcccagagccattcccctggtcggccacctccaccacctcctgagaaagaagccactccaccgcaccctcgcccacctcgctgagcgccatggagacgtcctggggctccggttcggttccagccgagtcgcagttgtgtcctctgcctcagtcgcccagcagtgcctcgtcgcactggacacctcgttcggcaaccgtccacggctgccgtccgcgaggatcctctcctacgagtggtcgaccatgggccattccaactgcgggccgtactggcgccaagcccggcgcaccaccagcacggagttctcctccgtggaacgagtgcagcacttcgctgatgtccacgagcaggcggcccgggccatggcacgccgcctttgtcgtctggcacttgcttctggccggggacgcgctcttgtagacgtcaagccacggctattcgagatgctaatgaacggcttactggacatg

SEQ ID NO: 613 - DNA, 538 bp, Zea mays
caccatgtcaatattgtgcgcctcatcgggttttgctccgaggaaaatagcagggcacttatctacgagttcatgccccatggatctctcgataagtacatcttctcgccggagaagagtttctcatgggtcaaactcaatgagatcgctctgggcattgctagaggtctcaactacttgcatcatgggtgtgatatgcagattgtacacttcgacatcaagccacacaacatccttcttgacaacaactttgttccaaaagttgctgattttgggcttgccaaactgttcccaaaagatgacagtttcgtgccactgagcgctatgcggggaacgataggatatatagctccagagatggtatctcgaagctttggtgtcatctctagcaaatccgatgtgtacagctttgggatgctactattggagatgacgggcgggcgaaggaacgcagatcctcatgcaggaagctccagtcaagcatactacccatccttggtgtacagccagctgagccaaggagatgcgaacgagatca

SEQ ID NO: 614 - DNA, 533 bp, Zea mays
gaagtgtggtacgggcggggcggtatggccagctcgtggacgctcctctccagcatctccagcaccctgctcatggacggcctgctggcgggcacggtctggatgcaccagagcccgatgagcgccatcttcctcgcgatctcctcgcctgccgctgcttctccggagcctcccgcgccgccaccgccaccgccccgaagcacgccgacgccgtcctcaagcagcaggtggtcgtacacccagagcgggaagaagagctcgccgccgccgctggacttgtcggcggcgcaggccttggcgttgctcctcccgccgaccatctccagcagcagcatcccgtagctgtacacgtcggacttggtggagatgacgccgaatccgcgggagaagacctccggcgcgatgaagccgatggtgccgcgcgcgtccgccatcgacaggatgctctccttggggttgcacagcttggccatcccgaagtcggcgatcttggggcggaagtcggcgtccaggagcacgttctggggcttgat

SEQ ID NO: 615 - DNA, 583 bp, Zea mays
atatattattacacacaagtaaactgttgattttgatgcatgtgtgcatgagtgcaggcaatgtgtattaccccaacgctggtctgccgcctatgtggcagcaatatggcagcaacggcagcatccctccgccgggatggcaccatcacggcggcgggaacccgctgtcgccatcgctgggctcgatggcggcgcccctgagcggcgagatgtactcgtccggcccccacgggcctcccctccccccaccttcgccgaacgtggcgctggggttctccaagagctccttctcgtacgaggagctcgcggcagcgacgtcgggcttctcgtcggcgaacctgctggggcagggcgggttcgggtacgtgtacaagggcgtgctcgccggcagcgggaaggaggtggcggtgaagcagctcaagtccgggagcgggcagggggagcgcgagttccaggcggaggtggagatcatcagccgcgtgcaccaccgtcacctggtgtcgctcgtgggctactgcatcgcgggcaaccagcgcatgctcgtctacgagttcgtggccaacaacacgctggagcaccatct

SEQ ID NO: 616 - DNA, 524 bp, Zea mays
ttgctgagagtttgggtatatacgactgcagttaatcatggggcggtcgacatggctgacgactgctgccttgctggtggcactcatcgccgccgcctcctcatccgtggcactcgcctcgccgcctgggaaacttgaggtcggtttctacgagcactcgtgccaacaggccgaggacatcgtgcgcaacgccgtccgccgcggcatcgcccgcgagcccggcgtaggcgcggggctcatccggatgcacttccacgactgcttcgtccggggctgcgacggctccatcctcatcaactccacgccgggcaacaaggccgagaaggattccgtggccaacaaccccagcatgcgcggcttcgacgtcatcgacgacgccaaggccgtcctcgaggcgcactgcccgcgcaccgtctcctgcgccgacatcgtcgcgttcgcggcccgtgacagcacctacctcgccggcggcctggactacaaggtcccgtcgggccgccgtgacggccgagtgtccaaagagg

SEQ ID NO: 617 - DNA, 314 bp, Zea mays
  misc_feature (309)..(309): n is a, c, g, or t
aggatatatcgcgcaacttcgtctagaccaggacgcctactcaggtggccagccacgcgcagaagtacttcatcaggctcaactccggcggcaaggacaagaggaggtccagcatccacgacatcaccacggtcaacctgacggacgatcagccgccctcgccgtcccagtcctccctgatcaccagccagtcgaacgcaccagctccagctccggccgcggggatatgccaggtcccattggcgcccgacgccaagcgacatggtgccggaactctgcccttcagctcactgaaccggacctctgtcntgccg

SEQ ID NO: 618 - DNA, 566 bp, Zea mays
tcatgatcgagcttggcaagatcctcggcgcgcggggactgtccgtaataattgtcgtcgtcgagcctcccttcaacacgggcgctacggcgcctttcctcgccggcgtctccgcggccaacccgtccatctccttccaccgcctgcccaaagtcgagcgcctcccgcccgtcaagaccaagcaccaggaggcgctcaccttcgaggtcacccgcgtctccaacccgcacctccgcgagttcctggccgccgcgtccccagccgtgctcgtcgtcgacttcttctgcagcatcgccctggacgtggcggaggagctccgcgtgcccgcctacttcttcttcacctcgggcgccgaggtcctggccttcttcctgcacctcccggcgatccacgagcggaccgccgcgagcttccaggacatggggaaggagctcgtgcacgtgccgggcatcccgtcgttcccggcgacgcactgcatcctgcccaccatggagcgcgacgacgtggcctacgacggcttcctaaagggctgtaccgacctctgccgctcccagggcatcatggtc

SEQ ID NO: 619 - DNA, 554 bp, Zea mays
ggctcggtcgtgtacgtcaacttcggcagcatcacggtcatgacgcccgctcagctcgccgagttcgcgtgggggctggcgaactgcggcaggccgttcctgtgggtcatcaggccggacctcgtcacgggcgagaaggctatgctgccggaggagttctacgctgagacgagagagagagggctcttcctcagctggtgcccgcaggaacaggtcctgtcgcatccgtccaccgggctgttcctgacgcactctgggtggaactctacgctggagagcatacgcgccggcgtgccgatgatctgctggccgttcttcgcagagcagacgaccaactgccgatatgcctgcgcgaactggggcattggactggagatcgacaacaatgtcacgagggacgaggtggcacggctcatagaagaagccatggacggcgagaaaggcaaagacatgaaggcgaaggcaacagtgtggaaggagaaggccgtggcagcaacagaaagcggcgggacctcgagcgtcagcattgatcgtttggtcgagttcctgcttga

SEQ ID NO: 620 - DNA, 564 bp, Zea mays
cgagttcgcgtgggggctggccaacaccggctactacttcctatggaacgtacgcccggacctcgtcaagagtggcgactccgccgggctgccgccagagttctcagctgcgacagagggacgaagcatgctgtctacgtggtgcccgcaggcagctgtgctggagcatgatgccgtgggggtgttcctgacgcactccgggtggaactccacgctggagagtatttgcggcggcgttcccatgctgtgctggcccttcttcgccgagcagcagaccaactgccgatacaagtgcaccgagtggggcatcggaaaagagatcggtgacgatgtacagcggggcgaggtagagtcgctcatacgggaggccatggagggggagaaagggcaagagatgctccggcgcgtgactgaactcagggacagcgccgtggccgctgcagggcctgacggacggtctatgcgcaacgtagacaggctcatcgaagaggtgctcctagcctagattgagcactggtgagcatcctagcagtcatgtgtcttcgcgtctggcactccaatcga

SEQ ID NO: 621 - DNA, 752 bp, Zea mays
  misc_feature (722)..(730): n is a, c, g, or t
ttatgaacgagtacgtgccttgaaccttgattatgtttgactgtaattaaatgtttgttcctgaccaaggcattgagaaagctttgttcttgttccagaaactacaaccctgtagaaaggaggtcaaagggatgcaaagaacgtgtctcaaagggttccaataagccatctaaatcattgcaagccaataggctttctggtgctgatccaacagatggaggtgcagagtctatctgatcattgattaagtgcttgtctaactaaatcatgagggtgcatctagcagccttttttttctttgacatacgcataggtagtgctactacacagtgtgattgttattgttctgaaatgatgtaactgttagagctggtttgggagtccaaaaaccggaggggattggagaggctaaaatcatcttctttttcaaaattgaataaggaggggattttagcccctctaatcccctccggttttgtggctctcaaactagcccttagagggaattactgctctcaaccctttgtctgcttagggatgttgtaaagggcgtacccagtgccgtaggcttcccgcactgtgcggggtctggggaagggtatctttaagcgccaagtcttacccgtataaaatgcagaggtttagggatgttgtaaagtttacaatttttatgcttctgtttgttattaatatctacatgctaatccaattatgcaggccannnnnnnnngaaagtatgtaacactttttct

SEQ ID NO: 622 - DNA, 814 bp, Zea mays
cgcgtcatcgagtccatcaagcacatgctagccatccgtatggacctcggcgaccccgacttcgtggacgtgaccggcgacgtcgccgagatgctgtccacgacattcgccgacaaagtccggcagaggatcgtggacaacacgacgttccctcccggctactacttccccaagtacgtatgcctaatttggcgttgcggattctatcggtcgcaggctcgcagccttgcagccagcggcgggcatcactcattcctgttctggttactggcggcaatggcatcaggtggagccagctggacgaccacggcaccagccacctgtgcgtggtggacggcgaccggaacgcggtggcgatgacgacgaccgtcaacgcatacttcggcgccaaggtgctgtctccgtcgacgggcatcgtgctgaacgacgagatggacgacttctccgtccccgcgaagcgcacgccggaccgcctcccgcccgcgccggccaacttcatagcgcccgggaagcggcccctgtcctccatgacgccgctgatcatactcaaggtatctctattctaatcgccgcgtgccgtctggcttgcactgcatgagctgagcccgttggtcgtctcagtctgacggcacgagcacgcacgtctcgctccgtaccgaagctgaaagccgttgagctgtgcgcgcaggacggtgagctcgccggcgtcctcggaggcagcgggggcacgaacatcatcgccacggtggtccaggtgttcgtgaaccacttcatcgtcggcatggaccctctggcggccgtccagcatcccagg

SEQ ID NO: 623 - DNA, 769 bp, Zea mays
  misc_feature (741)..(741): n is a, c, g, or t
  misc_feature (760)..(765): n is a, c, g, or t
tgctggatctgaatgcacggttgctggtgatattccgtatctagtaaatcacttgaaagatgaccataaggtcgacatgcacaatggaagcaccttcaatcatcgttatgtcaagtcaaatcctcatgaagtcgagaatgctacctggatgctcacggtaatggtcatcgatctctatactgcagaatctagtaaataactcatgtatctaggatcccagttctttatttctgtaaacatgatatattctgattgacctgaacccctgggacaatttcgtatatgtagatttcattgatttggatcttagcgttgagttcatgtttttccaagtgcacaattgtcagcatcactagcactgatacatactgctaaaaagctgcacgcttgccatcatcagctctgtgagtcatggtactcactacagacacaaagtgattgcttgccatcatcagctctacctgtttttcttctctgggtaaagtagaatatgcgttatagtagtgccttcttttttaaaaagggacgggtatcccaccttttgaagcctgtgttttggttttggttttcgttcccatgggagaaccgagtatatgccgtagctaatcacacactcatccctccaggttttcagctgcttcggccagtacttctgcctgcacttcgaggctttccagctgggcatggcgcccgtgtacatcgccttcctccggttcatgggggacgacgctgaggccaagnactacagctacagcctggnnnnnngggg

SEQ ID NO: 624 - DNA, 587 bp, Zea mays
agcgcgagatcgctgtgctacgccgcgtgcgccacccgaacatcgtgcacctgttcgaggttatggccacaaagactaagatctacttcgtcatggagctcgtccgcggcggcgagctcttctcccgcgtctccaagggccgactcagggaggacaccgcgcgccgctacttccagcagctcgtctccgccgtggggttctgccacgcccgcggcgtcttccaccgcgacctgaagcccgagaatctactcgtcgacgagcaggggaacctcaaggtatcggattttgggctctccgccgtcgccgagcagttccgtcccgacggcctgctccacaccttctgcggcacgccggcctatgtggcccccgaagtgctcggccgccgcgggtacgacggcgccaaggcagacgtgtggtcgtgcggtgtcatcctctttgtgctcatggccggatatctccctttccatgacaaaaacatcatggccatgtacaagaagatttacaagggcgagttccgctgtgcgaggtggttctccaaagaccttaccagcttgctgatgcgcattcttcacactaatcccaacact

SEQ ID NO: 625 - DNA, 526 bp, Zea mays
ctccggaagcagcaagccatcggcgccatcttcgcgccacctcccccctccgaacccaccgccggccatgccgattgccgtcgtcacgacatgacccgctcctccaaggacagccacgctgcttgcctggccgacagcacaccagcggctgatgaggtcgtcacccagctcatcgcccagcagttcgccgccaccgacggcgacacctcgtcgtcgtcgtcgtcgtactcgtacgcctccagcacggacaacatctccaagctgctcaacggcttcatgatgaagagcgcctcgccggcgcgggacgacgctaccgacaccatcaagacttcctcggccattgacatcgaccctttcgaccacaagtccggcggggcactactaccaccacccaagaagcggcagcagcagcagcagcatctgtcctccatagagaactggttgttcgacgatgccactgagcaggtcgttgtccagctgatggaggagatctccggcggctcatgctcagttcccatgctgcttt

SEQ ID NO: 626 - DNA, 431 bp, Zea mays
tgtttttcctcctcccgttcacctcgccgtcgacggggccaggcggccgaacacatccttgacgaccgccgtcgccctactcgcagcttcctgggtttcatcggatcctctgctagcgacgagcaccccctacaccaggtattccccctctccttcccttcctcgcaaaactgagcatccgaaccctaccttaagctatttggctatttgtattcagatctgacaagtatttgcatgtattgtgcctactaacttcgttttttctggcaaaaattatcgggtgtgctgctgacgcacacacgcaaggccgttacttgggcgccggtgccatgcccggcgggtcttcgggtccagatggtgaagtggatgcaggatttgcgaagctccagggagaggatttcgagtattacatgcaaacgtactccatcatg

SEQ ID NO: 627 - DNA, 355 bp, Zea mays
aggttgagtaccgtacagaatgcacatcgaattgctgtttgttcagagggcaggataactgaactggggacacaccgagaactggttgctaagggaggcagttatgcatcacttgtcgggacacagagacttgctttcgagtaatcacacgtcaactgcgaggaacggatcgactgcaatgtaggggattctatatattactctattttccttcagggcccatcggaacataggaattctcgtggaaatcagaatgaatttcatgggtaaaatatagaaaacagaagatgaaaaaaaacccaccttctgaatgtggccttggttataggttgtttcttatccacagaagcaacac

SEQ ID NO: 628 - DNA, 814 bp, Zea mays
  misc_feature (753)..(755): n is a, c, g, or t
  misc_feature (763)..(773): n is a, c, g, or t
  misc_feature (781)..(795): n is a, c, g, or t
  misc_feature (797)..(811): n is a, c, g, or t
tcttatgttccagacatctattggccccactggtcttagcgtggggtgagaatatctccattctctctgtggttatgttccttttgtgttgattggctaaaaaggttcaattttgtgtggcggaaataggtatatgcgaccagagaccgcacagggtatttttgtaaacttcaaggatctgtactattacaatggccaaaagctcccttttgcagctgctcaaattgggcaagcttttagaaatgaggtttgtgtttttttgccacatttctaaatggctaccccattttactcaattatggcatgattcagtcactgcttgttcagtgcctcgtactttgttcttgaaataataaatgttctacactagctttgtttttgttaatatgcttggaataatttatgcattctgatagttgacagtacatttgttacttgttatatagttagcatgcttctaaaaagcagttattggctattcaatagttgcttagatattcctttttttcaagtactcactatgtctagaacttgacaatcagatctcgccacgacaaggacttctccgagtccgtgaattcacattggcagagattgagcattttgtggacccagaggacaaatcacatccaaaatttgttgatgttgctgatttggagttcctgatgtttccaagagagctgcaactctctggggagtcagccaagctaatgaagcttggggaagcagtttcaaaggttaacaattgctggnnnttttctcnnnnnnnnnnntgatacannnnnnnnnnnnnnntnnnnnnnnnnnnnnnttt

SEQ ID NO: 629 - DNA, 714 bp, Zea mays
acttactgtgtttgtttgctcttagattacataagttggattatggtaaaatgatatgagggtaaaataatactttaaaatcataaataagctgaaataaactagtatggatagtttatttgtgatgcaaaagtgatatttttctctcctactattccactataattcaatttatataatataggaggaaacaaacaggcccttacttttagaggtgctgcatgtatgcacgattatgatggggactaaggatggttctgtctctgttgctgcagggaataatgtgctctggagtagcttactacgtgcaagggatagtgattaaggacaggggcccagtgttcgtgactgcgtttagcccgctctgcatgattttagtgactgtgctaggctccttcattctttctgaggtcgtcactttaggaaggtatgtatacgtgtctgacccaagatcaactactttcatacatcattgactgcgcgtaatttacaaagacatgtgtgtaggctcattggtgcgacagtcattgttgttggactctatgcgctcatctggggcaagaacaaggaccatgtgaagtcgcaaaacagttttgacaagcacgacacatttgagctgccgttctctacttctgccgttaacaatacaaccggtcccgtcctggcaacatctatttaaggctcgtgtccatgtgacttcctgtatcccgcacc

SEQ ID NO: 630 - DNA, 833 bp, Zea mays
tcggtttagtcgtgggcattgaatcgatttctattcctcgatggagcttttgctgatgcttttggagacgtgtttgtttcgtgtagacccctgaagcccataaaaaagcatggaaattgctgaaggtaggtgcaggcatcaaacggtagtttcttgaaagtcatgtgcttatgtacatacagtccgtctcacggaattccattccatcccagggcgcagatggcgtactcgtccctggagggtttggggacaggggagtccagggcaaaatcctcgccgcgaaatacgcacgcgagaacaacgttccttatcttggcatctgcctgggaatgcaaatcgcggtgatcgagtttgcccgctcggtgatgaagctacgaggcgccaatagcacggagttcgatccagctacgacgtcaccctgtgtcatcttcatgccagaggtaggtcatgcttacttggtggtactgccattcatttttgaaccgcgaacttctgactgacagcacttccactccacgtacagggctcaaaaacccaaatgggagccacgatgaggcttgggtcgaggaggacctatttccatgtcagtggctgcaaatctgcgaagctgtaagaaaacactagccctcatgttttcttcagtctagcgcatgattgtacacgtacatttgatgtggtgaaacataaccgttgtaaatatgcatcaggtacggcaacgccagctctgtagatgaaagacatcgccacagatacgaggttccgtgatctaatcgatctattagccatatcgaataataataataatgcatgccactgtttatctttttttgctc

SEQ ID NO: 631 - DNA, 575 bp, Zea mays
aatctgcggcgcaaccttccaggtaagatcggttcctttctcgaagaaagaattcagttctatgcatgcactagttcgtcaggcctgcatcatcatcggtctcatgcgatgtttggaaaggaaggatccagagaccagaggttaacttgaaatggatgctacacaattcagatgttggcagtgagctgaaaagcgtaactgaagaagaagaagaagaagaaagaactcctacaacatttctctgaaaaacctgtactcttgttcctgcactgcaggtggaaggagctacggtgctcacagcgctgcattaggagatgaggtgtcttcctccgtctccaggcctggactgggggcaactgtacatgatgcctggtggtgtaatataacataacggcaatggcatatgcagctgatcctggtctgcctgtatcatcatctcctcccacccgtaaagagaagttctttctgccgccatcgccatggtcagtcagagcttctctgctatagctgctggatgtgttgtgtgttgcgtctgtatcgtctctagtttgttcgacttacgtggaaacctgaga

SEQ ID NO: 632 - DNA, 583 bp, Zea mays
atgcttgtaacgttgttgactgattatcgttttgggttgtttgtagcaagaactttttggacgtggcaaactagttatgctaaggacttgcaaccaacttcttcgcagactatcgaaggttagattcagttgttctgctgtgcccaccctttgaagtttataaattatatttgctgttgttcccacatttcagcttggctaaatggctattttgttggccagctgattaccttagttaatctcgtatgtaaaaaataatcccctaccctaacccccaaaaaagacctaatatgaactatgtggcattgccagtacgaagaaatggacacccaaattgaaagtcaaagaggacatgaacctgcaccttgcacaccaactgagatcggctcagtttctagtaaccttgtctattaaacggattaatcaaaactgaactgcaaagtgtgttaagtattgctgataaccttggctataatctaaatggttgattgtactgtatcaccaaaatcttgaacctcatgaacccatggttcttttaacctaccgaacaccttcaattatcaccctttgaatgtattggagt

SEQ ID NO: 633 - DNA, 1229 bp, Zea mays
  misc_feature (991)..(991): n is a, c, g, or t
  misc_feature (1201)..(1206): n is a, c, g, or t
  misc_feature (1210)..(1219): n is a, c, g, or t
ctaaactatcaccactatacttcagatgttcatcattgaattgaaacactgcgctatccatttcgatccgttattttaattagagttaaatgcataagcagtctctaaagttgttaagaggtatctcttttggatgcatttggttcagctttcgaaaagtctactgattcaatttagaatcaccttatgcctatgttactatgctatcatgtttttatagaatctatagttgatagttgtttaaactaaacataatttacctttcacacgactgtcaactcacaacaactttctagcagctcgtagctagaatctagaaatctacagctgaaccaaatatacttttaggcacctaaacttattaagtggtgcaccacaatggtcggtatggtccagaaaaaaagacctacggtgcaccatttataagtttagggatatgtggtgcaccaaaaaataaatttagtgataaaaaatacatttacaaagttcatgagataagtttagacgcagttgatgcatttaactcttttaattaattgaaattgatatgctcgtgtgtctgacgattgatccttgcgcccatgctacacagaccgacgttctaccgcatctacaagagcaagtcgacggaaggtttccagtcggttccctacgtggttgcactgttcagcgccatgctgtggatcttctacgcactgatcaagtccaacgagaccttcctcatcaccatcaacgccgccggctgcgtcatcgagaccatctacgtcgtcatgtacttcgtctacgcgcccaagaaagccaagctgttcaccgccaagatcatggtcctcctcaatggcggcgtctttggggtcatcctcctgctcacccttctcctcttcaagggtgacaagcgcgttgtgctgcttggctggatctgcgtcggcttctccgtcagtgtcttcgtggcgccactaagcatcatggtaagcagcagcaccatgcatctgtngtcgatgcatgcatgcacatggatagagatatatatatatatactaactagctagctaatggacgtcgcggccgttgctaatgaattatttgcatgcatgcgtctacgtacgtacgtgcagaggcgggtgatccagaccaagagcgtggagtacatgcccttctccctctccctctcgctcaccctcagcgccgtcgtctggttcctctnnnnnntccnnnnnnnnnncaaatacgtc

SEQ ID NO: 634 - DNA, 244 bp, Zea mays
tttggatcagcagagcgttaaaccctatccgttggatgtagcactacaggcgtcgagcactggtaatcctgcaaccttcgtcatggcgcatgcggcggcggccgccgccgtgccgttacgtcgtccgctcctcttcctcaaggaggctcgactcctgtccacactcgcgacccccttacctgggctccgccacccgcgcgccctccgacccacaggccccttgccctccgatgccgaggacacc

SEQ ID NO: 635 - DNA, 799 bp, Zea mays
atcttgttgggcacctctcctcatatgttaagattggtcaaaagcagcgcgacgagcaggtgggcgccttactcttataagcccggcgatgttttgcatgtttttgtggcttggtatcttacacaagtatccttctttttttttctgcagaagaaggctgtagcaacctcgcattgttcccagcccaacacgatcgagtacgacttggccttggactggatgcttcttcgggaaaagcaagaccagagcttcagagtacttcacaaggtatagcctggggtgttgggttttagggactaaagtttagcccatgacatattggatgtttgaatgtctattacttgtaataaatatagtctaattgtaaaactaattacacagctaagactacaaagcgacatgacaaatttgtaagcctaattaatctactgttagaaatatttactgtagcatcacatgattgaatcattgcctaattagacttaaaagactcgtcttaatgtttactccttatctgtgtaattaattttgtaattagactatatttaatacctctaactaatagtcaaacatcccatcaaagcaaacacaggctgctagcgttgaagatttgaatccacgccgttgccttgtgtgtctcattaacttgcgcgtgttgaatcggtttgcagaagcacagagaagccaggaaagggttcgcaagcctggtcggcaaaggatccaaggcagagtagcaggccggttccaacctttcagagcttggcgcggtatgactgccgactggcaggaagagagggtc

SEQ ID NO: 636 - DNA, 532 bp, Zea mays
agtaacgcaaaagaggcggccccggtcactgttgcagaccaaaagttcaacgaggcgccaataccaaatgaggaactgacgatcggggtagtgcaggaacaaaggaaggacgtgaagccacgctcttaccaggcagcaaaaccagagatgtgtgacacaaccgtaacggaggaatcgtcgcccatcagcacgctaaagctggcgcacacggagagcgcgcccgcggagtgggaccacctgaacatagtccagcagagggccgacgcgctggagtcgctcctggagctctgcgcgaagctcctggagcaggagaggctcgacgagctcgcgggcgttctccggccgttcggcgagggcgcggtgtcgtccagagagacggcgatctggctgaccaagagcctgatgaccccacccaagttcggagagtccccgacgaagcttctgtaataacagtgattcgtttgagagtttttttttcgagtgccattttcgagagtgtacatagcttcaacagaatttgagttcaaggttg

SEQ ID NO: 637 - DNA, 348 bp, Zea mays
  misc_feature (227)..(230): n is a, c, g, or t
  misc_feature (246)..(249): n is a, c, g, or t
  misc_feature (262)..(267): n is a, c, g, or t
  misc_feature (283)..(284): n is a, c, g, or t
  misc_feature (288)..(288): n is a, c, g, or t
  misc_feature (292)..(294): n is a, c, g, or t
  misc_feature (297)..(297): n is a, c, g, or t
  misc_feature (300)..(302): n is a, c, g, or t
  misc_feature (308)..(309): n is a, c, g, or t
  misc_feature (320)..(322): n is a, c, g, or t
  misc_feature (333)..(333): n is a, c, g, or t
atgtataaaatgttgtgttgcgcacacggtgctgtggttttatgcgttggactaaattcttgtttcgttctgtttcaggatgctgcatgtatgaaatggctgcgctcaaacctgcttttagagcttttgtgagttctgaaaattctggtgcaactgaatgtttggcaggcctgattatatagaaattgatctgcttatctgacctaatgattagataacattgcggnnnnactaattttcttttgnnnntttctttgacagnnnnnncaaaaccttatcaacnncatnaccnnntcnatnnnatcagnntttgccaacannntattctggtgncattgtgagtttatt

SEQ ID NO: 638 - DNA, 578 bp, Zea mays
ggggcatcgggcagctcttcccgatgatgccggtgagccgcctcaacgaggagccgactctcaagggcacgctggtggacatcacctgcgacagtgacgggaagatcgagaacttcatcagccgcgaaaacacattgccgctgcacctgttcgagccgagcctcggtggctactacgtggccgtactcgtctccggggcgtaccaggaggccattgctggcaagcacaacctgttcagtggcccaaccctcgttcgtgtcaatagtagcactacaaaagatggcggcttcgagattgaacgcgttgacctgggcccagctgcggatgagatcatcggcagcatgaggtacagcgtcgaggaagacattatcaccgtcatcgagaagaaagccaaggggacagaagaagaagaacgtgtgtgggcgtgggagatggtggagccactcatgaccaaagcgctcaccaccatgccctacctcaacgaatacaaggtccctgaacctgaacctgaacctgaacccatcccttgaacttctgcactgcagagtctccggatttggctgcgactgcgatcatat

SEQ ID NO: 639 - DNA, 365 bp, Zea mays
cggtagacatgttaggatgcttacacatgaaatcagaagtactcttgacaggcatacgattttgaagactactcttgttgagctaggaaggaccttgggtctggaggaatgtgcattgtggatgccatctcgaagtggttcaagccttcagctttctcatactttgcaccaccagattactgttggatcatcggtgccaattaatcttcctgtcatcaatcaagtgttcagtagcaaccgggcaattataataccccacacatctcctttggcgcggattcgacctcttacagggcgatatgttccaccagaagtggctgcagtccgtgtacctcttctccacctttcaaacttccaaataaatg

SEQ ID NO: 640 - DNA, 679 bp, Zea mays
ttttgtacccagcagaccagaagagtccaaacgggaaactacggtataacaaaggcaacaatcttttttttacttactattattactattcccggaactgtagtttagcttcctgtcctcacattggttggttctatgtggaattgcagcgttctgtatgaagtcttcccgatgtcattcctgatggaacaagctggaggccaggctttcacaggcaaacaacgggtgtgtttcagtttccctttctcagaccccaatccccaactgaaaaatcttgatgctagagctatcacatttgcctgagatatcagggggatttttcaacacttttacaggttgaaattattgagaaaagggcactattttaacatgccatgtttttttttaccagtggttggcattgcatataactgaaaatgctcctgctaaatttataatgcaggcccttgaacttgctcccgctaaacttcacgacagatccccagtgttcctcgggagctacgatgacgttgaggagatcaaagcactgtacgcttcgatgtcaaacagcggttgacctttctgcctgaggaaacgagcgagatcaaaagcaccgtacgcttcagagtcaactgcttgatctttatagattgtaataaaataataaaagagtttgtaaaaaaaacaacaacactgcttg

SEQ ID NO: 641 - DNA, 513 bp, Zea mays
gcccgttgctgttggcttcggcatatccaagcccgagcacgtaaagcaggtacgtatagtagctgaccaaaaaaaaactgttaacaagttttgtttgacaagccggctactagctagctaacagtgatcagtgacacacacacacacgcagattgcgcagtggggcgctgacggggtgatcatcggcagcgccatggtgaggcagctgggcgaagcggcttctcccaagcaaggcctgaggaggctggaggagtatgccaggggcatgaagaacgcgctgccatgagtccatgacaaagtaaaacgtacagagacacttgataatatctatctatcatctcggagaagacgacgaccgaccgaccaataaaaataagccaagtggaagtgaagcttatagctgtatatacaccgtacgtcgtcgtcgtcgttccggatcgatctcggccggctagctagcagaacgtgtacgtagtagtatgtaatgcacggagtgtggagctactaaaaaaa

SEQ ID NO: 642 - DNA, 512 bp, Zea mays
gcccaacaacaacacccgcttcgcggccagcatgaacaacgtctccttcgtcttcccgcagaccgactccctcctccacgcgcactactacaagatccccggcgtcttcaccaccgacttcccggcatacccgcccgtgcagttcgactacacggggcagaacgtcagccaggccctgtggcagccggtccccgccaccaagctgtacccgctcaggttcggctccgtggtgcagctcgtcctgcaggacaccagcatcgtcacgcccgagaaccaccccatccacatccacggctacgatttcttcatcctcgccgagggcttcggcaacttcgaccccaagaaggacgtcgagaagttcaactacgtcgacccgccccagaggaacaccgtggcggtgcctgtcaacggttgggcggtcatccagttcgtcgccgacaacccaggtgtgtggctcatgcattgccatctggacgtgcacatcacctggggcctggcaatggctttcctag

SEQ ID NO: 643 - DNA, 367 bp, Zea mays
  misc_feature (40)..(41): n is a, c, g, or t
  misc_feature (44)..(44): n is a, c, g, or t
tgccggagcggttcctggccagggacctggacttccgcgnnacncagctggagttcgtcccgttcggctccggccgtaggctgtgcccaggcgtgcccatggcggagcgggtggtgccgctggttctagcgtcgctggtgcacgcgttccagtggcagctgccggccggcatgtcggcggaccaggtcgacgtcagcgacaagttcaccaccaccagtgttttagccttccctcctatcaaagctgtgcctctgctctgatcaccacctagcaacccagcttgagtgtccagtcgattttggccagcaaaatcggaaaagaaatccctgcagccggctgcacacaagcaccacgcaggcttcgttcg

SEQ ID NO: 644 - DNA, 506 bp, Zea mays
  misc_feature (462)..(472): n is a, c, g, or t
  misc_feature (477)..(491): n is a, c, g, or t
  misc_feature (494)..(502): n is a, c, g, or t
atctacagtgtgccctgacccatcaaaatacatctcatgggacggcttacacttcactgaggcgagttacaaagttgtcattcaaggagtacttggggggtatgccaagcctcccctttcaaaaacctgcaagggtgcggaattcaaagtttctcagcttcaccaatgtacagataatccaacaaacactgtgtcatacgatgctttgagctcttttatttgatctgctcgtaaaagaagtgcatttagagttacagggggcagcatagatgatgttgcaggaccgaacatcttggacactttctcaaagccgagaagagatccatcgatgtagggttattcagttctacaatctacaatccacttggctgctgggaggaggagaaaaaatgggaggggagtttgtagtgcagaaatttgcgattgcttagtgcactactttgctctgctatgtttttcttnnnnnnnnnnngctgnnnnnnnnnnnnnnnacnnnnnnnnntgac

SEQ ID NO: 645 - DNA, 596 bp, Zea mays
tcttgcgccatttacaggattagcttatcggatgcggggttagcttacaagaactaaccaggattggaaaataacagcaaatgactgcaaatgtagcatggatggatggatggatggatggatggatggatgagccatgcgtgtgtgtgcgtgttttttacaagctgaggatcccgtacagcgctgcctggtcatggttgagaggttgcggcagcaggaggcggcgaatgtttgcttctttgtcggctgatcaagttgtgccaagcggtagcgacgagggacaggccactgaacctaagccatctggttccctctttaggttgagcaacctgcaaataatcatgtcattagaaatgcttaatgttcggatgccatgaaggatatgaatatcatgtacctcggtagaatcgtgtgccttggtcgccgtgatttcgcacctgttgctcagctgacgcgccgtcgctgcagaggaggagagaagtactgtcagcgtcaatggagctcacgagacgacaaggaacgaaggcaggggaagagctaagctagtcgcggtgtgcgaattaagttgaagtacctctgaccctgacggagtcatc

SEQ ID NO: 646 - DNA, 482 bp, Zea mays
gaagggttcgcgttccagcgcgacgtgtcctacacggcgttccttgaccgggtgcacggcgaggaggtggcgctcaacaagctggggctgtggcgggtgccgcacccgtggctcaacatgttcgtgccgcgctcgcgcatcgccgacttcgaccgcggcgtcttcaagggcatcttgcagggcaccgacatcgtcggcccgctcatcgtctaccccctcaacaaatccatgtacgtgttgaatcgatcggctagctagctagctaggcacgccccggccggcctctgacgactcgaccggtctttctggggtttggtttttcaggtgggacgacggcatgtcggcggcgacgccgtctgaggacgtgttctacgcggtgtcgctgctcttctcgtcggtggcgcccaacgacctggcgaggctgcaggagcagaacaggaggatcctgcgcttctgcgacctcgccgggatccagtacaaga

SEQ ID NO: 647 - DNA, 371 bp, Zea mays
agttctggctctgcagcacatacaccgaacagtatgcatttttcagtcccataccatcagcctagtcctttgccaaagcctaacgggaaggaagcaataaatttggtttcgcattgaataacagcatgccacctatcacaacatctgggcaaagtccacataaacagcgcaagtgtatccgtccctagcgtctgacccttgtactgccagtaatagctaacaattttctgggtcgtgtaaaaataatttccatgtaaagagatcaccgcgatatgatcacagggaaatgctgctaaatgagggagctttgtgaaatctgttgtatcgtttgatttctgggaaactgattggattgcccatgtaacataaaa

SEQ ID NO: 648 - DNA, 446 bp, Zea mays
gacctgtcccacaacctcatccgcggcaccgtgccgctgtcgctggagcgcctgtccacgctgcagaagctggacctcagctacaaccgcctgtgcggcccgctccccaaggggcacggcgtcatcaagcacgggtgcaagccgtacgcgcacaaccagtgcagcaaagggaccccgctcgcgggatgccaggacctggagtgagtgagtgagccggtggccatggttttctatactctgctatgctctccctcgccggcgttcttttcgtgtcccaatcttgaaggacgacggacggtacggtgcctggtttagttatagacaaaaaaaggtacggccgcgtggtggcggtgctaatatgcttagccacgcccacgcgcggttgatctttgagcagttaagcgtgtacgaaatgacagctgtgtacgtgtactgtctggtggagt

SEQ ID NO: 649 - DNA, 694 bp, Zea mays
  misc_feature (671)..(672): n is a, c, g, or t
gagactgtaagcacactgattctccttcctcttcatttttgattgacacttgacagtactggttttatgcgacattaatcatcgcaagtactagaaaatggagaaccgcagcaagactaattacgttcgaaacatcaagtgatgctcctgttgggtcttttgctccagttgttagtcatcaacaaaactagacactttttgctggtcctccttttgggggtgtatttggatcgtgtaccaggactagcatcatttgcagcaacatttgcagcgataagactagagtagtaagattttgaatataaataacttatgtcggtcccttctttcagtattatctatgtcaaatcatcgttcaggtctcttttcctgaggaccagacctgttttttgtttccatgcgctggtccttttctttgggtgatatgtttgcatagtttgaggactgcacctttcgtttctttctcttggttgtatttctttctgagcgtccttttttgatcttgtcgatctgtttttgaaggtatgtgccagataccgtggacgtggtgggtggcaaccgggcccagagatcatccgggtgctgttaaggcacgaggcatcacgaggcgttgtgaccatcatcgtcggtcatgcagtgaccaaacaataccttagcattgctgggtctcnngtggctatctacgtatccgtat

SEQ ID NO: 650 - DNA, 202 bp, Zea mays
acaattcgtgcatcagtgaatataagggacggacattggcatcataatgtgatcagcttcgcatggtgccgtgttcgccccggtcgaacatgttctacatgtgtggcacgagtatcgtacagaaatataccagtttattacttgcacaggcttgttagtctggaaagacaagggagattccagtgttgagatgattcttgtg

SEQ ID NO: 651 - DNA, 318 bp, Zea mays
agtcgatcgatgatgtcattctcctcgctcacgacttcccccgcccgtaggtcgcccgccattgctccacagccaagccccgctcatcacgcgttgctcctgaaggagccgagggccttgatggcgccagcccggaggatgtactggtggtagaaggccgcgatggcagcgcccacgagagggcccacccagaagatccactgcgaaagggtttaaacgatgagatcctaaattgtacatcacgagtgctggctggttgtcctgtaaaccacacaggcgtttacgtacgtggtcgtcccagggcttgtccttgttgta

SEQ ID NO: 652 - DNA, 334 bp, Zea mays
  misc_feature (326)..(326): n is a, c, g, or t
tgcggtccgagttcctgaagaagaggaagaaagggaagctgcccaaggacgcgcggtcggcgctcatggactggtggaacacgcactaccgctggccgtaccctacggtaaccatgcatgcatcctggcaaacacgcagcagcagcatcgctcgctggaatggcagatctgtgaccagcattagccggcggtgcaggaggaggacaaggtgaggctggcggcggcgactgggctggaccctaagcaaatcaacaactggttcatcaaccagcggaagcggcactggaagccgtccgaggacatgcggttcgcgctcatggagggcntcaccggc

SEQ ID NO: 653 - DNA, 338 bp, Zea mays
gcagaaattactagatattgaagagattattaattgggatcaattgtaactttgccaccactttgaacgctgttgcaagcttgccagcaggaaattgcataaatactactaacactgtcattttgttggcattcctgcaataaataataataacaataaaaccagtgaaaaaattgcaaatgcccatattaagttttcatcactttgtcagaattagattaacaaaatactaaacaattcatcgaaaattgctacttttgaggattttaatttccagacaactgagttctgctgatagttgtctgcatgtcattctggtggagaagctgctggtttgc

SEQ ID NO: 654 - DNA, 401 bp, Zea mays
cgactcgccacctaaaattaacgagagccattcggatcaaacgagctactactcctatatctgacagttgccaccctcacacataccgtacgcgtacgatggtgcagttctcacttggaagtttgaaccgtcgtcactgctccctgcagggacccagacggcggccagagggccagacgacccagcatcaccagcactgtcgtggtccgtacgtgcctgcagtttagcgtttgcagggtctcaactcggccacgtagcggcagttctacggagtgaagcgaaccgaccagctgggggcctgggccacgcacgtcgacagcgtgcatttaaatacgccggcggagctcgatcaacgaaagtcgatcgagagaccctgctgctagctagctggacaccgagag

SEQ ID NO: 655 - DNA, 454 bp, Zea mays
accacctgcctttgaatggcattttcaggaggattagccacaggacgcaccatcaaaaccacggccacgttgagaaggacgagtcctggcacccggttcgtttcctgtcgctctctcctttgttggagtttcaaaagttacgctgatggtgcatgtccatgaatggtgcttgatggtttctcggattgtgcagctaccagagaggctgtacaaaagcctggactttatgactaggaaattgcggtttaccatgccgttccccttgctcgcattcccgttatacttggtgaggctaagaacatgtctatcgatgacgcctgaattgggcgaacggacgtttttgtttcatagtgttgtggtcgtgctaaattcctgctctgcgggttcatgtgtgctatgtagttcgcaaggagtccagggaagtcaggatcacacttcaacccaagcagtgatt

SEQ ID NO: 656 - DNA, 402 bp, Zea mays
  misc_feature (389)..(394): n is a, c, g, or t
ttgaatttctttgattccatttcttgacagcataagcatccacctgtggatgtgtcctccaggagaaaacatgtgaacccgccgagcattcatttcaaacttcaaaatagggccatcatggagggagagaaacgttatgacgaagtaaacaaatctgtcgctgtcaccgtcttcattaccattgcctaaagcaaaatcatcttctctgaacatcaattcagtcattgaagcccatgtgtacctccatttccttgacaagagacatgttcttacagcttcttttattggcaaacagcagagaattttatctttaataacatcaggtagattactgatgatgtcaacatttgtaacagatttatgtcttttcttttgagaacctccacgannnnnngggtatac

SEQ ID NO: 657 - DNA, 193 bp, Zea mays
tgtcctcccggggctcctccttggccctcgacgcgtgcatggcgtcgttctgcctctgctgctgctggtgctggctcatgtacgagcccatcgggttgtcgaagccggaagagaacgcgaagccgccgccgccgctctgcgccggcgcgccgctgaggccgaacgagcccagctggtcaccgaacccgtactg

SEQ ID NO: 658 - DNA, 422 bp, Zea mays
aggtgtgtatggggcggatggagctcccccaggcggcctgcttggacttgctctgcgggttgtcgaaccagaaggtccaggagtgctcgagcgggtgcgtggcgggcggggaaggagcgcaggcgaggtcggtgatctcgccctcctccctgtcgtcgtcctcgggcgcggggcggcctcgggagcccgcggaggcaggcctggtgtcggtctcctcggccatggcgtggcggctgtggtgagggaggcttttctttacgccgggcggacggagacggagacggagacggagacggagaacgcggggccgccgcctcgcttgtctaggtttcctttccctttgatcccttcagttctcctcctctcttctcatagaaatgggccaggccaggcccatggtaggtggttgggatagaccagct

SEQ ID NO: 659 - DNA, 561 bp, Zea mays
  misc_feature (332)..(334): n is a, c, g, or t
  misc_feature (538)..(540): n is a, c, g, or t
tccgtgctgctagcgttcgtacacggatgcgacctgtacgtcagacacgttctgattgctaacttgccagtgtttctctttggggaatcctgggatggctctagccgttccgcagacgggatcgatttcatgattttttttgtttcgttgcatagggtttggtttgcccttttcctttatttcaatatatgccgtgcacttgtttgtcgggtcatcttttcatgcttttttttgtcttggttgtgatgatgtggtctggttgggcggtcgttctagatcggagtagaattctgtttcaaactacctggtggatttattaattttggatctgnnngtgtgtgccatacatattcatagttacgaattgaagatgatggatggaaatatcgatctaggataggtatacatgttgatgcgggttttactgatgcatatacagagatgctttttgttcgcttggttgtgatgatgtggtgtggttgggcggtcgttcattcgttctagatcggagtagaatactgtttcaaactacctggtnnntttattaattttggatctgta

SEQ ID NO: 660 - DNA, 405 bp, Zea mays
cggtttctttcttcagctgctgcttatagcttctatatatctgctgaacagtgagctcactatcttgaatcttgatgcctcatgtgcaggacgactcgagaagggataagccaagcagaggtggacggtacaccgtgtaagtcgcacacgaagatggtcgttgttgttcggactggacagaggctgagagtggagttttgtgctgagatcggcaccagctttcatttaatacagcctcagcttacctgaggcaattttcgcacctgttatatgatgttgttttgctctcagataggtttatgtagcacaagaaagatatgttggagacgttgacgattttgtatgcaactaaatttctatcttaatatgccccgattcaacagcacccgatcgagtcattgcgtt

SEQ ID NO: 661 - DNA, 369 bp, Zea mays
aagtttgagaagtttgacttagaacaaagccaaagtgactttataatttggaccagatgaagtacatagaactgaggtttgcaataaataaacaaaaaacgcagtaatttaatcaggttagattgcattaaaaagaaaagatcgattgaatgaacaaagtgtttctatctaaatcaataagtttgcaaagtacctcagctttattcattgggaagatatgtagtctacgaagtctctgaggatacttcatatcggcttcatgtttctcctgaccttttaacatttcagaagatgactgcgagggagtgggtggagggcaacttataggggaaaggcgatgtgatttcccggccaccagctgagcttcaa

SEQ ID NO: 662 - DNA, 441 bp, Zea mays
aacttactgtaaaacttgtttaggattctttgtatgctttaatgtgacgcatgtatgctatttgatagcgtctttttagtctgggagcgcagccacatttcttaatcggaccatgcaagttggtcgatttaaaaggatctgtgacaggagagtttgccagtgtccgaaaaatcagcattatgcaattggagtagattgttttcatcatttgcaatcttgaaagaaatattctataatgatgtagatacactgcaacgtcattgatcgactcgtgatatggtatgcttttctttgtacaaaatactatttagaggtacttccatgcttcgctctttgaaaaatacaaatttgacagaataattgtttaaattgcttgcaccttcaagcattttaaaattgatacagttcctttacaaagcattgaaacaccagttgaccaca

SEQ ID NO: 663 - DNA, 460 bp, Zea mays
tgtttggcggccgcgggttcgtgcccttctcccctggatcgcccactgagcagagcgtccacgacggacggtgaacaaagccgcgtctgacaccaagagacgagcaggacatgcttttggctgctaatcgtcagatgatgatgtttttgtttgttgacagcttctgatggtgcgttagcaatggcaacgaggtgtcagttggtttggattagcaggatgaagaagagcaaccctggtaactagggcggggggattgagtttgtgcatgacaaggctgcaaacttttgtatgtagataaaaaaaacacccatttggccatttgtattgtatgttattgtatgtaagctagcaggcctgtacaactgcttttaggtcttcgtttggatgggcgaaattctggcaaacagcagcacatccactctgtgttctgatctaagcatcttggtttgattttgaaatg

SEQ ID NO: 664 - DNA, 452 bp, Zea mays
gcgacggcaacgacctggtggtgacccagaaggtcccgctggcggaggctctgacggggcacaccgcgcgcctggcgacgttggacgggcgcatcctgacggtgcccatcagctccgtgatccacccggggtacgaggaggtggtgcgcggcgagggcatgcccgtccccaaggacccgtccaggaagggcaacctccggataaagttcgacatcaagttcccggcgaggctctcggcggaccagaagtccggcgtcaagaggctgctcgggcagtagagcgcctcgtgttctggtgtgctgtgtgtcagacattttcgtgttggttgatcttgaactgggggatgctgccatttgcagcgtccgtgacgacgacgacgaggaggcaggccaccgagcgctgagtacagaacaagctagtggtggtatatggttgagaccttgagatgcaca

SEQ ID NO: 665 - DNA, 434 bp, Zea mays
aacgtctttgctttcgactacacaactcaagtcctggtaagcattattaatccaggcttcggggggagcttatgttttagctgtcgatagtactttcatttcatctgatcacgggcctacacttactgtctctgcatgcagttcttcatcgtgctgtcgtgcctgatctcggtctcggtaaacttcagcactttccttgtgatcgggaagacgtcgcctgtaacctaccaagttctcggccacctgaaaacgtgcttggtcctcgccttcggctacgtcctgctccacgacccgtttagctggagaaacatacttggaatcctgatcgcggtgatcgggatggttctgtactcgtacttctgcactagagagactcagcagaagccggcagaggcctccccgcaagccatcctgcaggtatgttctgcaacggt

SEQ ID NO: 666 - DNA, 448 bp, Zea mays
acgtagtaacaactaacaagtatatgccaacctcggtcacttggaaaaacttcatgagtccctctctttaaggagaaaaaggaaaccgatcaaaaaccatctctgcatctactgcctctatactttgcctttgatacggctgagtagcaaccttgtaaccaaagcacccgattcaaacccaacccatacatacaacactatcaataaaaccataccataagagcatgcagccactgcctggttggccggttcacgcggcgtcggtccggccggctttccaggactcgtactccgggtcgtcggtgggcagctcgaagcggcagagcgggcacgagttgcgcacctggagccagggcacgatgcagccgtcgtggtagcggtgcgagcacggcagccgcttgacgcgctggccgaccgcgaccccgtccttgcacacagcgcactcatc

SEQ ID NO: 667 - DNA, 436 bp, Zea mays
gggacagaagtcagcaaaaagatgactgccggaatgagctccatgagtttcaagatgaaggagttgttccaggggcagactccagctgacaagattgttgagggtgccacctcagaggatctggacgggcctgactggaactcaaacttggagatttgcgacatgatcaacacagagaaggttgacagtgtggaactcatccgtgggatcaagaagaggatcatgctgaaggatgccagggtccagtacctctccttggtcctgcttgagaccattgtcaagaactgcgacaaggccttctcggaagttgcggccgagcgggttcttgatgagatggtcaggttgattgatgatcctcaaaccgtggttaataacaggaacaaggcccttatgctcattgaagcatggggggagtctggtgatgaactccgttatc

SEQ ID NO: 668 - DNA, 203 bp, Zea mays
gtccctgttcttacaaatcaccccttaccaacagacgcgtttgggtcaaaaacccaagtacaacactagtagtagcagtacattacatagcaacagtattcacatcaacggagtgcagcttgaggatcataattctacggataaaaagaacacttcgccgtcttcacaggcttggctgaaccgcacttgaagcaccctgtaga

SEQ ID NO: 669 - DNA, 368 bp, Zea mays
cacggcgacgcgacgcgacctccttttctttcctttccattccacctcacttttcagttttcaccttcgccgctccgtgcaggtttgccgcagaagggcagtcctcctacaaacaacaaaagtttgcgtttgttttttggacgtccaagggaggagcgtgcttatggatctggcgttttcgcgggagaacgtcacaggagcgttcggggtccggtagccatgacttgcctgattttctcctcggattccttcgattttttttttacgttttcgcgggctgtaacatgaaatgctctagcagtggttttcacgcttcgagttcgagatcttctgttgcctgctccagtccactgatatgtgatgtcatg

SEQ ID NO: 670 - DNA, 446 bp, Zea mays
tctgcataggaaggaaaagcagacataagaaaagcatgcatgcggatgtacaggcctgcggcaaccgggtgctgcgaggtgcgcacgagtgggagcagcacaggcaagggcgaggccaccggaagcgagtgcagcgcctgaagcagaagagcctgaggccatggccatcgctgctgccccaagaccgcagctgatggtaactttttcacagcagaaccggcgagaagtgggacggggacgttgacgtggacatggtcggctcgtcccacccaaaaaagcgtgccagcatgacagcgacatgctttcccaatcccgaattcccggcacgtcgacggggggaatacctccatgccttttagcagcggaagaagcaggcaccaaagaactgcttatcaaaagtattgtaccacacgtacgacgggtctagaagccacagaaacgtagtg

SEQ ID NO: 671 - DNA, 212 bp, Zea mays
cgatgccgaaaacgatgagcttcatcttcatgttttcccaccacatcttccgtcgtatctttgttccctgttgcctgaaatcttgtgcctacagggggaaactaaagcggtgagcttggtgatagtcagatcgatggaaccaatggattccacatgcatgagatcatatatatatgaggaacctgtgatcggagatcctccgttttatccac

SEQ ID NO: 672 - DNA, 432 bp, Zea mays
cctatggacagactacagttagtcaggggccaccttgtttcgtttccgttggatttcatgtgccaagaggacttgagaccatatttcagtgaaagtgagtactacacatcaccacaggttttccattagcctctctgtctgcctcgtaaagttactcaaccggctgtacatgttgcaaagatcaccttgtagatgctctacacatgttgtcaaataggaaacaaaaaaaatttaatatattatcataccattagagtattagaattgtttcctagaaagaaaatagtatatcagtatagttcattcgttccaacaacttttagtttcgggaaagaaacaatcaaattcattgtttataagtgcaaataataggagtttccttagttcaacacattttctttggaatgaatatacacctcccatagcagttca

SEQ ID NO: 673 - DNA, 394 bp, Zea mays
atatatatatatatatatatattctttatttatttgtcacaggctttggaagaagcattcaacagtttagaaggtattacatgcaataaagccgaaggcgcgatgtatctgttcccacgccttcacttaccccggaaggcgattggagctgcccaagcagccggcactgccccagatgcttactacgctaaacgcctactagaggccactgggatcgtcttcgtccctggttctggttttggacaggtccccggaacatggcacatcagatccacgatactgccgcaggaggacaaaatacctgggatagtatctaggttcaaggagtttcacgacaagttcatggatgaattccgtgattattgagtgtccatctcagttcagtcattgcata

SEQ ID NO: 674 - DNA, 325 bp, Zea mays
ggcggcgagagaagagtcagattcgtcggcgcggcagcggagagtcggagacgacggtaaagccgagccgagcgccgagcgggcgagcgatgcctgccgccaggtccgggggaggagattgtattttacagaagacttaccgtgggtagggggatcccttgatgggcttctggccgtacttcctccacgagtactcgtccggcgggatgtccgcgatcttggcgctgatcgccggcactctgatggtcctcttcacgcggtttttcctgtcaatcgaaaaaaaaaattaaagcagcggccagggttagaagatgagaactgctgt

SEQ ID NO: 675 - DNA, 409 bp, Zea mays
  misc_feature (401)..(406): n is a, c, g, or t
gagcaggctcagatcctaggtttttggtctgcttgtttgatgatgttgctctggataagcagctttttggtctgcttgaggaatttgtacacacttggcaatgaaaagatccttggactgagttgtcattctcgctcatgtttccagttttgtttcgatttgtagtgctcacatttcaaaacctgtgttttaactctacatatgaggctgctgtattactgaattggctaaacggctaaacctactacgttccccacttaaatgactgaacgatcaaggccgagaggttcgaccgcccttcatgtgggcttcagcctatttggataatcctgagagctctaaacggcttgtgtaatatcttgctggtgcctaactttagttgggttttgcctgtgagtgtnnnnnntta

SEQ ID NO: 676 - DNA, 413 bp, Zea mays
  misc_feature (252)..(256): n is a, c, g, or t
  misc_feature (264)..(267): n is a, c, g, or t
  misc_feature (270)..(270): n is a, c, g, or t
  misc_feature (306)..(310): n is a, c, g, or t
  misc_feature (325)..(345): n is a, c, g, or t
  misc_feature (348)..(353): n is a, c, g, or t
  misc_feature (374)..(380): n is a, c, g, or t
  misc_feature (393)..(404): n is a, c, g, or t
ctcgagccctgggacctgcccccgcgctcccgcctccgctcccgcgactcccagtggtacttcttcagccgcctcgaccgcaagcacgccaaccgcgctcgcaccaaccgcgccacgtcgggagggtactggaagaccaccggcaaggacagggaggtgcgccatgggcccagggtcgtcgggatgaagaagacgctcgtattccacgccggacgcgcccccaagggcgagcgcaccaactgggtcatgcannnnnaccgcctnnnnggngacgccgccgtggggataccgcaggtattctatccnnnnnccccttcttgcttgnnnnnnnnnnnnnnnnnnnnncannnnnntgtacttataaatgctggtgnnnnnnntcttaattgctcnnnnnnnnnnnnaataagaaa

SEQ ID NO: 677 - DNA, 1333 bp, Zea mays
  misc_feature (299)..(299): n is a, c, g, or t
  misc_feature (332)..(333): n is a, c, g, or t
  misc_feature (335)..(337): n is a, c, g, or t
  misc_feature (339)..(340): n is a, c, g, or t
  misc_feature (351)..(357): n is a, c, g, or t
  misc_feature (360)..(361): n is a, c, g, or t
  misc_feature (367)..(367): n is a, c, g, or t
  misc_feature (369)..(369): n is a, c, g, or t
  misc_feature (372)..(376): n is a, c, g, or t
  misc_feature (384)..(387): n is a, c, g, or t
  misc_feature (389)..(389): n is a, c, g, or t
  misc_feature (397)..(397): n is a, c, g, or t
  misc_feature (400)..(403): n is a, c, g, or t
  misc_feature (407)..(411): n is a, c, g, or t
  misc_feature (414)..(418): n is a, c, g, or t
  misc_feature (433)..(435): n is a, c, g, or t
  misc_feature (437)..(440): n is a, c, g, or t
  misc_feature (443)..(451): n is a, c, g, or t
  misc_feature (457)..(459): n is a, c, g, or t
  misc_feature (462)..(466): n is a, c, g, or t
  misc_feature (468)..(468): n is a, c, g, or t
  misc_feature (471)..(480): n is a, c, g, or t
  misc_feature (483)..(496): n is a, c, g, or t
  misc_feature (498)..(512): n is a, c, g, or t
  misc_feature (514)..(531): n is a, c, g, or t
  misc_feature (537)..(550): n is a, c, g, or t
  misc_feature (557)..(569): n is a, c, g, or t
  misc_feature (572)..(574): n is a, c, g, or t
  misc_feature (576)..(580): n is a, c, g, or t
  misc_feature (585)..(587): n is a, c, g, or t
  misc_feature (603)..(615): n is a, c, g, or t
  misc_feature (620)..(632): n is a, c, g, or t
  misc_feature (634)..(637): n is a, c, g, or t
  misc_feature (639)..(645): n is a, c, g, or t
  misc_feature (654)..(654): n is a, c, g, or t
  misc_feature (656)..(657): n is a, c, g, or t
  misc_feature (660)..(664): n is a, c, g, or t
  misc_feature (666)..(678): n is a, c, g, or t
  misc_feature (683)..(688): n is a, c, g, or t
  misc_feature (691)..(709): n is a, c, g, or t
  misc_feature (711)..(722): n is a, c, g, or t
  misc_feature (726)..(726): n is a, c, g, or t
  misc_feature (729)..(731): n is a, c, g, or t
  misc_feature (734)..(736): n is a, c, g, or t
  misc_feature (738)..(741): n is a, c, g, or t
  misc_feature (743)..(746): n is a, c, g, or t
  misc_feature (748)..(761): n is a, c, g, or t
  misc_feature (766)..(769): n is a, c, g, or t
  misc_feature (775)..(780): n is a, c, g, or t
  misc_feature (787)..(789): n is a, c, g, or t
  misc_feature (791)..(794): n is a, c, g, or t
  misc_feature (796)..(803): n is a, c, g, or t
  misc_feature (808)..(834): n is a, c, g, or t
  misc_feature (841)..(850): n is a, c, g, or t
  misc_feature (853)..(859): n is a, c, g, or t
  misc_feature (862)..(877): n is a, c, g, or t
  misc_feature (879)..(882): n is a, c, g, or t
  misc_feature (894)..(902): n is a, c, g, or t
  misc_feature (910)..(910): n is a, c, g, or t
  misc_feature (912)..(917): n is a, c, g, or t
  misc_feature (922)..(931): n is a, c, g, or t
  misc_feature (937)..(945): n is a, c, g, or t
  misc_feature (950)..(963): n is a, c, g, or t
  misc_feature (965)..(966): n is a, c, g, or t
  misc_feature (968)..(971): n is a, c, g, or t
  misc_feature (975)..(980): n is a, c, g, or t
  misc_feature (982)..(989): n is a, c, g, or t
  misc_feature (993)..(997): n is a, c, g, or t
  misc_feature (999)..(1001): n is a, c, g, or t
  misc_feature (1005)..(1005): n is a, c, g, or t
  misc_feature (1007)..(1009): n is a, c, g, or t
  misc_feature (1011)..(1012): n is a, c, g, or t
  misc_feature (1017)..(1019): n is a, c, g, or t
  misc_feature (1021)..(1021): n is a, c, g, or t
  misc_feature (1023)..(1028): n is a, c, g, or t
  misc_feature (1044)..(1049): n is a, c, g, or t
  misc_feature (1051)..(1053): n is a, c, g, or t
  misc_feature (1055)..(1055): n is a, c, g, or t
  misc_feature (1057)..(1072): n is a, c, g, or t
  misc_feature (1075)..(1080): n is a, c, g, or t
  misc_feature (1084)..(1084): n is a, c, g, or t
  misc_feature (1089)..(1094): n is a, c, g, or t
  misc_feature (1096)..(1097): n is a, c, g, or t
  misc_feature (1099)..(1104): n is a, c, g, or t
  misc_feature (1107)..(1129): n is a, c, g, or t
  misc_feature (1131)..(1132): n is a, c, g, or t
  misc_feature (1134)..(1146): n is a, c, g, or t
  misc_feature (1151)..(1158): n is a, c, g, or t
  misc_feature (1160)..(1164): n is a, c, g, or t
  misc_feature (1168)..(1176): n is a, c, g, or t
  misc_feature (1178)..(1213): n is a, c, g, or t
  misc_feature (1217)..(1221): n is a, c, g, or t
  misc_feature (1223)..(1224): n is a, c, g, or t
  misc_feature (1232)..(1232): n is a, c, g, or t
  misc_feature (1235)..(1263): n is a, c, g, or t
  misc_feature (1265)..(1270): n is a, c, g, or t
  misc_feature (1276)..(1277): n is a, c, g, or t
  misc_feature (1281)..(1282): n is a, c, g, or t
  misc_feature (1286)..(1291): n is a, c, g, or t
  misc_feature (1296)..(1298): n is a, c, g, or t
  misc_feature (1302)..(1307): n is a, c, g, or t
  misc_feature (1309)..(1314): n is a, c, g, or t
  misc_feature (1316)..(1318): n is a, c, g, or t
  misc_feature (1322)..(1330): n is a, c, g, or t
aatcttacaacaacgatgtagaaatgcagatttctgcacgtaaaaaggaaacaggcagcatacccccttggcatgctatatcgaaagaataaatctcagaaactcaaagaatccaaggatttacaggagagaacaaatacctcctcctctatatgacaaccaacctcctcgtgtcgttgccaaaggaactttggaaaccagtaacaatgtacaggacaatgtacattagatggctgctgagcaccacaaacatctcttcaaaagcctgcgacacaaaaggagattgaaccacaagctanttgatgagtgtgaagacacgctctgcatgttcnntnnngnngagatcacctnnnnnnnganngatgtntnagnnnnnaaataggnnnntnatatttcntgnnnngcannnnncannnnntgaaacggaagatannngnnnngannnnnnnnncgggannngannnnnanacnnnnnnnnnncgnnnnnnnnnnnnnngnnnnnnnnnnnnnnnannnnnnnnnnnnnnnnnnccactnnnnnnnnnnnnnngaaacannnnnnnnnnnnnccnnncnnnnntattnnnttgcccgccaaatcannnnnnnnnnnnnccgcnnnnnnnnnnnnntnnnncnnnnnnnttctgtttncnnctnnnnntnnnnnnnnnnnnntgccnnnnnnatnnnnnnnnnnnnnnnnnnnannnnnnnnnnnngcgnccnnnccnnntnnnntnnnngnnnnnnnnnnnnnncctcnnnnctcctnnnnnnctcaccnnncnnnncnnnnnnnntaaannnnnnnnnnnnnnnnnnnnnnnnnnnttatacnnnnnnnnnnttnnnnnnnccnnnnnnnnnnnnnnnnannnnccatcccttcannnnnnnnnccctctcnannnnnnacaannnnnnnnnnattctnnnnnnnnnccacnnnnnnnnnnnnnncnngnnnnccannnnnncnnnnnnnncccnnnnncnnncctncnnncnnccccnnntnannnnnnttcgtcccgcctctcnnnnnntnnncncnnnnnnnnnnnnnnnnacnnnnnnctcnttccnnnnnntnncnnnnnnacnnnnnnnnnnnnnnnnnnnnnnncnncnnnnnnnnnnnnnatccnnnnnnnncnnnnnatcnnnnnnnnntnnnnnnnnnnnnnnnnnnnnnnnnnnnnnnnnnnnncctnnnnnanntcctacgnacnnnnnnnnnnnnnnnnnnnnnnnnnnnnntnnnnnncttctnncttnntacnnnnnnctttnnnactnnnnnncnnnnnngnnnatannnnnnnnncgt

SEQ ID NO: 678 - DNA, 361 bp, Zea mays
aagacaatcaaattaccatctctcattctcgtctgtgttctttggacaggactacgtgccagaaagcctcgacagcgtagccgagttcgaagcgcccccgtctcccgtgcacagctacgacctgcattgcccgggcgacgaggagttcgccaaggagccgcccacgctcccgccccagcttctcatgtccgtcctcgcgggggacgtcgatagcgctggccatggcaatcaagctttgaagccacagcacgtcgtcctcgaccacctgttcatcgagaaaggctgggggtcgcagtcgctgctcgccctcggcgtcacccaccggtttgagtccaagtacgtgagctttgtgctctacaag

SEQ ID NO: 679 - DNA, 544 bp, Zea mays
acgccggagagcaggatgtagactatgacgccgacgctccatatgtcggcctcgggcccgtagctccgcttcagcacctccggcgcgatgtagtaggcgctgccgacgatgtccctgaacacctcccctgcatcgcattgcaatgcatatgcagcaacagatatgaatgtgatgatgcaatccaaccatggaggagagtgagagcaagcaagcaacaagcaaatcaaccttccttgaagaagacggagagcccaaagtcggtggccttgagcggcgcgtcctcgtccttgctgaggaggaggaagttctcgggcttgaggtcgcggtggatgacgcccatggagtggcaggtgtgcacgatctcgacgatggtgcggagcagcgacgccgcggcgcgctcggtgtagtggcccctggcgatgatgcggtcgaagagctcgccgccggcgcagagctccatgacgaggtgcacggagcccttgtcctcgtacgcgcccttgagctccaccacgcccggctggccggacaggtggtacatgatctg

SEQ ID NO: 680 - DNA, 463 bp, Zea mays
  misc_feature (452)..(454): n is a, c, g, or t
atggagtcgcttgaccttttcaacatctgtcccgttcctgctgctttggtcaccataagaggcttgcctggttccagagatgatgtcattgtgagtggagatggattctgcgagaagttggttccagaagttccagccgagggacaaatcgaagagtccagctgtgtctgccagccatggaaaggatccaggaaagcccccaactgatgatgccccttctagtgcgacgaaacagagggtcgccgccgcaaaacagtacattgagaatcactacaagacccagatgaagtccctgcaagataggaaagagaggtaggcagttcagtggacataaacttatttttacctctgcctgcttcggttatataaaaaattaagcttgtttatttttattaagtatttctaccaatgcaggaagagaaagataagaaaaaacacaaccaaaggatggnnnccctaaaga

SEQ ID NO: 681 - DNA, 499 bp, Zea mays
tcgtctcatcagtagaaactgaatctcttgaacgtccaggagacacgaaactgctgtagggtaccaaggcaggagcacgacttggcacatggacagtggtaggcacaagaacattatgcttctgctctgagctgctgtcatggcgtgatactggtggagctggcttgatggaagccgacttcgcagcagaaccccggatggtgcgagcatttgccaaagatggcttctttaagggtgcacctgaggtagctggattcaacttctgcatgagatttgaatttgaacaaaagggacaagttatttcaaacctctgcctggaacctccactaatcaggtactgcaaagaaacagtggcgacactatagacaagttatttcaaacttctggatgagattctagagcaaacaaagacagaaagattgtcacgttgcgaagaccaaggggggctttcttttgtacgaaggtggtctggggctttgaccatggtgagcagaaatcc

SEQ ID NO: 682 - DNA, 346 bp, Zea mays
  misc_feature (338)..(340): n is a, c, g, or t
ctccagtaacgacgggcacgagggtgaggtaggtgatccacgactcgcgcttgacggtcatgatgtacgcgaagacggcggtaaagaagggcgtggtggcgccgacggcctggttgaaggacacggggaggtagcgcagcgagacgttcccggagacgacggagccgcagaagacgaggctgagcgcggcgatcttggcgagctggacgcgggagcgcacgagctgcatgggcacgacgcgcagccaggcgatggcggcgtaggagagcagggcgcaggcggacatgtggcacatggtgaggaagatggggtacttgaagccgtagttgctgaggagnnncttgtt

SEQ ID NO: 683 - DNA, 390 bp, Zea mays
gggcttcctcggcggtgctggcaaagagaaaattctccggcttgaggtcccggtgcatgacgccgagcgagtgacatccctccacgaccccgacaatggtcttgatgagcttcgcagccgcgcgctcactgtagtggcccttggcgacgatgcggtcgaagagctcgccgccggcgcagagctccatgacgatgtgcacgaagagcgcgtcctcgtaggcgccgcggatgcggacgacgttggggtgctcggagaggtggtgcatgatctggatctcgcgccacacgtcctcgtagtcctcgcggcacagcagcttgcgcttggggatggacttgcacgcgtactcagcgccgtccgccttgcccacgcactggtacgtggtggccgaac

SEQ ID NO: 684 - DNA, 372 bp, Zea mays
tgatcgtaccaatttagaaactagaatagaacatacacttattttgtgtttttatctaagttggtgtaattctgtttcagggagcaagctgcgctcagattaaaagatgagaagatcgaaaaacttcaggaagaggtgtgtatgcttaaagcaatgccttttccagaatgtatagtatattcatgttgttctttgtgccatttcaagtaatggtccgctgtgcagatggtgtgatggcttgcagcttaactgatctgttctcctgtaacagctaagaggtttgatagcccatttcgactgccaaagtgacactgcacaagcttcaaatgcgatctcgagcgatataccagggggcatgattcttccggtagc

SEQ ID NO: 685 - DNA, 411 bp, Zea mays
tgcagtagctgctgcaagctggctgagatcagtaggccaaaactgcgaggtcgatgagttttacttccatttgcatccgaacagaattcacgtaataaaagcttcatagtgtgtatttgcgttagtaaacatatactggtgcgctgcaatttgctcgtgttggtcgtatgtgccggactcccggtctccatccgctgccgttgcggtttatctgaagcaaggcaatggccaactggccacagcagatagatactctggtggtgtggccgtgtgggcggcagctcttgtactaggaagtttcctgtgaccgtgtaccgtccatggaccatgatcttctttgttcatgttggcctcgagacgtcggtgcttgcgtttggtcagcaggtttccatgctcggttcttccatgatg

SEQ ID NO: 686 - DNA, 265 bp, Zea mays
ctctgtattcatatgaatctttctttttctatccgaagaagaagaaaataaaaaagtgatgctagtatccatactctgtagatgatcaaagtggaaaccttccgccacctccttgggaggctcagccagcggcaagcaacgaaatgccaaatggtgaattgggaggcgtgcaacctctccctgggacagctgggcagttcggcggcatgcagcaggcactgcaaccacaagttaaccacatgggagttccacaaaggcagccaat

SEQ ID NO: 687 - DNA, 356 bp, Zea mays
gagttcttaccggaggcggtgtgctgggcggactcgcgcgcggacttgacggtgtggccagccttgcgcgcggtctcctcctcgtcgacgtcggcatggtgcttgagccccaacccctcggagatcttgtccttggcccagcccgtccatgactcctcgtccttgttgctctcctccgcgacgtcgtggacgtccgtcttggccgccacgcccaccgcggccgccgaggccaccgacaagagcagcagcaccagcagcgccgaggggacagcgtggctcctcgaccgcgagagaaacgccattgctgatctttctgagctcgagctttgcagccgcgaatacgagctgtctgtgtg

SEQ ID NO: 688 - DNA, 361 bp, Zea mays
gattttaggaacatggtatgattcgttttccataatgcttatatgtgctgggattgccattaagtttacttccttgctatgcagtatgggccttgacctctctaagggtatcattcgcaacaaccttgagtatggcgtgatagagccatcgatgagcaaagtaaagatcattcaggttaggcctcttgtttctttctcgtcatggtatttgtgatgtctgagttttatcccaattccgatcatctatcctgttcctgttgcagtttgccacggaggctgccattactatcctgaggattgacgacatgatcaagcttaccaaggaagaagagggtaacgaagagtaagcagcccaccagta

SEQ ID NO: 689 - DNA, 398 bp, Zea mays
  misc_feature (389)..(394): n is a, c, g, or t
gaagtcggaggtcgccatgggaatggagatggagagctgggtggccgagaagccgaggctgctgtcctcgcccagctccggccacgagtccctcgacttgggccactcgtcgaagaaagggcgcagcgtctggttctcctgcttggcggcggtcacgaagtcgctgccgaagaaagagaggggctccctctgggtcttcggcagcgacgcgatggtgctctcgtctagcccactcagcgtgccgaacacagggtagcttgtggcttggaatgtgttggtttgggatggcagcaggcgccacgagttgtccatcatcgacggatccatgccgcccgacaagagcgtgctgtgctcgtccgacagagatttcaccccgtatgcagagtacnnnnnntttc

SEQ ID NO: 690 - DNA, 353 bp, Zea mays
gaactgaaaatcgagctattagctcaattttccttctcaggttcgtcgtcgtcgtcgtttggtgacatcattatttattacaactagttacacaagccacgctagcaacttagcaaggtccatgacgtacggcctcacgcatcacaagcactgcccatcctgccatccatcaggattcaggagatgtggcctcggctcttgaggctctcgacggcatccctgatgatcttctccatgggggtgatctgaagccccagcgcgatgagcttcttggaccccacctcctgtctcaccagcccaggctgggtgtccttggggaacctgcaggtaaagcaacacagcacaatgtctct

SEQ ID NO: 691 - DNA, 423 bp, Zea mays
agtatgacgaaggcaacgagatcagtcggagaacttcaactgcggcacagatacgtacacgtctagatgagagatagagagcatgttttatattgtaactatatagatagaactaaaatgaacataaaatattataaaaatcgaacggttctactagttaagattggcctaatatgctacgacttcccgcacatcgggagtctcaacaaacacactaccgtctgatcgtttccacccctccgtctccccttaactttccagcttcacttgcagcggatctgaagccggcttcagatcgtttccagctccgtctccctcttccaccggagctggtgccggtgccggtgcttcttgagtgccttccttctgggaaagcgtctcctccttcagtctagtcacctctaactccttggcttctagctc

SEQ ID NO: 692 - DNA, 461 bp, Zea mays
gggggtggaggtggagctttcatctcttaaattcgcagccaagattaaatggaaacaatggggatatatagccgccagccacatcgtcgaccaaaactacaaatcaacaaacaaagaccactcgggtgtcatcatcataacacgaaagaaatgaaagcatcttcctcttgttgatctgctttgttttgctttgcgttgccgcgcccgcgcgtctccctccgcgcaaccgtactcaccttacttattgttacagagcaaagaagaagagagggtcggatcggtcgtctgctagaccgctactggctgctgctactgagtgtgaggtggcggcgggtactggctcgagtcgggccaggccagcgcgctctcccagttccagtccgccgccgcggacgcctcgctgtgttgcgagtcgtgcggcgacgagtagtagtaccccgaagcagaggaagtagaggacg

SEQ ID NO: 693 - DNA, 470 bp, Zea mays
aggattgcctgaacggaagcactttctggaacaccctcaggccacattggcaccacaacataaacagtgaaccgctccccagcctcaatcttgctgacaatcttcaatgagagctccttcggaatcaagtgaagacaatcgatatcttctggcttgatgccttccggcttccagtcatatgagcttccaaggaagtactgattctcaatgtagatgaagttcttcgccctccgtatggcatttatgtatgcatcctggatactccggtcgatgatttgatcctttccactcacaagcccagctcttgcagcttcatcaggagtctcggggaagccaaaagcagcaccgccgtcaatggatctaaagagctgaacattccaggtgtctctgtcctccgggaacatcacaggagaagggggaataataatgtcagaaagatccctgagacatacaaggaggtccttaccaca

SEQ ID NO: 694 - DNA, 332 bp, Zea mays
  misc_feature (316)..(321): n is a, c, g, or t
taacagcggctaccaatcctggggtccgctctttggaaagctgttcttctcgatctgggtgatcctccatctctaccccttcctcaagggtctcatgggcaggcagaaccgcacgccaacaatcgtcatcgtttggtccatcctccttgcatctatcttctccttgctgtgggtgaagatcgatcctttcatctccccgacacagaaagctgccgccttggggcaatgtggtgtgaactgctgatccagattgtgactcttatctgaagaggctcagccaaagatctgccccctcgtgtaaatacctgagggggcnnnnnnggaattttttg

SEQ ID NO: 695 - DNA, 270 bp, Zea mays
tgagcgagcgacaacccgtcaaacctctcccgctcacgacgggacggccgatcgccgattgctcgcgagctggacgacggaacggaaggcaggcaggcaccttgtagtcggcgttgcgcacgaggttgaggccgcgcacggcgaggatgatctccttgtgcgcctcgtcgacgtagacgaggtacggcgggcacgcgttgccgacctccttgtaggtagcccgcttgaggatgcccttggggtcgatgtcgaagtagccgtgctccggca

SEQ ID NO: 696 - DNA, 272 bp, Zea mays
agctgcgctgctgaagcaaccgcgccggcgatgctgcccaacagggacgtggtcgacgtcttcgtcagccgacacagccccgccgtccacgtggcatagattctcgatcgatcgcgtgcatggcccatgcatgcgcccgccacacgtacgctagcttttatatattcgaaggacgacttgctgctggtcgtgagcatatatatatatatgatggaggaaatgattaagtagtatatatataagtaattaactgccatgcatggaagctagct

SEQ ID NO: 697 - DNA, 429 bp, Zea mays
gatgaagctttggactgtgattgtgtgtcctttgtcttcattgaatagtatctaagtgcaatctccactgtcatttggtatccaggtgacatccatggtcaatacagtgatcttctaaggctttttgaatatggaggctttcctcctgaagccaattatctattcttaggtgattatgttgatcgaggcaaacaaagtttggagactatatgccttcttcttgcttacaaaatcaagtaccctgagaacttttttcttctgaggggcaatcatgaatgcgcctcaataaacagaatatatggattctatgatgaatgcaagcgtcgatttaatgtgcggctatggaaggtcttcacagaatgttttaacactctacctgtggctgctcttatcgatgataaaatattatgtatgcacggtggactctca

SEQ ID NO: 698 - DNA, 347 bp, Zea mays
  misc_feature (339)..(341): n is a, c, g, or t
caagtcctccaggcagcatgaatggagacaccagtcaccatcccatcatcagcgacactgtactgtatagcaatcgggagatacacgatactccaacgcgtaaaaaagcgtaaaagatacgtcaaaacagatgtgatttttgcatccatgcagatgcgaaacaggattttgaatcctagcacctaacggatttaaatgatgaagtttcagttctacgagaggaactgagttgtacgatagggataacttagctgttgtcggactgtgtacattgttggtatcatcacccaaaatattgtacatctagaagccatattgtaattacggcacgtatacagnnncacttt

SEQ ID NO: 699 - DNA, 538 bp, Zea mays
actctgatcccaatcttggcagggttatgcgaataggttagtgccttagtggagattatttgatataaccttcaaagttcaaacatttcttacagtatgcgaataggttagtgccttagtgaagattatttgatataaccttcaaagttcaaacatttcttacagtaataactgatatttgttactcagaaccacatgttcaatcaactaaccaactaccaaaggacttataaattgatacatctagaaccttatgctgttaccacaacatataaacattacatgcttatccagtttccgtgtttgctttgattgctttagctttttatgccccatcttttcaacgccgaacaacaagcaacacattttctagggaaattcaatttccatttcctgttatttttatcatatggcaaaatataagtactgtagttgctaattttgcacaagtcaaggaattatttaatctgaatattgttatgtaatttagttcacttctaatgttatttagtatgctaggttgaaggtggagattgac

SEQ ID NO: 700 - DNA, 183 bp, Zea mays
  misc_feature (157)..(161): n is a, c, g, or t
  misc_feature (169)..(170): n is a, c, g, or t
ccgacacctcggcggtgactgtggagtgggccatgtcagagctcctgaggaacccagaggtcctcgccaaggccaccgaggagctggaccgtgtcgtcggccgcaaccgtcttgtggcagagggggacatcccaagcctcccgtacctcgacgccgnnnnnaaggagannttgcgcctgcacc

SEQ ID NO: 701 - DNA, 364 bp, Zea mays
  misc_feature (270)..(270): n is a, c, g, or t
  misc_feature (296)..(301): n is a, c, g, or t
  misc_feature (314)..(317): n is a, c, g, or t
  misc_feature (342)..(352): n is a, c, g, or t
  misc_feature (354)..(358): n is a, c, g, or t
atcgacaacgaaaatctggcgcaagttacggggaacaggaaagcaagccgggggttccaatcgatcagtcctccaaaggaaaggaaaaagaagaagaacaaaagatcactcctaagacggtgacggcgaggagaaagaaacgaatgatgtaggggctgctatgtccatcaggttgctgttgctgttaaaccagcgcgatgctgctctccccgccaggcggcttgcggatcccgccgaggtagtcccgcgagggggccttcccgtccgcgnagatgtcgctgccggtcatctccctnnnnnncgctgtgctcagnnnnttctccgccgtcccagggggggtcnnnnnnnnnnngnnnnnattgcc

SEQ ID NO: 702 - DNA, 369 bp, Zea mays
atccaggaatcaaaaggagtagtctctctctctctctctcttctttctacaggagaagcatgaatgggccaacaagagatcagcaaggagacgagctgaaagtaaacagaaactaaaccacatatacctgcagcgtgaggaagggtggcatgtggcggaggtggtggttggtgcctgcctctgtctgcggggaggaagccatagttgtagcaagcctctacctccattaattgcttatcgctggcctgttgagctccactgcactactgtcacggtctcacctagctaactgccccgacaaggatgaggaggagaagggggctgcaattgcaagaacgccaagtgcatgaatgaacgactacacagcac

SEQ ID NO: 703 - DNA, 521 bp, Zea mays
gtcctgctgctccccatgtcgcccccactcgacctcgactacataggcctctcgccggcggcggctgccgccgctgcccacgacgacctgaagggtaccgagctccgccttggtctgccggggtccggttcgccggaccgccgtgttgtggctgccaccgcaaccaccctggacctgctcccggctaagggcgccaagcgctggttttctgacgaggcgccgacgccatcgcccggtgcagcttccgggaagggaaagaaggtagcggaagaggaggacgacaagaaggttgcagcgacgccgcagccggtcgcaaagtaggtggattcgggagtggatcttggtgtttgctgcctcaaacaaaaaaaagggaaagcttgggctttgccagtgcgttcatctggcgccactagtgatttgcagattgtgattgttgcccctttgtttgggagcaagttttctactgtttgggaaatcttgctgggtttttttgagttcatgacatttgcaggttctgtgac

SEQ ID NO: 704 - DNA, 387 bp, Zea mays
cacagcacaagggcaagccatgaggaggaggtagctgcagctcgctccggcggccaagacgagccctcgtcatcttggttggcgttgggagctgggagcctgggactgcttggttgggactagtgggacaaaacacatgctgcagattaagttgacaaacgggaatctctctcatctactactagttagtaagtacgtagtaccttgtgcatgctagcttgtaatttctgtcactgcttagtacgtatcgtccgagatccatcatcatccatgactctagtcgtgtatgcgtttgtcagtcacctcgtctgtacattttatctagtatgtctggtacatgtatgtttcttccaagtttttggcttgatatcctctctctctctctca

SEQ ID NO: 705 - DNA, 209 bp, Zea mays
cttctcctgtcccagctcagttggttcaccgaggtacatatatacgtcttcactactcggctctaacctctttggtctttgctgatcgatcgtccttcgtaccagcgttgcgtacaccttagctgctcgtcctaacgtctcgatcttaactggccttgtcgtctgcagaaactggcgtcacggctgccgctgccgctgcatacggcggc

SEQ ID NO: 706 - DNA, 452 bp, Zea mays
  misc_feature (233)..(233): n is a, c, g, or t
  misc_feature (268)..(268): n is a, c, g, or t
  misc_feature (335)..(335): n is a, c, g, or t
  misc_feature (367)..(367): n is a, c, g, or t
  misc_feature (449)..(449): n is a, c, g, or t
atctccctccacaccccttccatatcgaactccagcacctccccggcttccgggggcatgtgcgccccgtctttcagcctgaagggccagtggatctgcgtgcgttcatttgtcaatgcaagcatatagatatcgtggttctattctatcagaaagaacatatatatcacgttttagtagctataagctgtaacctgtccctcagcatacaaaattttgtttttttttccagntaacagtaaggaagttgaagcaatacaaagtcagnggttttggtttcttacaaggtagagatccaggtaatccagctgcaagtccttgagtgttttctcgantgctggccgaaccctatcaggagccagctcgntgcacctgaaaagcagacaaaatatcgatcaaatttcggagactggagcaatatacgtactcaggtattcagcgcaacggtntaa

SEQ ID NO: 707 - DNA, 347 bp, Zea mays
agttatcacattagctttttccggtggcctgtttggtacagcttataagctgttcatggccaaactgtacgcttttctgcaacttattctggctgcgcttagtcccaccatcccatttgtgctaaaaagtagatgggtcaaacctacttattttgactgtgttttactccatttgtgcagcttctctacgaagcgcttcctatatacctcagaagaacgaccgttgtgctagcaagactgcgatgcaagcgagctttctgatcctttaaatcctaatccaactgtaggtcacatttaacacttaaacctcttcaccaccagcttacgcagcttttttcaaaaaaaaa

SEQ ID NO: 708 - DNA, 448 bp, Zea mays
tactactataacatcgagtcaattcttgcactcatcgtgtccttcttcattaacatctgtgtcacaactgtttttgccaaaggattttatgggtctaaacaggctgacagtataggtcttgagaatgctgggcagtacttacaagaaaaatatggaactgcattctttcccatcctctatatctgggctgttggtttgttagcatctgggcagagtagcacaattactggcacatatgcaggacagtttgttatgggaggtttccttaatcttcgattgaagaagtggctacgggcaatgattactcgaagttttgccattattccaactatgattgtggctttatttttcgatactgaagatcctactatggacattctgaatgaagcactcaatgttcttcaatccatacagattccgtttgctctaattcctctcatcaccctcg

SEQ ID NO: 709 - DNA, 378 bp, Zea mays
gtagtgtatataaacaaagttggctgtttaacagatcttgtatttacggtctatgcccacaaagttacagtttcaggttgtggcagtgcgtctgtcaaatatcagaacacaatggtgacttcgcagtcacgcgaaggaactgcaagcggcaaattgattctttggacctattaccccactaggacacgtttttcttcggggtgccatcatggaagcagattgcaattaggatttatatagaatgatgtatagcatgtcgataactcgaacatgacttcctcgatatatgtagtactgtcttccaaaaaatagcattcttgtagcatcaaacggccaaacctatgttcgtggaagcatagttaataccctttattgctc

SEQ ID NO: 710 - DNA, 518 bp, Zea mays
gacctccctcgcctcccctacatcgaggctgtgctcaaggagaccctgcgcctgcaccctgccgcgccgatgctggcaccccacgtggcccgcgaggacacatccgtggacggctacgacgtgctcgctggcacggtcgtgttcatcaacgtgtgggcaatcggccgcgaccctgcgctgtgggacgcgccggaggagttccggccggagcggttcgtcgagactcgagagcaagatcggcgtgaggggccaggacttccagctgctgccgttcggctctggccggcgaatgtgccccgggatcaacctcgcgctaaaggtgatggctttgagccttgccaatctgcttcacggcttcaagtggaggcttccggacggcgtgacggcagaggagctgagcatggaggaggccttccagctcacggtaccgcgtaagttcccgctcgaggccgtggtcgagcccaggttgccagaccgcctgtatacgggcgcttgatcgatgatgcccgtacctgtgt

SEQ ID NO: 711 - DNA, 521 bp, Zea mays
gcggcgtcggcgcacaaggggcggcactcggccgtggactacagcatgaaggcgtcgacgacgacggggcagacattcaacttcctgagcgcgctcggggacgtggcgttcgcgtacgcggggcacaacgtggtgctggagatccaggccaccatcccgtccacgccagacaagccgtccaagaagcccatgtggcagggcgtcgtcctcgcctacctcgtcgttgccatctgctacctccccgtggcgttcgtcggctactacgtcttcggcaacgccgtcgacgacaacatcctcatcaccctcgagaagccacgctggctcatcgccgccgccaacatcttcgtcgtcgtgcacgtcatcggcagctaccaggtggtcccaaataacctcccgcgcgcgtattgctgcgtcgttagtattggtgacggctacgcgcgcacagtacactaacatataattagtgcagatctacgccatgcccgtgttcgacatgctcgagacgttcctggtgaagaaac

SEQ ID NO: 712 - DNA, 438 bp, Zea mays
gcttcgctggttctgctctctagcttttaactcgttcgatcctgctctttcttcagaccgatctgagctgcgggccgtcgtccaaggcgaaaggagggcagccggcggcggcgccgggctccggcggcgacaggcaggggaggggcaagatcgagatcaagcgcatcgagaacacgacgaaccggcaggtcaccttctgcaagcgccgcaacggcctgctcaagaaggcgtacgagctctccgtgctctgcgacgccgaggtcgcgctcgtcgtcttctccagccgcggccgcctctacgagtacgccaacaacaggtgatttgtttttatatatgtgtatgtatgcaaagatgtcatctttggcttctcgaaatctccgcgcatatatacatacagagacgcatatatatattctcgtttcatcgaacacttgagac

SEQ ID NO: 713 - DNA, 337 bp, Zea mays
aggttcggagaaggctcacttcccctcctacgcttttaagaagctggaagaaggtgacctccgcgatatctccgactccaagctaaaatacaagggccaggatagccggattgagatggcaatcaaggtcgccttgtggtgcatccaggaggacttctatcagaggccgtccatgtccaaggttgtccagatgctggaaggcgtctgcgacgtgccccagccaccaatgtcttcgcatattggataccggctgtacgcgaatgccttcaaatctagcagcgaagagggcacgtcgtctgggatgtcagactacaatagtgatgccttgctttctgct

SEQ ID NO: 714 - DNA, 161 bp, Zea mays
attgcgctgctcgcaatcgggaaggcacatgttaagaggcataggacatacctcacaaccctcctctactacctgtccattggattcagcagctccggactgtcgtacgtcgcaggcgtcctcctcacgaaggtcctagcacacttcggtatcattgatca

SEQ ID NO: 715 - DNA, 1562 bp, Zea mays
  misc_feature (352)..(369): n is a, c, g, or t
  misc_feature (374)..(375): n is a, c, g, or t
  misc_feature (380)..(382): n is a, c, g, or t
  misc_feature (390)..(391): n is a, c, g, or t
  misc_feature (393)..(396): n is a, c, g, or t
  misc_feature (400)..(409): n is a, c, g, or t
  misc_feature (411)..(413): n is a, c, g, or t
  misc_feature (430)..(433): n is a, c, g, or t
  misc_feature (437)..(440): n is a, c, g, or t
  misc_feature (444)..(454): n is a, c, g, or t
  misc_feature (456)..(457): n is a, c, g, or t
  misc_feature (460)..(462): n is a, c, g, or t
  misc_feature (470)..(475): n is a, c, g, or t
  misc_feature (478)..(480): n is a, c, g, or t
  misc_feature (482)..(486): n is a, c, g, or t
  misc_feature (491)..(496): n is a, c, g, or t
  misc_feature (501)..(504): n is a, c, g, or t
  misc_feature (506)..(507): n is a, c, g, or t
  misc_feature (509)..(510): n is a, c, g, or t
  misc_feature (525)..(529): n is a, c, g, or t
  misc_feature (532)..(537): n is a, c, g, or t
  misc_feature (541)..(544): n is a, c, g, or t
  misc_feature (551)..(552): n is a, c, g, or t
  misc_feature (558)..(563): n is a, c, g, or t
  misc_feature (566)..(567): n is a, c, g, or t
  misc_feature (570)..(570): n is a, c, g, or t
  misc_feature (578)..(584): n is a, c, g, or t
  misc_feature (589)..(592): n is a, c, g, or t
  misc_feature (600)..(602): n is a, c, g, or t
  misc_feature (607)..(607): n is a, c, g, or t
  misc_feature (613)..(614): n is a, c, g, or t
  misc_feature (617)..(625): n is a, c, g, or t
  misc_feature (631)..(635): n is a, c, g, or t
  misc_feature (637)..(640): n is a, c, g, or t
  misc_feature (649)..(652): n is a, c, g, or t
  misc_feature (656)..(673): n is a, c, g, or t
  misc_feature (675)..(676): n is a, c, g, or t
  misc_feature (680)..(681): n is a, c, g, or t
  misc_feature (685)..(692): n is a, c, g, or t
  misc_feature (702)..(707): n is a, c, g, or t
  misc_feature (711)..(718): n is a, c, g, or t
  misc_feature (724)..(725): n is a, c, g, or t
  misc_feature (731)..(731): n is a, c, g, or t
  misc_feature (733)..(735): n is a, c, g, or t
  misc_feature (738)..(741): n is a, c, g, or t
  misc_feature (743)..(743): n is a, c, g, or t
  misc_feature (750)..(757): n is a, c, g, or t
  misc_feature (759)..(767): n is a, c, g, or t
  misc_feature (771)..(773): n is a, c, g, or t
  misc_feature (775)..(775): n is a, c, g, or t
  misc_feature (777)..(779): n is a, c, g, or t
  misc_feature (781)..(790): n is a, c, g, or t
  misc_feature (794)..(819): n is a, c, g, or t
  misc_feature (821)..(824): n is a, c, g, or t
  misc_feature (827)..(829): n is a, c, g, or t
  misc_feature (832)..(836): n is a, c, g, or t
  misc_feature (838)..(842): n is a, c, g, or t
  misc_feature (845)..(855): n is a, c, g, or t
  misc_feature (858)..(868): n is a, c, g, or t
  misc_feature (872)..(880): n is a, c, g, or t
  misc_feature (883)..(886): n is a, c, g, or t
  misc_feature (889)..(898): n is a, c, g, or t
  misc_feature (901)..(903): n is a, c, g, or t
  misc_feature (907)..(921): n is a, c, g, or t
  misc_feature (923)..(924): n is a, c, g, or t
  misc_feature (926)..(933): n is a, c, g, or t
  misc_feature (936)..(936): n is a, c, g, or t
  misc_feature (939)..(940): n is a, c, g, or t
  misc_feature (944)..(958): n is a, c, g, or t
  misc_feature (960)..(960): n is a, c, g, or t
  misc_feature (964)..(978): n is a, c, g, or t
  misc_feature (981)..(984): n is a, c, g, or t
  misc_feature (986)..(993): n is a, c, g, or t
  misc_feature (995)..(1007): n is a, c, g, or t
  misc_feature (1009)..(1020): n is a, c, g, or t
  misc_feature (1022)..(1041): n is a, c, g, or t
  misc_feature (1043)..(1043): n is a, c, g, or t
  misc_feature (1046)..(1056): n is a, c, g, or t
  misc_feature (1061)..(1062): n is a, c, g, or t
  misc_feature (1065)..(1082): n is a, c, g, or t
  misc_feature (1089)..(1120): n is a, c, g, or t
  misc_feature (1124)..(1152): n is a, c, g, or t
  misc_feature (1154)..(1155): n is a, c, g, or t
  misc_feature (1158)..(1168): n is a, c, g, or t
  misc_feature (1170)..(1178): n is a, c, g, or t
  misc_feature (1182)..(1204): n is a, c, g, or t
  misc_feature (1208)..(1211): n is a, c, g, or t
  misc_feature (1213)..(1222): n is a, c, g, or t
  misc_feature (1227)..(1230): n is a, c, g, or t
  misc_feature (1235)..(1236): n is a, c, g, or t
  misc_feature (1239)..(1241): n is a, c, g, or t
  misc_feature (1247)..(1249): n is a, c, g, or t
  misc_feature (1254)..(1254): n is a, c, g, or t
  misc_feature (1256)..(1261): n is a, c, g, or t
  misc_feature (1263)..(1284): n is a, c, g, or t
  misc_feature (1286)..(1286): n is a, c, g, or t
  misc_feature (1289)..(1291): n is a, c, g, or t
  misc_feature (1294)..(1302): n is a, c, g, or t
  misc_feature (1304)..(1315): n is a, c, g, or t
  misc_feature (1317)..(1320): n is a, c, g, or t
  misc_feature (1322)..(1329): n is a, c, g, or t
  misc_feature (1331)..(1331): n is a, c, g, or t
  misc_feature (1333)..(1340): n is a, c, g, or t
  misc_feature (1342)..(1342): n is a, c, g, or t
  misc_feature (1346)..(1361): n is a, c, g, or t
  misc_feature (1363)..(1365): n is a, c, g, or t
  misc_feature (1367)..(1379): n is a, c, g, or t
  misc_feature (1388)..(1390): n is a, c, g, or t
  misc_feature (1393)..(1400): n is a, c, g, or t
  misc_feature (1405)..(1412): n is a, c, g, or t
  misc_feature (1415)..(1419): n is a, c, g, or t
  misc_feature (1425)..(1425): n is a, c, g, or t
  misc_feature (1429)..(1440): n is a, c, g, or t
  misc_feature (1443)..(1446): n is a, c, g, or t
  misc_feature (1451)..(1460): n is a, c, g, or t
  misc_feature (1462)..(1469): n is a, c, g, or t
  misc_feature (1473)..(1485): n is a, c, g, or t
  misc_feature (1487)..(1490): n is a, c, g, or t
  misc_feature (1492)..(1492): n is a, c, g, or t
  misc_feature (1495)..(1505): n is a, c, g, or t
  misc_feature (1507)..(1509): n is a, c, g, or t
  misc_feature (1513)..(1516): n is a, c, g, or t
  misc_feature (1519)..(1521): n is a, c, g, or t
  misc_feature (1524)..(1529): n is a, c, g, or t
  misc_feature (1533)..(1539): n is a, c, g, or t
  misc_feature (1542)..(1556): n is a, c, g, or t
tggatctgttggtctattacccgagctaactcctcatggccacctggtctgagcagaaatcgtcgttcctagaagactggctgagatcactatccgcatcgttgaacagctccgagcgccagcccttgccaacggaggccacaaacgacgaggacggcttcagcccaaacgtgactcagaaaggcatgctgtcttccgccctgcagtccttgctcggcgtgtacgcgggcaggacccagcaggtcatcacccagagatttgagcaactggctagaagcgtcgcttgaatggtgagcagcgacgagcagtcaggtgtggtctccactccagcctccattaacaagcagcgatnnnnnnnnnnnnnnnnnntgacnntcgannnatgcatanncnnnntgcnnnnnnnnnnannntcttgggggtaggaccnnnntggnnnnccgnnnnnnnnnnngnncannnaaggactnnnnnngcnnnannnnnagcannnnnnttctnnnntnncnntttggggctggaagnnnnnctnnnnnntttnnnnggcctcnntttggnnnnnnggnntgngcgctcgnnnnnnngtttnnnngaattgcnnnatagntgaatnntcnnnnnnnnnttctannnnnannnncaaattttnnnnctcnnnnnnnnnnnnnnnnnngnngggnngttnnnnnnnngggtaaatannnnnnaacnnnnnnnntttagnnctaaantnnnagnnnnangtttggnnnnnnnntnnnnnnnnntaannngntnnnannnnnnnnnncttnnnnnnnnnnnnnnnnnnnnnnnnnncnnnngcnnnccnnnnncnnnnnctnnnnnnnnnnnacnnnnnnnnnnncgtnnnnnnnnnctnnnnaannnnnnnnnncannnccannnnnnnnnnnnnnncnncnnnnnnnnccncannccannnnnnnnnnnnnnncnctannnnnnnnnnnnnnnatnnnnannnnnnnncnnnnnnnnnnnnntnnnnnnnnnnnncnnnnnnnnnnnnnnnnnnnncnctnnnnnnnnnnntcacnnccnnnnnnnnnnnnnnnnnnctccccnnnnnnnnnnnnnnnnnnnnnnnnnnnnnnnncccnnnnnnnnnnnnnnnnnnnnnnnnnnnnngnnccnnnnnnnnnnntnnnnnnnnngcgnnnnnnnnnnnnnnnnnnnnnnntctnnnncnnnnnnnnnntcccnnnnccctnnacnnnccccgnnnccgcncnnnnnntnnnnnnnnnnnnnnnnnnnnnnanttnnntcnnnnnnnnncnnnnnnnnnnnncnnnnannnnnnnncncnnnnnnnncnttcnnnnnnnnnnnnnnnncnnnannnnnnnnnnnnnttccccttnnncannnnnnnnatccnnnnnnnnatnnnnncccctncgannnnnnnnnnnnctnnnngctcnnnnnnnnnnannnnnnnncccnnnnnnnnnnnnncnnnntnctnnnnnnnnnnntnnntctnnnnacnnntcnnnnnnaaannnnnnnccnnnnnnnnnnnnnnnatcata

SEQ ID NO: 716 - DNA, 367 bp, Zea mays
  misc_feature (357)..(363): n is a, c, g, or t
gagctgtatctgtaagcagctgcacagtagcagcagcatcacgaacccgatgatgcagtcggtcttgtactgcatgttgccggcgcaacgcaagtacttcgctcaggctttcccacatgatccaaacaggcgcagcttctctgctacaacagctttcattgcctctttagcagacgccatcacctgaatcaagtccttttctggctttctgagggacgccaggtagctgttccgaacctcggtgttcacattgaattttctcacgcccaagtctatgcactcctgctccagaaattagtgcactgttatagcgcctacacgataagttttatcctaataatacttgagatatggccnnnnnnntagc

SEQ ID NO: 717 - DNA, 492 bp, Zea mays
tcgatgggggactgcatccgcccggcgctgcagttgccccactccgccttgatgctgccccagtgctccggcccgttctcgtcgccgacgacgtagctgaactcctcctcgtgctcggtttcttcctgggctctggcggccgggacggcaacggagagcaggaaggccgccgcgaggagccgcgcggcggtgaggccgcggaggtgacccatacccttctgtagcctctccgcgtgcgggctctgctttgcctttttggaagctgaactggtttgggatgaattgcccccccccgcaccgagtccgagtatataaaaggccgtcgtctcgtcagtgtgttaatgccaaaacacactcatattgtttttaaaaaagaaacttttattcttataaaactccatacttttacgatcgagtctctttccatcatacagtatggtattattatatttaatgtctataacattttgatattaaaatcggtttaataga

SEQ ID NO: 718 - DNA, 458 bp, Zea mays
  misc_feature (349)..(349): n is a, c, g, or t
  misc_feature (438)..(442): n is a, c, g, or t
tttcgtgtttctttgcaccagcagggtggaagggcccataaacaaagtcactccttttcccttgcaccagctgcctctcaaaagtcttcactatgttaccagcaccctgcatgagcttgactttgttctccgctgctgagtctaacttgcctcgcttattgtcaatgtttgtaagatcagtaccaaatgctctcttattgggcattgccttcatcgatggaggtacagaaaccatgacattgttatcttgctttcgctttgcctggcctagccaccggaatgcaggttttcttgtgtctgcttgctgcgtctgaaacaaacgttacaagaaacttcagcagccaccagncagaaatatcattccattcatttgaaatggtatgcagtcgagaacctaccttctcaatgaggttcaaagaagacagcacattggcaatnnnnnacaatcgacgaacttt

SEQ ID NO: 719 - DNA, 360 bp, Zea mays
tgtcagtggaatttcaaaacgctggcagttccatccccattccgaccctgccgccgcacccaccccaaccccaacccaacgggccgggtcccttcagattctcgacagtccgcgttaaataggccgccccgctcgccttccactcctcgttcccacacccctcaccgcgtccgcctcccctaccatctagggtttctagggttttcgaggaggaggaaatggcgtctgatagggtgctcgggactgtgaagtggttcaacggaaccaagggcttcggtttcatcacccccgacgacggtagcgaggacctattcgtccaccagtcctccatcaagtccgacggctaccgcagtcttaacg

SEQ ID NO: 720 - DNA, 660 bp, Zea mays
cgcgtcaaggcgtgggctctgctgtggctgggagctacgcctgcgtcggactctggtagcctggcgcaccgggagcaccacggatggggtcgacgatgcggatctatgtgcctgtttgtttcggcttctggcagcttctggccaccaaaagctgccgcggactgccaaacgctcagcttttcagccagcttctataaaattcgttggggcaaaaccatccaaaatcaacataaacgcataatcggttgagtcgttgtaatagtagaaatccgtcactttctaaatcctgagccctatgaacaactttatcttcctccacacgtaatcgtaatgatactcagattctctccacagccagattctcttcacagccagattttcagaaaagctggtcagaaaaaagctgaaccaaacataccctatatgttcgtggaaattttcagccgcatcaggatcgtcagctcggcttgggcctggcgcggccgcggcggctggcacatctgctggatcgatcgatggctgcgagattccggcacggcacgtgagaggttcacaggcacgggcacgagacacgacaaacgcctattcttggtgggtgcctgtctttgcggaattaactactggagtattacagtgtcgtgcactgccgtaatacacgat

SEQ ID NO: 721 - DNA, 477 bp, Zea mays
actcccacacacacaaacaaacaatattgtagcagacaatacagctgcataattgtactcccacagacaattacaaactgaatagtcatcattactgagcagggaggaagttattgttatcatgtgacaacaacctttccccctaatttcaatacacacaaactctagttgaaaaaaaatctggtacaacactccagatgcacactgcagataaaacaaattcctaagcttgacaatcaagtggccaaccgctgcatcagctagatggccggttattactgacaggacccgcgagtgaactgctcgcatcgtgcggttgcgtcttgcacgcgagcctcacggaagtatggatctgtgaggtttcggccattgcgccattcccgtaatcgccacaggccagccttttggtaactggggggatcaaggctatgcccagttggttgattgtgtaaggctatgcccagttggttgattgtg

SEQ ID NO: 722 - DNA, 213 bp, Zea mays
gctactgttctgcccagaagagtgctgcttgtttctgacaacctatgaaatcggacataggaaacaactctcagaaatgcatgtcttcgataaacaaatagtggtactttgcctttacatgatgtcgtatctcaatcaatagtatttttttttactatcgaagcgcaattatttccttagacaactattccctcctactttgtaatcatgcaa

SEQ ID NO: 723 - DNA, 509 bp, Zea mays
agcaatttgaagtttagattcaaactaaatgagttcccaaaggatttggtatatttggatcacatagccgccacttgttttggaatttgcaatcaaatacatttttctaacttctaagtcaaaaacatttagattttgctattcaaaccaattttaaataattgttttgatcaaataccaaaaactttccctgtttcccataagataaattctccaccataaaagaacaattttataataaaagggctcctctttgccattagcaatagtgcagtactggaacggccgattctagtggtcatgaaacgacctacggctatccactgcatcgcatctcaacggcagccgtgtgttgtggcagcgccatccaccggtatgcggtatccaggtccaggggcatggtgctgggccatccgattccatcacagaaaacagataccttcacagtcagcggcatcgctcagcgtttacccaacaccagcaatgcagggaggtttattcaacacttg

SEQ ID NO: 724 - DNA, 445 bp, Zea mays
acactatgtattggctatttatcggggcaggcttgactgaggggcacaaggattgcaacgtatcattgatcgttgtagttcactgcccactttggccacaggagaggtcatatcatcgagaggttgacggcactaccctcatccctcacctgtatagaaaggcaatcggggccaatagtggtacgatgtgaatattccaggatttgctgccattcagaaagtcaagttgcagcaactgcatgcctccatggtaccatgaagacacgcccgtagagtggctttgtatagaggtgctataggcgaggtggacaaccctttcggatatcgcacatggcaagatatttacattgacattttgtatgcacccgatatggttttgatatttatgccacaaatcatttaggtggtgatgcaagtagtttgttgtgattggaaatttgggagt

SEQ ID NO: 725 - DNA, 388 bp, Zea mays
aagagttgtttgaggctacaatccggtatttatttatttatttattttcattctcagtttatgttcaataataacatataacaacggtccagtgattctctcgagtttgtgttttgagcaggcagccatgcttctgcgatactccatttgttctggttctgaacaagtacgaccttttcgaggagaagatcaaccgcgcgcccctctctagctgcgagtggttcaacgacttctgcccggtgcggacgcaccacaacaaccagtcgctggctcatcaggcatactactacgtggccatgaagttcaaggacctgtactctgcgcagacgaaccggaagcttttcgtgtggcaggcccgtgcccgtgagcgccagactgtggacaaaaa

SEQ ID NO: 726 - DNA, 428 bp, Zea mays
  misc_feature (418)..(423): n is a, c, g, or t
aactacgattttgctgagaaccagtctaattaaactatggctgtgcatagaaccagtctgatcgtcttatactaatttgttcgttgctatttgcttcgacagctacaacgttgactggacttcatttcgcgatgacgaccttgatgacattagtaatgaaatggctgggatatattcagccgtcctatctaccgttacctgaactagtaaaattcgcattttttgcgaacctgtctattgttgggatgaatgtaagcttgatgtggaactctgttggattctatcaggtgcagacagaaacttcgatattctataagtatatcggaatgaaactcgtatactgacgctgtctgtcttgccttttttttcagatcgcaaagctgtgtatcattccagtcttatgcattctggaaatcannnnnnacaaa

SEQ ID NO: 727 - DNA, 347 bp, Zea mays
cgtgggggaagttttggctttcggtagggaattgactcttatttatttgtttattagctgcttcccttttcttggatctgctttaaccccttctaattacctggcttattaaaggtactaggtgtatttgaatggtctggtaacaacccggtgccaccagaagtatggctactgccatatctcctcccatttcacccaggttctgctttctttttcttgatgtacataaagctagtatattataggtgtatattaccagtgttagcctaaatgtttaaacagtttaaacggtcacctaccatttagctatgtattcaggctaaatggctatttagatggactagatg

SEQ ID NO: 728 - DNA, 526 bp, Zea mays
gatgttaccgtggtgattagatcccgtgtttgagtaccgcagcccagaagctcagttctgtgcggacacccttttcagtttccacttgggccttccattgtagcggtgggtgaataagagagtggaagtgctttgcaaagtcatcagatctcttttaggcccttgcgtttctcttccgttactggtatccatcgaaccaggtttctaaatcctgccgattgtgaacttgtgccgtgatacactagtactgcgggaataatgatcttgggatggcattgtcagcaccgtgctagtaaataaagatgcaatttgatttattcctttggcccagcgtcatgattttgttgtgtttcacatctgttggtactgcggcatgctactggttgaaactgtgtttgtgctgcaccatcctgtgcgcaaaataatacagcggccaataggccatgtcgccgcattggatgtgcattgcacttttgtttcaagcaagcaggttcgcaccatggttttaaatctcccgctgtacaat

SEQ ID NO: 729 - DNA, 224 bp, Zea mays
  misc_feature (205)..(211): n is a, c, g, or t
  misc_feature (213)..(214): n is a, c, g, or t
ggacgccccgtcagcttggcgtactcgatcagcgccacgtcctccgcgccgctgaaccacaccacacgacacgagagggatcggtgtcgtcagttaagctaggtttgcccgtattccgatgatcaaactttattaagcttgaataaatttataaaaattactataatatctatatctctaaataatttaactataaaataaaacnnnnnnnannaatctattaa

SEQ ID NO: 730 - DNA, 383 bp, Zea mays
agctcgtctccgggttcagcctaggcgacctattcccgtcatcgccgtttatgaacttcctcagcgggacggcacggcgagcgcatgcgaaccataggaagaactttgagctcatggaatgcgccatcaagcagcacgaggaaaggagagcccaagcggcggtgaacggcgctgctgtccaggaggaggaagcagaggacctagtggacgtgctcttgaggatacaaaaggatggcggcctcgacatgcctctcacaatgggaataatcaaagccgttatacttgtaagtagtacataacaagagtttatcatgtttgttttcattttaatttgttaatcgtgcatgttcttgcatatatatacaggacttgttcagcgctgg

SEQ ID NO: 731 - DNA, 759 bp, Zea mays
  misc_feature (391)..(393): n is a, c, g, or t
  misc_feature (409)..(411): n is a, c, g, or t
  misc_feature (413)..(415): n is a, c, g, or t
  misc_feature (428)..(429): n is a, c, g, or t
  misc_feature (445)..(446): n is a, c, g, or t
  misc_feature (481)..(481): n is a, c, g, or t
  misc_feature (531)..(532): n is a, c, g, or t
  misc_feature (550)..(552): n is a, c, g, or t
  misc_feature (554)..(554): n is a, c, g, or t
  misc_feature (604)..(606): n is a, c, g, or t
  misc_feature (608)..(609): n is a, c, g, or t
  misc_feature (622)..(624): n is a, c, g, or t
  misc_feature (626)..(627): n is a, c, g, or t
  misc_feature (631)..(642): n is a, c, g, or t
  misc_feature (645)..(650): n is a, c, g, or t
  misc_feature (652)..(659): n is a, c, g, or t
  misc_feature (661)..(663): n is a, c, g, or t
  misc_feature (665)..(669): n is a, c, g, or t
  misc_feature (672)..(687): n is a, c, g, or t
  misc_feature (695)..(712): n is a, c, g, or t
  misc_feature (714)..(714): n is a, c, g, or t
  misc_feature (717)..(717): n is a, c, g, or t
  misc_feature (719)..(719): n is a, c, g, or t
  misc_feature (721)..(721): n is a, c, g, or t
  misc_feature (723)..(756): n is a, c, g, or t
gaagaacgctgacggcgactcggccacaaaaaaaaccactagcatttttcgtgcaacgatggccataaacaaatccacaggctcgtacgcatcacagtttatctacacaagaaaataacacagacgagctaattcattccacagcgctacggactcaaccaatgctcacctccgaacagaaacatgccctcccgctccccggtggctccgacaccgccaaaagctgcggagaaggccctgttgcctccacctcccgcggtggcggcatcctccgcctggccggactctgtgagtggctgcgggttcgaggacagcagccagatcccgagacctgagccggcggccaccgaggccgcggcgaaagccctagagtcgctgcacaaaaaaaatnnngcctctgctttctctnnngnnnagtaaccttgctnnatcatcttcgttaggnnttctcagatattcatctccaaaaacctcgacaacngaacaaacaaatcttcgtagactctcaattgtagtactctcacctatacnnacataatcatcagtaacnnnancagctaccccataagataacattcgaaatgctgcaggaattttttgcagnnnannaagccctagagtnnntnnacannnnnnnnnnnnctnnnnnntnnnnnnnnannncnnnnnagnnnnnnnnnnnnnnnncgtcctgnnnnnnnnnnnnnnnnnnanggncntntnnnnnnnnnnnnnnnnnnnnnnnnnnnnnnnnnnaaa

SEQ ID NO: 732 - DNA, 306 bp, Zea mays
aggtgggcagagctaaagcgcaacgaggagtgggcagtgtaaataggcacgtgataaaaaaaatggagataaattgcactggttgattccatggtagcagcatcctggggatgtacgtataagatggcaggtagtcggcctcgtcgttttgttctaggagaagcagttggaagaaaagaagtactatacagaagccaaacttgtctacccctatccagctggtgtgtctgctatgcggcagcgaaacttgagtcattagattgtagcctgaatgaaagcagcgctagcttgcgatgtagcagtacc

SEQ ID NO: 733 - DNA, 358 bp, Zea mays
atggggtggagcgtacccatccgcaggaagttgttgaagaaacttatgaacctgaggttgatggaggttccaatacaggcggtgatacaatgaatgagactaatacacatgaacagcatactgcacagcagccaaatggagcacatgggcgtcatagatggctgtttattgcagcagctccagttgtaagtcttgtcagtttagctctagttttgtgcttcaccaatcctgctggcaatgttaggaggcaattgtgccgtaggtcccagactaccactacggcacatgtagacacaagaagaagttggtggtctatgttctaagtaaccagtgtttacttgctgatgctgaatttctg

SEQ ID NO: 734 - DNA, 412 bp, Zea mays
ataaatgatgtaagtgacactgggaatcctacatatactttctggacaatgtaacaacaaacatagggcctgtttggctgtgtggtagtggctcaagattttacccccaaaagggagagatctagggctaaaagccagtttggagtaccatttatgtttttttaatggaagagaacacttaacacaaataaaagattagtgttccttaattgatgaaaaaccatgagctctagtacttacagatcatctagtcttgagttgttagagtctctgatcaggtttgatgaacggagtgatagatcaactcgaagtgatccttctgatgagcggctcacagacaggaccttgcacttcacaaactggccctcatggaatccagacaagggttcagacacccaagagtcaacaattt

SEQ ID NO: 735 - DNA, 422 bp, Zea mays
ccgggttattacggtcaacgaagggcgtaatccaatccttcatgcaaatgccatcaacttggcaaaagcgtcagaccggtgtgggagcactgggcaatatcatgatgggaaggcgtagttggattttggtggagattaagtcatggattaggccagaaatggtcagacattaattaattgatagagatcacatcggtgttgctaactggctagagacagcatacagaatagcggcataaactagcattgccacgagcattcgtggacagcgcaccagacggatccatcagggctcgctagtcggtgcagcacaacataaaagcaacaacgaagctacaggtgagccgaagcattcaggaatcaggatgctcccaggcagccagttcacccaagctactccgttgggcagagtttcatgtaca

SEQ ID NO: 736 - DNA, 373 bp, Zea mays
catgcgagtgcccctaggagatgccctgtttacattcagaagcctcccactaatgtcctatagaaaataagttggttagtaatctattcatcacaattttgtgacatatatgtggtcttcgtatatatgagggtgtctatagtctacatgctttgaagtggtacacagatgtgccccttttatctaagccacaccataaaatgagatgagcctaacatgactgcctcttctccatgagatgacatgagatgagatgtatggtcatctcaagttctgaacctctcaacgcaattcaatttccatgtataatgacggcatgcgaatccacaacatgaatgaatgcagaggatgggagctttagtggactgcagtt

SEQ ID NO: 737 - DNA, 379 bp, Zea mays
agtttcatcatctgggtacaacatcagaccgatgacactgctacagtggagacgaaatgcaagaatgaattaacatctctggactttggcattctatgatggggggtcctagaagcaccaaactgtacagcggaaactcaacaccgtacccacccatagaatcattactcactttcataatcatcttcatctccgaacgagaacaccgaggcatctgcggcaatcgccttgaattcgctcatgctggaagagtcagcagctggaggaggtggtgctgtggtggagctggccttgctgctgacttcagttttgagagatgtaccatcaggtgcctttgtggttccctgttcgctgcttatagccactttgtccagtaaaa

SEQ ID NO: 738 - DNA, 472 bp, Zea mays
aaatccaccccctagttcagctaattatagagcagcacctaaaattccaataaagtaaacaaagtaattgcattctagagataggtatcaagcaaaaattgccagcaatttctgaatcatcagaaacattcagctggagaggacgccatcattcagtgatagattagccagctgctgctcggtggaggcattgctctgctggagatgctgggctgagcggagaacctccatggcttcagcaaccttagccttgagagcatctggcgactccagcaggtgaagaacctccgtctggtccatctccaaaagcatgccagtgaccttggcagcctgctcacgctccagctgttcaacaagaggatacaggttctcaccaagcatctgcaacacaggacacagtgatgagcacccttgattaagaaataggagcaaccaataaatagcttgtccattctcaccagtctttgctgat

SEQ ID NO: 739 - DNA, 488 bp, Zea mays
gagggggaaagcgaccgtgtcgtcaccggggtaggcggcggcgtgggaggagaggacgaagcggaggaggtcgccgatgcaggacgagaagggtacgccgccgacgcccggagactgcggtgtcggggtggcggcatggtcgtaggtcgccattccccgatgtgtgcacctgccgccggcgaagaaaatggagagaggcttgctgcttgctggtaccgtttgcgttattttagaatttagagcaagggtgaggggtgtttgatacacccactaaactttagtttatatcacattaaaaatgttcgtaggctagttagaaatattaaatattagtttagttatacaactaatacaatatatatatatatatatataaacggtaagacgaatttattaagcatgattagtatatgattcactcgtgtcatactgtaacaaatatttgctaatcataaattaattagacttaatagattttgtctcgccgt

SEQ ID NO: 740 - DNA, 334 bp, Zea mays
ggactctttgctgacgctggcatacttgcaattgagcatgctgactttgagggcattgaacgtctggctcttgttactggtggtgagatcgcatcaacttttgataatccagattctgttaagcttggtcactgcaaggtaattgaagagatcatgattggggaggacaggttaattcatttctctggggtcgcgatggggcaggcttgcaccattgtcttaaggggggctaggtatgtcttgttctacacttctacttatcatgcaggactactatgttccatctatgcatttcaaatttccataaattgagtatttttgctttttttcatcc

SEQ ID NO: 741 - DNA, 400 bp, Zea mays
cggcggcgcgggaggtggacgtggtgggcgtgttccggtacaaggacacctggccgctgtgcatcgacttcctgcgcagcggcaaggtggacgtcaagccgctcatcacccaccgcttcggcttctcgcagcgggacgtggaggaggccttcgaggtcagcgcccgcggccgcgatgccatcaaagtcatgttcaacctctaggcgggcaagccgcctccctctcggtccagccgtctaggcgccgtcgccgttgccgtatgcccctgcccccacccaggccacaactcctggaataaaaatgacagaaaagaaactttatagttcgatgaatgggcagtttgccgtggttttggaataatttggactttgtcttctttcgcttctgttgtcgtaccatt

SEQ ID NO: 742 - DNA, 440 bp, Zea mays
aaaacttaccagatctctatcatcagctgaaaagaaagataaacaggacgaagggaacaatcagagtggacagctggtgcaggaggaagaaagagaaaaaggcaaggttgggttttgggtctactggaaatacctcaccttagcttataagggtgcactcgtaccgctagtgttgcttgcacagctacttttccaagtcctacaaattgggagcaattactggatggcttgggctgctcccgtttcaaaggacgttgagcctccagtgagcatgtcaacactgatatatgtctatatcgcgttggctgttggaagctccttctgcgtcctcctaagagcgttgtttcttgtaacagcctcatataagacagcgactctattattcgacaagatgcacatgtccatattcagagccgctatgtctttctttgattccactc

SEQ ID NO: 743 - DNA, 226 bp, Zea mays
  misc_feature (217)..(218): n is a, c, g, or t
tttgtcttgttagttgttaccacatctgaatctaacaacattaatccattccatggtgcaacaatataatgtaatatcatgtctcttttcctttttcttgtatgtatgttcccaggccttcacaaatgggaaggtgataagcgtccggcacagggtaattgcaagctcgagcagggcgaggctgtcaacgatctacttcgctgcgccgccactgcanncacgaatt

SEQ ID NO: 744 - DNA, 370 bp, Zea mays
tccctcctcccacttgcgccgcctgtccccgcgccctcgaaacctttttctcccaaaacagatttcgtcccggcgctctcctgcaaagggcggctagctgtcgccggtggatacgtttcacctctgtctcactgcttgggggggttctgcttcttcctgctttcccaagagagggccagcagcagacgaagcgagcaaagcgcgcaggaaccgctcggtctggtgattttaaggggcgaggtcgtgttcttgggaggcggagagacacgagctctctctcttcctgtcctctttcccgcggcttctctcttgtcttagctccaagagggcaaaactcgtcggggtagggaaatggcggaggtgaagccgg

SEQ ID NO: 745 - DNA, 356 bp, Zea mays
tttttctggcctgaacaatacaataaataccctactcctgtaataatgttttaatttatgtgtttgttcttgtgcaacgacgactggccggcaacgcttctttcatcaattctcctgtaccttatcttgtcaccatgtacatatcatatgcggcaaggtccgtaaagaacttgctgtgcgtggagtggacgatcgaaattaatgatggtttcagacgaaaccggacggtagatgcatgcatgcgctgctcgttttagttttagttgccgagtcggtctgtgcatgcgcgtgtatgtaggtgtcgcttctcagctgcagccggcggcggcgaacccgatcttgctgttcttgacgtc

SEQ ID NO: 746 - DNA, 709 bp, Zea mays
  misc_feature (670)..(670): n is a, c, g, or t
  misc_feature (679)..(679): n is a, c, g, or t
  misc_feature (681)..(681): n is a, c, g, or t
  misc_feature (683)..(683): n is a, c, g, or t
  misc_feature (685)..(687): n is a, c, g, or t
  misc_feature (689)..(689): n is a, c, g, or t
  misc_feature (696)..(697): n is a, c, g, or t
  misc_feature (699)..(704): n is a, c, g, or t
  misc_feature (706)..(706): n is a, c, g, or t
ttccctcgtcctcgtcaccaagcctttctcatccttgcgcacccggacacccaagccccacatgctctccatatattttgatatggtcggctggtctgcccagtatggtattgccaccattggcacaccattaacaattgcttccaatgtcgagttccatccgcaatgtgtgaagaaacaacctgcatattaagagtatgcaactaaattttacatttcttatcgggttgtcctattttctacggttatatgtagaataataaccatttcccatacctgtagctttatgtgctagaacttcaagctgggggcaccaagaaacaataaggccacgttccttgcacttgtcacgaagttcatcggacaacttgtgttcttcgtttgacctcacaacccaaatgaatggtttgccagaattgtacaatccattgccaagctcttctaactgtgcttcatcataattagagacagtaccgtaggatacaagaataacagaacacggaagctgtttgtcaagccaagccagacatgactcgctgctgttgaagaggttgaaaccataggtcttgttcaacggaaaacggtcatcatcaagataaaatgatggcaaggttgggcctattgtctttgcacgccatgttagtgccatataatctgcctcctgctcagntaacgatgnanangnnncnagaaaannannnnnntnatg

SEQ ID NO: 747 - DNA, 532 bp, Zea mays
ttagccttttcaaagcttaacagtcaacttgttaacaaattatttggaagaacgtagacaggtagtatatgagcaaatattttgttatatggtactgaaattgttggactattgctgtctatcataaagtaaataacttattgtaaacattaccaattagtcataatacatgttcaacaaaaactatcacactcgaaaggtgacatgtatacaattaactccatgcaagatctgacttcagttagtatgtcaacaatgcagaattgatgaatcctgtttaccaaaaaaatgcatgcgcactaaataaaggagaactttcaactcacaactctaatatagccagagcagtattgtaatgatgataattgaaaaacaaaaggcagacccagtgccacaggctcccacatgagcggggtacggggaagagataaactgaggcaggtcttccctctgcaaatgtggagaggctgcttcaaacccgagacctagtgacactgtaagatagctctcaccactacacaggcctgacttt

SEQ ID NO: 748 - DNA, 402 bp, Zea mays
agtagtgagaacaggcaaatgctattcagcaccctctcatcttcattcgtttgttggactttctgtttctgaagatcctaattaccttcaacttgctacaggagtgacgcctgcggagaggctgctgaacctgtacgagaccaagtggcaacgcaacgtcgaccatgttttcgagcatttgttatactgattactgaggatgacgccgccgaacgacgttggactgagcttgtagatgtaccccgtaccctaatacagagtctcgtcttgattcattcaatgcctgagccggaagggctcagtttcaggcacacaggagcagagctttcggttggttgttgacggggggcaaccgctgcacagcccggtgctgtgcctacaaataacttcgcctggaactgg

SEQ ID NO: 749 - DNA, 344 bp, Zea mays
cagggaaagtttctgtgaagcctgagaaatcggcaggaagttcagtgggtaagccaagtgaaatcagtaaggggcagagcaagagctcagccaagaagaatttgagatcagcatctcctaccacagggaatgttcataaaaccagaatccaagatgtgatcagtaacaagtcatcagagggagttgaaggtatttctgtagaagtaactctgccaaagcagagaaaaggtaaatcaatgaaaacatctagcccccgggctgttcctgtaggtggctcacggttggtgaggccaatgtttcggaataaaacctcgacgaaaaagaaggtgaaacctgaacctgct

SEQ ID NO: 750 - DNA, 347 bp, Zea mays
  misc_feature (266)..(266): n is a, c, g, or t
  misc_feature (268)..(270): n is a, c, g, or t
  misc_feature (294)..(297): n is a, c, g, or t
  misc_feature (306)..(308): n is a, c, g, or t
  misc_feature (322)..(323): n is a, c, g, or t
  misc_feature (332)..(332): n is a, c, g, or t
  misc_feature (334)..(337): n is a, c, g, or t
atggagtacgtgaaccccctcaccggcttccgcgtcgacggccgccgccccaacgaggtgatgcatcctcgcccgctttcccctacgcgcggttcacgcgaacagccctatctcacccggtgctggacatcacgcagatgcggcaactcaagggcgaggtcggcgtcgttgcgcgcgcagacgggtgagttaagatctctcccgactctgaaataaccttatgtatttcatttttgcttacttaacattgccatgtaaaccaactntnnntgagggttgcactgaacgtggtgnnnnttttggcannncgtcacgtacacgnntcactaaanannnnttcggcgacc

SEQ ID NO: 751 - DNA, 305 bp, Zea mays
gctcagttcagcctcgatcttgccacgatattccttgataaggttcacatgctcttcgttcttacgggactcctccttttgttcaatggaagaaacaatgcgccatgaagcgcggcgagccccaatcacattcttgtatgcaacagacagaaggttacgctcctcaacagtgagctcttccacatctacagtcttagccaccttctccatatactcaaccatctcctcatacctttcagcctgctcagccaacttggccatgtaaacattctcctccctcgacatattgttaaaagaacaaactt

SEQ ID NO: 752 - DNA, 537 bp, Zea mays
tcttcgcgacatcatttggatgcataacggttttggttctgcgtcgtattatactcggtgctgagcttggaggccctaggctatgggcttgggttacatcagtctacttcatgatcctttgggttgtttttgttgtgttttcctctttaagagtatctggagtaatatagacaggaattaaaacaaaggtagtgggggcttcgattttccataaattttgttgctattggttttcatatccacaaagaaaacacctattgcgggtgaaaattagggcccgtgaattagggattatagatagatacaagtgcttgttctatataatgattactgatgaagccaacaatatattgtgtagtataattgaagttattatatcagaaagaagggagaacagttggatagctcttaaattttgattcaattgtgttgcattatcaatcatacatgtaaatatcgaggcttatattttgctagcattgtactactactattaatgtctttattgattaacagcagtacattggacataggctg

SEQ ID NO: 753 - DNA, 553 bp, Zea mays
ggccgccgctgaccccgccgagccttccccgaccgctgaacccagctcatccactccctgctctcccccctccagggcccctaaccctgtcaccatctccgaccccgagcacccgccacagtccacctccaccgcctcaggccccgccgcgccgcccaatcctaacggcaagcccaagcccaagcccaagcccaaggtgaagcgcgtgcagagcgccggcctcctcgccggctccgtgctgaagcgcgactccgagcggctcaaggacgtctacaccctgggcaagaagctcgggcaggggcagttcggcaccacctaccagtgcgtcgagaaggcaaccgggaagcacttcgcctgcaagtcaatcgccaagcggaagctcgtcaccgatgaggacgtcgaggacgtgcgccgcgagatccagatcatgcaccacctggccggccaccccaacgtcgtatccatcgtgggagcctacgaggacgctgtagccgtgcacctcgtcatggagctgtgcgctggaggggagctgttcgataggatcatacagcgg

SEQ ID NO: 754 - DNA, 389 bp, Zea mays
tatgaggtgtttctttcttgtttctgagcttggtgcaggtgaagtggagaccaagcatgcttgtgaacacctcgcccccgaggagcatcaggagggtcatgaggaggagctgcgcgttagagaaggattccatctcgacggcgatcatgctggagactgtcgtcgccgacacggacgtgaagagtaggtccagagccgagggcctaggcacggagctggacttcatgggcaggactctcagcatcaagaaacccaaaacggagatcaaaaggaagtacaggagttggatccagaacgggtgcacatggaacagcacgaggtgatagaacttacgaggagtactactaccggggacgtgcaaagggggcattatttaacttgttggcgct

SEQ ID NO: 755 - DNA, 391 bp, Zea mays
ctagcatctggatccttgggccctgctggaccttctggcaatgttgcaaattacatgggacaaatggcgatggctatgggaaaacttggcactcttgagaactttctacgacaggtttgtcatgcaaaatcatggacttgctcatttcataacactgtgccatctttattttccttaatttgctggctactctttgaggccttttatatagaccagctacatgatattcttaaatccatatctttaacaataaaattgatgagaagcttatacaagcttaatctgaaatgccaaatgaattattggaaagggttacaattatcaaaaggctgtcgatagatgatgacatataaaatcagtggcacagattttgatttgaagtggtcccttt

SEQ ID NO: 756 - DNA, 313 bp, Zea mays
tttcacacgtaacgcttaattcgatcaatatcaatatatatcttaacgagagatacacacatccgttcgtagcgcatacataccgacaaggacacaccatgtggatcgtcgtcatacatacgtcgacatggaaattgaacaccctcttcgtcatgatcttgtgatgtctctctctctctctatgactagcaggcatatatatgcatgtttcctcaagaaataattcaagcatgcatataaaatttgttgatatattaatcttggtggtcgatcatcgagtcagtgcctcggtgggcactggtagcacctggta

SEQ ID NO: 757 - DNA, 401 bp, Zea mays
  misc_feature (391)..(397): n is a, c, g, or t
cgtgttatcaggggtgaagttacagagacagacagacagatggattgaagctctcatttcatctcgagtcttctgaagtcgagcatggcggtcctgagcccgaggaagttgctgcacttgcagtccgcgctcttggggagccccaggctgcagctgaagcagagcccggcctcctcccgcttcaccggcctcagcagcatggcctcctcctcctcctggcacggcgggctgatgcagaggtccaggttcaggtcggggcacttgagcgccttcccctggccccagtcctcgaacgatatggttatgttggacgtgtgctcgttgatggggcggtgtgtcaccgggtcgatccccctgctcagcagcttccgccggatgtgcgtgttccagnnnnnnncttg

SEQ ID NO: 758 - DNA, 424 bp, Zea mays
aagcctggaggagatcatgtccatcatactggaggcccggaagcccggcgacgggctgaagcatgcgggacagctccccggccttgggagcatggagctggatgacattgatgttgacgacatagacgttgaggacagtggcgactttgtatgtgccttgtgacgcggttcaggctgtccggcaccgttgctgcggtggactctcccccactctcctggtctttgtgtcttgctgttattccatgttgtttgtttcagcgagctccgagctcccattttgttgttgtaatatcacatgttttgtgtaaccaaggtagtgacgctgtggataaataatagacgttatgtgttgtattcttgctgaattgttgttcagctccttctgtttgccctgtatgaactgggcagtttcatgagtaccaca

SEQ ID NO: 759 - DNA, 424 bp, Zea mays
  misc_feature (166)..(167): n is a, c, g, or t
  misc_feature (206)..(206): n is a, c, g, or t
  misc_feature (270)..(270): n is a, c, g, or t
aagcctggaggagatcatgtccatcatactggaggcccggaagcccggcgacgggctgaagcatgcgggacagctccccggccttgggagcatggagctggatgacattgatgttgacgacatagacgttgaggacagtggcgactttgtatgtgccttgtgacgnngttcaggctgtccggcaccgttgctgcggtggactctcncccactctcctggtctttgtgtcttgctgttattccatgttgtttgtttcagcgagctccgagntcccattttgttgttgtaatatcacatgttttgtgtaaccaaggtagtgacgctgtggataaataatagacgttatgtgttgtattcttgctgaattgttgttcagctccttctgtttgccctgtatgaactgggcagtttcatgagtaccaca

SEQ ID NO: 760 - DNA, 437 bp, Zea mays
agttagtgatgataattccaacatgtcctttctaaaaagaatcgctacaagtgacgtgccgctgttgaaagagtatggtgtgaatggagttgttgtcgccctgcttctggctgtagttactcctgtcctgctttccatgatgtttggcaagaagacaaagcaaagggcggtgcgagctgatgtgggtggagaggagggatttgcaatgcggaacaacaggttttcctccttagttgaagtcccatgggagggcgccacgacaatgtcagctctgttcgagatggccagcaaaaagtactctcgacggaggtgtcttggcacgaggaagctaattaagagggaatttatggaatcttctgatggtaggaagtttgagaaactgcaccttggtgaatatgaatgggatacctacactgaggcatttaatcgtgcatgta

SEQ ID NO: 761 - DNA, 256 bp, Zea mays
ctccggcgccaccgcgctgggccacgtgctggtgtgctgggcgctggtgttcaaggccggcatggggagcaaaggcgcggcgctgagcggtgccatctcctactccgtcaacctggccatgctggctgtctacgtcaggctctccagcgcgtgcaagaggacgtggaccggattctccacggaggccttccgagaccttctccggttcaccgagctcgccgtcccgtcggcgatgatggtctggtgagaaactaaa

SEQ ID NO: 762 - DNA, 394 bp, Zea mays
  misc_feature (361)..(361): n is a, c, g, or t
  misc_feature (385)..(386): n is a, c, g, or t
tggaggttatagacagttgaggtcattcatcacagatgcagtcacattccataaaagataaagttaagaaacaaaatcataatagttgttgaagaaaagggaataagacaaaagaagcaatgatttaatttcgttttcatgctaagcaatttccattagatcagtacctcaacaagacagacagcaccaaatgacaatacaggttcaaagattgtataaacttcagaatttcaaataacattggtaaattccaaagatggtaaaactgttggcccaaagactagtaaagtacctttcatgaaaactgagaccatccccggactgattgttgctggagctgtatcaaagatagcaattaatnatgtagcagggatacatcagccanntatcatct

SEQ ID NO: 763 - DNA, 384 bp, Zea mays
agccgtcgtatatgcacctgcaggtgcagaggacgaatagggcacaacagcggttgttggggaagaacttcagagggatgtgctgctggtggactgacaccactgccacgcgcgatgctgccagatgttgccctcgagaccacgtggcaggacgatcagctattcaggtggataggttagcttaccgatgagctctctcgctttcgagtgactggtgaaggaaatggacctcgcacaccgcattttcactatgcaatctgaaaatgtaccgtgtggtttttgtacatatggcatcagtaggcattatatcattcatctcgctgaaccaaccatttacgctatactccgtagtccgtactgcttattgctaccataccaacctcg

SEQ ID NO: 764 - DNA, 360 bp, Zea mays
cagcagcgacacgcaccgccggctcggcacggccttcacgcccagatcgccgcaggcgcgggtgatgatggtctgcatctgggaccggaagaagcggacgcggtcgggcatgggcacgcccagcgcctcggacacggaggccagagcgtcgcggagcgtcacgctgttgatggcgttgttggggaagtagcgcgtgaactggagcgacagcgtggcgtcgcacaccacgagctcccacaccttcttgccccgcgcgtccaggatgggccgcgagcagaagtccagctcccactcccggatcgactcagggtccacgtcagggtccaggtagcacacctccgcctgcgggtccaccttgtt

SEQ ID NO: 765 - DNA, 412 bp, Zea mays
atctcaaatttaccattcatatcatctcaaatgaaagatataaaattcagatacaaatatctagattcaaatttttttttcaccttgttttgtcgtagggagcaaacaatgcacaaaaaatatgtaaaattttatttttgttcgtagtcatgagcttgataatagaaaaagatcaagatcaaatttcatgcatatctattttaaaatattaaatttgtcatactaaacattccaactttaatatcaaatatacaattaattgatcttgttgagagtagagtagacattagtcaatggtttagatagatagtttatcacaaaaaagtgccatccagaccaatttaaggcgcattaaggacatgcttgtctacactctagattttggagccctgggtgacccttttccatcttc

SEQ ID NO: 766 - DNA, 381 bp, Zea mays
ggctgggaaccttaccaatttcctatagtgtgtattatgcttctagagatatatagtgtgtgtgtatatatataactatatacataaggatacaaaatatctcacaatttaatttgaatgatgtagctgatagaatataacacacgcacatatgtcgcctctgtctctagctatatttctgtagtactagctagtacgagcgaggttaattaattcctacatccaaactaacgtggcgctcattaaaaacttgaaacaaagaacacataaagaactgctgaacattgtatgcgtgattcagaagagaggccaacatactcttttcaatctatataaagcacacaaatcatatatatatataagtatgcgtaaataaacccg

SEQ ID NO: 767 - DNA, 537 bp, Zea mays
gcagccattactacactacagaagagtttagcatacacaaggggggagaaatagtacaccatagacatagactagcacactatatacaaattcaatatcccatttcgatgtgcactgcaggaaactgtagcatgcaatctgtgagtttattataaatgatgtagtagtagggccggatttgttgggcactgctctgcctttggaactactgctgtcctgacagacactgcatcattctgcatttcacctaccccagttcccagactaaatggctgtaaagacagattcataaaaatgtctgctttatggaacatgaacatttctttatagacaggaggagtaaagagatatctcacgttcttcgtgttaaccatataagaaaatggcaagcgacacgagttgaactataaagacgaggcagtgaatcatcggatgggcaccggcatagcacagacctctctagctagctacctgcctaccttctagctgcatttcatctgctcgctccggtcctgtggttgatctgaactgtcacag

SEQ ID NO: 768 - DNA, 405 bp, Zea mays
atctcttatttttctctgcctagtagataattgtagctatcttgtactaatttctgtgttttatacaggccattctcttgtttcaaaagatcgaaggtgtggatgtttgcctctttgccatgtatgtacaagagtatggctcagattgcccaccaccaaatcaaagacatgtttatcttgcatatattgattctgtcaaatacttccggcctgagatcaaatctgcaactggagaagctctccgcacctttgtgtatcatgaaattttggtatgagaattccaaatcatcaaacatattctttgcttgtgcaaatgagtttatgattctagaatcaaattgtttcaatgcttattgtagattggttatctggactactgcaagaaacgagggtttgtaagctgta

SEQ ID NO: 769 - DNA, 459 bp, Zea mays
atgctcatggccaggccgtactggaacatcgagttcgtgcctccccgtcccgagagcgcgtgtcgggtgatggcggatggacagccttgtgtcgacacccatgctcaggttctcgcgtactattccctcgctggaaggaggccggactgtccgcggtggctggttactttgcatcccgcgtgactgtagagtgtagatacggcaaggtgtccgagtgtggttactgtgttactaccagctgcttgtgtaccgtaatgaactgtagtgccgacgtactgtagcggaggtgtagtgtagtgcaataataagttgcggtgttgcttgtactggtatctagtcctaggaggatgtatactaagttatgctgtgctttcttctccccggaattgtattctgttgcttccactgtaaatatcagaaatggctttttgctagtttgggttgaaataatggacctca

SEQ ID NO: 770 - DNA, 395 bp, Zea mays
cggtcaatcctacgtatccagcatgcccccttcgctttgttcaggtgaagggcacgttgtataacatctaatgcaacactaattcaagtaaacaatcagaccaatatcattcgatatctggcaaaaccaaagaattactctgatatagatgctcttgaacaaaagacaacaaagagaatcaagtatggcagactgttaaaatagtttcctgtgtcaatatttccagactgcagcctgttttgacgctatctgctccaacggttcacaaaagtgacaaacaaaattgtgtactatttgaaaacatggatgggaagggaaaaaattgggggccatcattcagtgtgtgaattagcgagtagcaagttccttgcaaccaggcattggagcaggatgca

SEQ ID NO: 771 - DNA, 381 bp, Zea mays
agcagctatgagcttcctggatgatgatattgtattgtattgcaaatctcggaccaatgtcatattccattcattcctggaactggaccaatgtcatattgtatttgcttacgccttaccataccatctgcagtgctagttttgtcttgtccatacatacaaacaaccagatacagtcaactacacccggtggtctacacaacacagtaggacaaggatcctaaaaccaccatctcccttgtgcatgctggtggcatgatcaggcgatatattatacagcaaggaggcgatggttatcattggcagcagcgccgcagccagactgttgccctctaccgtttgtagttacaaaatggtgcatcccttctgcaccttcttctt

SEQ ID NO: 772 - DNA, 300 bp, Zea mays
gatccatcctgaccggtttgggttgaacgagctacaacatctgagactgtcgaccaaaagtacagttgtaatacaagtgaaactgaccatgacaaacaggaagatgctggtcgatcaaacgagccagaatcgtgtgatagatagactcactgaaggatggaacaaaacatcaggtcatcagctcttggttacatacactacactactacatagtccggtacttttacagcgacgaatgcagagcatggcccagaacagtgaggaggttgatcggatcagagggtctgcaggatcttgagc

SEQ ID NO: 773 - DNA, 456 bp, Zea mays
atgtaacgacgacagtcctcagaggatgacgagcaaggtgggcgccggaagaagagcatcaaggagaagataaaggagaagctcccgggcacccacaagcacgaggagcagaaggctgggcacgtgacgacgacgacgacggggacgcatgcagcggggacgcacgagaagaagggtttcatggagaagatcaaggagaagctaccgggacaccaccatgctcactgagcgtgtgtacctcagttgaggactcggatttgaggggtccagaatcgtgtgtcgtgcacaggtctctgcagtctctatatatgttgtgtacgacttcggtagcctcgacctcgatcgcttgtacctagtcatgctcatgcgtgcatattgctgtgctccttatatatgtagcattagaagctgcgcgcaagtaggatttgggttctagtctatatatacactgttatc

SEQ ID NO: 774 - DNA, 340 bp, Zea mays
tctcgttgagcctggacgtgcgggcgtactccgggtcgatgtacccgatggtgcccagcacgtaggtggaggcgtgggacttggcggccggcacgcacttggcgatgccgaagtcggacaggtgcgcctcgaagctgccgtccagcaggatgttggaggacttgacgtcccggtggacgatgcgcgggttgcagtcgtggtggaggtacgccagcccctgcgcggcgcctactgcgatcctcagcctcgtgtcccagtccagcttcaccttcttcgacgggcctgggaatggccgtggcccgtgggttatcggaaggacgaagcgacatgaattaagaaa

SEQ ID NO: 775 - DNA, 531 bp, Zea mays
aagttttatatccagcacttgcgcgatacaatcaagtccagagatatattattagtatttaaaagcgctagtagtatgcgtgtactgtattctactgtctgtcagcaaggaacatgtaatgtaagcctgtcgctgttcagtatttttttttcttttccctccccggcccgtttcttgactgtgatgtagttttgtttgctgtcgcggacggaatttcagtgcgaggagggggagaatataccttcctttggacgagcttgcgcaggcaggtctcacggaagaggacatattcagagggaaagtgaccggcaagtggaggaggttcatgaagggccagatccagcgtgccaggctcttctttgatgaggcggagaagggcgtcacccatctcgactctgctagcagatggccggtatgtgagagcctagctacaaaatacaacttttctccttttgtttttgtgcctacacgcaatttaataaattttattacaggttccgaattgcttacgtaccctttgtttggacaatt

SEQ ID NO: 776 - DNA, 422 bp, Zea mays
agactcgaacaaaacggggcagagtcaccctgctgaagaattggatctttcctgagtactattttgctaacatgacgagttaattatcgcagaggaggtacggctgccgcgctatgatgctggaaacggtggcggcggtaccggggatggtgggcggcatgctgcttcacctgcgctcgctccgccgcttcgagcacagcggcggctggatccgggcgctgctggaggaggcggagaatgaacgcatgcacctcatgaccttcatggaggtggccaagcccaagtggtacgagcgcgcgcttgtcctcgccgtgcagggcgtcttcttcaacgcctacttcctcggctacctcatctcccccaagttcgcgcaccgtgtcgttgggtacctcgaggaggaggccatccactcatataccgaa

SEQ ID NO: 777 - DNA, 349 bp, Zea mays
agtaggctgtggagcttgatgatgagctcgtcctcctcctccgtgaagttgccgcgcttgaggtcgggccgcaggtagttgatccaccggaggcggcagctcttgccgcagcgcacaagtccggcggccttgggaagggagcgccagcacccctcgccgtgcgccttgatgtacgccaccagacggtcgtcctcctccttggtccacgcgcccttgttcgtgtgcgccttctcgcagcacggcgatctccccatcgttgctgcgattgcgagcccaagggtgggtgaagccaagcggggctggattttatagggcacttgactggatcgcgggagctcttctagagttg

SEQ ID NO: 778 - DNA, 363 bp, Zea mays
ggttggcgttacagaagatatctaatgtactccgtctgtaccctcagccaccacggaccacaggccagaaaaaggcttcgccttggtccttggatccccccacacaacgcagcacccgcactctccaggcgtctgccaatccgaaacgaaacccacccgtcgcctagaggcaaaccaggactgagattgagcggagagcagcacagtcatggcggggcaggaggtggcgaacaagcgggtggtactgaagcgctacgtgacggggttccccggcgcggacgacatggaggtggtcaccggcaccgcgcgcgtggccgtgccgccggggtcgacggccatggtgctcaagaacctctacgtgtc

SEQ ID NO: 779 - DNA, 433 bp, Zea mays
ggcgctacgcggaggcgctagatgacgccaagcggaccgtggcgctgaagccggactgggccaagggctactcccgcctcggcgccgcgcaccttggcctcggtgacgcgcccaaggccgtcgaggcctacgagaaagggcttgcgctcgagccgtccaatgaggcgctcaaatccggcctcgcacaggcgcgccagtccgcatcggcgccgagacgtccggtgggctccggggctgacgccgttggcaagatgttccagggccctgagctatggagcaaggtcgcggccgatcccaccacgcgtggctacctcgaccagccggacttcgtgcagatgctgcgggaggtgcagcgaaaccccggcagactgaacagctacctttctgaccaacgaatggttcaggtgctcaccctcatgctgaacatcaagtt

SEQ ID NO: 780 - DNA, 312 bp, Zea mays
actcgtcatgttagcaaaatagtactcaggaaagatccaattcttcagcagggtgactctgccccgttttgttggagtcttggagactggatgttccagggaaatggttggggcgagcagggatcacctggaagaatatgtcggtgggcacgcgcagtaatttgacggtccaataggcgatcttgtcgagcagcaccttgggttcgtggtgtctgttgagatcgatcgtggtgtccggcttgtacgcctcccatggctgcaaaattagcacaacagacacgccaattgagacgccgatcagcgaaaaacacg

SEQ ID NO: 781 - DNA, 224 bp, Zea mays
ctcccgactggctgaagcagcacagccccttctacaaggacgactggctgggtaagctcgcgccgcccacgcagccaccacctccctttcctcttctccgcgcctcctcctctcagatctgagcttttccccctccgccggagcgcagtgttctactacacggcggggcaggcggacgtggtgcaggtggacgaggtgggctacaaacagtgcgactccaccaa

SEQ ID NO: 782 - DNA, 536 bp, Zea mays
tccttctcgatgtcgtgcaccgacttcttgggctgctccggcgcctgcttcctgccggcgtgcgcgtccatgtcggccatggtcttgcccaggtccgcgatgaggcgctcggcgagcccgcggctgaagtcctcgcggatgaccacgcgcatgacggccacgtgctccgcgtcggcgggcatggtgtaggccggcacgatccagccgaaccggcgcaggctctcggccacctcgaacaccgtgtacttggaggagtccttgagggagaaggcgaccagcggcacgcccgagtccttggacaccacgtcgaagtagcccatcttgttgatgccctcgcggagcaccgccgcgttgtcgcggcagttctgcatcacgtccttgtagccctgccagcagaccgtggcatcatcgtcatcagttgcaagcccagcgaatgccatccgcagcatgatcatagtgcaagttagttgttacctcgaatccgaggcggatgagctggtaatactgcgcgataatctggctggaacctgtatgta

SEQ ID NO: 783 - DNA, 406 bp, Zea mays
cacgtgcttaggcaggtctggtactggcaatgccgtgcgcccgtgccatcgggattctacagaaaaaaaatgagcaaaagaaaaaaatcatctcccgtgaaaaggagacgagggaaaaaaaatagaaggaaacaaaagcagagagcattatggtcattttatttgtttattgtccaatgcaaagctgttttgccaaataaaatcacgaaaacccctcagcttcatcggaaaagctgttcgtacgtgaagctaaaaacctcggaacaacagctccacttatgaaactgagctggcctaaatgtacccacgaaccaaaatgctgcgcgcctagcgatctggctctcgaccagctacgtgtggggtattatgtacgaaaatgcagcaggcgacggacggagtagtcgtg

SEQ ID NO: 784 - DNA, 391 bp, Zea mays
  misc_feature (367)..(388): n is a, c, g, or t
atttcatagcacgtgacaatgacgttaaagagttatttgtaaaattatgaggtaagacgactgtcgaaattgatgctttaatatggtaaagatagagatgtacaaattaccacaaggacaaaataacatcacacacatgtggtttcataccaagctatactcaatcgagtttagtttgtatttaagaaatatatggagaatcaagttgctagctctaggagatgagatttggcatgttattcttcatatgtatatatattgagtggtctggtcttaattattcagtgcatgatgatgatggtcatcagtagtctgctgccgtggttggcagctgctggtgtgggcgctgcccgatgaagatgatgtnnnnnnnnnnnnnnnnnnnnnngac

SEQ ID NO: 785 - DNA, 556 bp, Zea mays
accagaggcggaactgctgctcccgctgcccctgcccccgcgtgaacacgttggtgtgcagcgtgtagggctcgccggacacgttgcccaggaactcgaagtcgatctcgtcgtgcgcgccgccctgcgacgacaggtagtaggcggtgacggtgccggcggagttgcccggcaccagccgcagctgcatgtcgatcttgccgaacaggtactcgtgccgggactggaacccggagccggacgtgcggtccagcgacagcgtcagcagccgcccgttgtcaaggaccttgccccgcccgtcgccccacgtgatgtccagctcctggtccaagctgcccgccgcgaaggagcaggacaccagcacgcccaggcacagcagcagcaagggcacccgacgagacgacgtcgccatgaccgttgcaaccagccaccaagagagacagacacctaccgacactctacactgatgatcgagcaggtcgctactaggtgctcgacctgatcagctgggacgagcgagctgggttggtggtcgagcttgtgactctgtgagtgg

SEQ ID NO: 786 - DNA, 556 bp, Zea mays
  misc_feature (281)..(281): n is a, c, g, or t
  misc_feature (353)..(353): n is a, c, g, or t
  misc_feature (372)..(373): n is a, c, g, or t
  misc_feature (452)..(452): n is a, c, g, or t
  misc_feature (484)..(487): n is a, c, g, or t
  misc_feature (516)..(516): n is a, c, g, or t
  misc_feature (532)..(532): n is a, c, g, or t
accagaggcggaactgctgctcccgctgcccctgcccccgcgtgaacacgttggtgtgcagcgtgtagggctcgccggacacgttgcccaggaactcgaagtcgatctcgtcgtgcgcgccgccctgcgacgacaggtagtaggcggtgacggtgccggcggagttgcccggcaccagccgcagctgcatgtcgatcttgccgaacaggtactcgtgccgggactggaacccggagccggacgtgcggtccagcgacagcgtcagcagccgcccgttgtcnaggaccttgccccgcccgtcgccccacgtgatgtccagctcctggtccaagctgcccgccgcgaaggagcangacaccagcacgcccaggnncagcagcagcaagggcacccgacgagacgacgtcgccatgaccgttgcaaccagccaccaagagagacagacacctacngacactctacactgatgatcgagcaggtcgcnnnnaggtgctcgacctgatcagctgggacgancgagctgggttggtgntcgagcttgtgactctgtgagtgg

SEQ ID NO: 787 - DNA, 301 bp, Zea mays
cgacgaggagaccgccgtgggccttgttggcttcagcggcaagggcggtggcgcggtcgccatcgcaagcagccgcgtcgaggccatcagcctgccggtgtcgttctccacaactagccccaagcggctgcaacacatccacgggtgaagggtgacgtggccgacgacgtgcgcgcgtgtcactttggacgcgccaagaaatctttcagggagccatggagagagtgagagtgtggtgaaaaaaaaataaggcaaaatagctagtggacggaggcaagacgacggcggcgacgatcggatt

SEQ ID NO: 788 - DNA, 387 bp, Zea mays
  misc_feature (351)..(360): n is a, c, g, or t
  misc_feature (367)..(377): n is a, c, g, or t
ctggtcagcgggccctagcgcaaaataatcaaggtagcatttgaaaactaccgatccgtacagcaaaatactggcaaatactccatagacatcagggactgattaccctgttgttaatcttgctctcaggaacgccaccaaccatacttagcagcgtgagtggctccagagcgacgacagggcccatgccccgtggcagagcgggtcgttgtctccattgccacgcccgctttaaaagggaccacctcgtcgctctccctcctccatgtccacggtcaccgtggcgagggcagccccgccgagcgttagtcacagttgttgcctgcctaccatgcggctctaactcgatcnnnnnnnnnnacgccgnnnnnnnnnnnggagtagcta

SEQ ID NO: 789 - DNA, 364 bp, Zea mays
ccgccggccacgccaaccaacatcgccacctggctggtgacgggcaccatcttcaactacttcgtcttcaggtaccgcaaggggtggtggcagaagtacaactacgtgctctcggccgcgctcgacgccggcaccgccttcatgggggtgctcatcttcttcgccctccagaacgcgcaccacgagctcaagtggtggggcacggaggtggatcattgcccgctcgcctcctgccccaccgcgccgggcatcgccgtcaagggctgcccggtgttctgaatcttccgagacctgagcgtagtaagcagtgtgtgtaacagtgtaaggaaatgtttgctacgggagccatggattcaaccaagca

SEQ ID NO: 790 - DNA, 861 bp, Zea mays
  misc_feature (158)..(158): n is a, c, g, or t
  misc_feature (394)..(396): n is a, c, g, or t
  misc_feature (400)..(410): n is a, c, g, or t
  misc_feature (813)..(819): n is a, c, g, or t
  misc_feature (827)..(835): n is a, c, g, or t
  misc_feature (838)..(841): n is a, c, g, or t
  misc_feature (847)..(848): n is a, c, g, or t
ctgtgcccccaaggccttggcagcagcaaggctatgaaaactcttatgggggtaattgtaatctttttgcatgtttcagaaaatattcttgtgtctcaaaatgttaacgttttgataaaaatgcaggttatggctccaatatgtatagctcttacggnggatatagtggaccctatggaaataacatgtactcaggttatggaggaggttatggcggtatgtatggaggttctggaatgtatggtggatcaatgtatagcggtggaatgggaggaccctatggtggttatggtatgggcatgagtccttataatcagggaccgaattcatttgggccacctaccccaccccctggtttctgggtgtccttcctacgagtggtaatatatgttannntatnnnnnnnnnnnctgtcaggataagtactgcgctctggcctctgcgcaacatgcgacgccggagagcgcagaagatcctctgcaagaagctgctggtaattcacttctgaacaaagatccaaacagaggaagcgtctatccacgcatgctagagacgatgccgatcagtcatcagagcctgaccgaagcgcagcaaactgcggctgcgcgcgtaatttggactggctgtttgttattgatgacgatgaagcccctacccggcaccgcacctgggttttctcgatgcatgcaccaatgttttctgatcaccacgcctggctttcgcatgcaggctataagcaccgcgtgccgcgtcgcgttcaacaacgcatcagcagagagtgtcctaaaaggagccagtctcataggtcgactnnnnnnntggcgtannnnnnnnnatnnnntatagnnactgatgatccag

SEQ ID NO: 791 - DNA, 505 bp, Zea mays
gccaagcaggccgcggctgacatgtccaaggtgctgcaggtggagatctcagccggcgccgccgaggaggatgccgcggctgcgactgcgactgagcctgcgccggcgtcggcgtcggcgtcctttgggctcttctccggggagttcctccgccggcacgggctgcacctcctgggcacgtcctcgacgtggttcctgctggacatcgccttctactcgcagaacctgttccagaaggacatcttcagcgcggtggggtggatccccaaggcggcaacgatgaacgcgctggaggagctgttcagcatcgcgcgggcgcagtccctgatcgcgctgtgcggcacggtgcccggctactggttcacggtggcgctgatcgacgtgttggggcggttcgcgatccaggtgacggggttcctgatgatgacggtgttcatgctgggtctggccgtgccgtacgagcactggacgacgccggggcaccacatcggcttcatcgtcatgt

SEQ ID NO: 792 - DNA, 365 bp, Zea mays
  misc_feature (346)..(350): n is a, c, g, or t
ttgtgtgtgttattactactactcatttggagctgggcaacttgaggtcgtcactactactgatttggagcctgatcttgagaaagatgagccaggtctccgctctctttcatcacagagacggtccaagaagaaaggaacggcacgaggaagaaacggagggcaaggggaacctcgactgccatcatggggagctccggcgctgacccggccgtgtccggtccgctgcattgtttgggtggggcgtgggggcgtcggtcgggtcggggcggggagttgtcgccgtcgccaggcgtgcctccgatccccctgcatgtgccgtgcgtgctcctcggcccggcgctcnnnnnctttccaagattcat

SEQ ID NO: 793 - DNA, 495 bp, Zea mays
agctcagccccaacaacagcacggagcagagcttgctcgatgcgcagctcgagctctggcacaccaccttcgcgttcatgaagtccatggcgctcaagtccgcaatacacctccgaattgccgatgccatccacctccatggcggtgccgccagcctatcccagatactaagcaaggtccatctccacccgtccagagtttccagcctccgtcgcctgatgcgcgtgctaacaaccaccaatgtcttcggcacccagcagccggctggtggcagtgacgacgacagtgagcccgtctacactctcactccagtgtctcgcctcctcatcgcctcacagtcgtcgcagctggcccagactccgttggcggccatggtgctcgatccaaccatcgtctcccccttcttcgagctcgccgcgtggttccagcacgagctcccagacccgtgcatcttcaagcacacgcacggccgaggcatctgggagttgaccaaag

SEQ ID NO: 794 - DNA, 338 bp, Zea mays
gggaagttagcaaaaacagttgcaaaatatttggcatatctttgaccgagaaggttccagcaatgaaagaaaagggctgtggtgacatcaacaccaactatccatcccccttcctgtctttgaagcaacaagtgccgaaatcgctgggcaacagctgtgccaccgtgagtgtcctacaccatgtagcagccttgatgtcattctagagtgaagtaactcttaactataataaaatcctgcaggttcatgagcagaggcctgttgttgctagggtgattgacgtttcaacagtggatatgatgatctgatgtattggaaaactgtcctggaggtgaagt

SEQ ID NO: 795 - DNA, 444 bp, Zea mays
acatcacgggcttgccgggcggcgccgcggcgttcgagctcgtcaccaaattctgctacggcgagaacttcgagctcacggaggacaacgtcgccatgctgcggtgcgccgccgagcacctgcagatgaccgacgacgacagcaggggcgggaacctggccggcaggaccgaggcctacctggaggccgtggcgctgatgagcctcgcgggcgcggtcaccgtgctccggaggtcggaggacctcctcccggtgtccgaggaggtggacctcgtcggcaggtgcgtcgacgccatcgcctacttcacctgcaacgacagtcagttcagcatgtccaacggtaacggcatggacgtgtcgtcgtccaaggtcatcatcgatgattggttggctgacgagctgacgtcgctgcggattgacacgttccagagagtcgtaattgcca

SEQ ID NO: 796 - DNA, 446 bp, Zea mays
actgcgagatgcgcccctcgaggcccctgccaggcagcgagatggcgctgacggtgacggctgtcccgtattggtcgtcgcaggtgatcccttcccacttgcagcagtcggtgcctcgccagagcccggtgaggccggcgtcgtaagagagctccgcgaggaactggagcagggacgccctctccggctccccgcaggcgctggcgcaggacgcccaggagatggagatgagcagcagcgcaagggcgagggcgcgaggccggtggaaggaggtacgtgcagtgtgttccggttccggctccggctccggctcctcttgcatgaaacgtggagtggctgcatggcttcgtgttggaattggaactagcatgggaacgaaccagatgccgcgctgaagctgtgtgtcctgcactgcactactcccgtctagacgaagtatgtgccaa

SEQ ID NO: 797 - DNA, 178 bp, Zea mays
gggttagaaccagcaagaggagtcgtgaatccgtgacaaccggcggcggcgagggaagaatcgaagatcgccgcagccgcaaggaaggaaaccgagaacaactcaatccgctggctatggcgttgctgatggagcccggcgctgagcccctgactgagagcgagcaggccgacctggg

SEQ ID NO: 798 - DNA, 404 bp, Zea mays
  misc_feature (222)..(222): n is a, c, g, or t
  misc_feature (231)..(232): n is a, c, g, or t
  misc_feature (236)..(237): n is a, c, g, or t
  misc_feature (243)..(244): n is a, c, g, or t
  misc_feature (269)..(269): n is a, c, g, or t
  misc_feature (296)..(299): n is a, c, g, or t
  misc_feature (304)..(308): n is a, c, g, or t
  misc_feature (311)..(311): n is a, c, g, or t
  misc_feature (313)..(314): n is a, c, g, or t
  misc_feature (316)..(317): n is a, c, g, or t
  misc_feature (319)..(321): n is a, c, g, or t
  misc_feature (323)..(325): n is a, c, g, or t
  misc_feature (328)..(330): n is a, c, g, or t
  misc_feature (332)..(333): n is a, c, g, or t
  misc_feature (335)..(335): n is a, c, g, or t
  misc_feature (349)..(349): n is a, c, g, or t
  misc_feature (399)..(401): n is a, c, g, or t
cctcagcgacaccttcctcctcgacctcaccaaggagaagcctgcgtggagggagatccctacgtcctggtcgcccccgtcccgcctcggccacaccacgtccgtctacggcgcgaccaagctgttcatgttcggtgggctggcgaagagcggctcgctccggctgcgctccagcgacgcctacacggtggacgtcagcgaggacagcccgcagtggaggangttggcacnnaggnngtagcnngccgctcttggccgatcccatatcngaattgcttgaccgaacataaacagannnnttgtnnnnnggngnntnnannngnnnacnnnanntngggatctctcagcncgcttctcttggggaggtcgaggaggaaggtgtcgcttaggaggacgccnnnctc

SEQ ID NO: 799 - DNA, 442 bp, Zea mays
ttcttccattttccatattttgcataactagctgatgaataagcaaacgatgtatcataacttaggtacgatgtttttgtaccttggcaccatctgtgtgttttgttcattgccttgctaaaggtggcaccagatgttctttgatgggaaaattccttttgtagcactgagctgttttcagtcacaccttattttgtatacaatgaaacagaacgctgtgttcatggcacagtgatttggtgaatgttcacatgcttgtttccgactccgttttaaaacaaaacaaggtttgaactgattagcttgttgtaaatgtcgtttattttgaaaattgaaacaaacggggctggtaccaaaattttgaacttgggacattgcaggatacagttggggtgggctggtctatagtatatatacgtgtctgcctatctatgtccttgca

SEQ ID NO: 800 - DNA, 375 bp, Zea mays
cggctgcccaagcaagatggtggactcgagtccgaaagttctgctgcttcgttagacggtcaaatcatcaagtatcagccttcgatcaacgaagcagccaaagcaatgctaaggaagatcctaaacgtagattcttcgcataggtttgaatctatgggcaattcagataatagtaataataataataataatctgctggaggattatatgccggccggccaagcttttgagagctcttcgtcgacaagaaattctggggtcacccttgcagaggttccagcaaactcaggcttggcgtatgtcggcacgagctcggctatctgttctcctccagcggcccctgaaatgcagtgcccagtggtgctggataacaag

SEQ ID NO: 801 - DNA, 426 bp, Zea mays
tcttgtgccaaaaccctgaggttgagcacgtgccggtgtgttactgccttgcggctatcatctgaaatttttttccctgttgtatccattcttcagaactgtatcgtgagtcgtgacgatgattatgatggtggtcgtcttcttgtctcaggtccatgctatccagaacatactctacacatcagaggaggaccctcagcagcaggctccagccctgagccccatcatggaggcgtccgaggagaggccgaagcaagaggcggcgcacaagagaaagagcatctcggacctggacgagtttggtatgtcgtccagctcaaggcagaggctctccgacatctcggacgtgcagctgtgtggatccccgctgacgagtttcagctgaaggaactgtcatctctacaaaatgggtgtctcgtctttctg

SEQ ID NO: 802 - DNA, 227 bp, Zea mays
tagatggatggggtggaatattcgaaggagcggtttcagtccgttaaatcgcaactcggtgtctttcttcggtcgtgtgggtacaaggactcttcagtcacctgggttcctttgagcgcaatggccaacgaaaatttagtcacagcttcttcagaccctcgacttttatcttggtaagaccgttctaatggtgggcctctttgcgcatcactttcttgccccccccc

SEQ ID NO: 803 - DNA, 203 bp, Zea mays
ctaatcatttctgacgacggttcggtgtcggtatgttaccaactgttcttgttttacataaaaaccaatactatctccgtcgtcaaatcttgaagcagtctcctgcgacacttgaccaagttctctgctacactcgccgtcaaggcatgcaacaacaactcgtcactcctggatgcctggcagggggcaacccacctccattg

SEQ ID NO: 804 - DNA, 537 bp, Zea mays
atttggagatggccaagactgatcagggcggcgatgcgccgagcggagagaatgtcctgaagaagccagacaagatcctgccgtgccctcgctgcaacagcatggacaccaagttctgctactacaacaactacaacatcaagcagccaaggcatttctgcaagagctgtcagaggtactggaccgcaggcggaagcatgagaaacatccccgttggtgctgggaggcgcaagagcaagagctccagcgcgagttgccgcagcgtgttgattcccgttccaggcagcagtagtgtagctaatcctggcggagaggcttccctgtttccgttgtccgtaaaagcaaaccaagcagcagttagcttcgggcctgattcccccctctgcacctccatggcttccgtgctgaagatcggaggaggaggagagcaggttaagagctgcagccctgcctcagcagcagcagcagcagcacagcccaggaacggagaaacccagacccagacgtgcgcaccttcttctgctgctacaacaccat

SEQ ID NO: 805 - DNA, 394 bp, Zea mays
ggcatcctcaagctgcttgagacccatcttgtgccgtcttccactgcccccgagtccaaggtcttctatctcaagatgaagggtgattactacaggtaatatgattgtatggatcccagtaagactttctcatatgctgtgagattacgtttctgtttgactgattcagttgtcatgattagataccttgctgagttcaagactggagctgagagaaaggacgccgctgagaacacgatggtggcatacaaggctgcccaggtcaacaattttttgtttcattcttaatcagtgtgcaattttgttcatgaagcaatatgcttgtagttttttttcacgtcatattttattacaagtttgctgaaaaggggtttgtggtgcattcaggacatta

SEQ ID NO: 806 - DNA, 294 bp, Zea mays
ttgtggacttctgacatgcaggtaaacacttggaattatgctgtcatgtcagtacgtaagtgatgctaatcatgctatgtatcaggaggatggtggcgatgaaatgcgggaccagtacaggatcatttacatgtataggaacattcaatttgtacgataaacacagttagactcatatactctgcctttaaagtagagatgaagtgactcatacaggcaaagattttattatccaaaatctagattctagagatctggattctagaattccgcaggaatcaccctccgcggcga

SEQ ID NO: 807 - DNA, 276 bp, Zea mays
tccgccttcatcgaccaaggcagctgcagcctccagtcccccgacgaggcttctgggtacaacaccaccccgcagcaaccgccgcccatgacgacggaggccgcctacatggacgacgactcggtcaccgactggagagtgctcgacaagttcgtcgcgtctcagctcttcagccacggcgacggcatggcgaaagaggatggttaccccaacccggggcaggcattatttcaggctgagaacaagcagccggaagaagcactggactacgcctca

SEQ ID NO: 808 - DNA, 354 bp, Zea mays
aattccatagcgatgaaagcaacgaaagcactgatggcctgaagttatccaaggaacttattggcttgattagaggaaagaagtctacatatgatattattttatgggttgaggaacaaataattccaaaaaatggtactgaatttgcacttgatgttgttagccagacgcttcttgacatgggttcaaaaagtttcacccatcttgtcactattttggagagatataataagataatctctaagctatgtccaaatgaggaaatgcagctactgttaatgaatggagtcagtgcttattggaagaacagtacccagatgactgctatagctattgacagaatgatgggttatc

SEQ ID NO: 809 - DNA, 202 bp, Zea mays
tccacccgccgtcgccctcattgtagcagtactccttgacaacacacttgatgtgagagatgcagcaagggaccgaggaatgccatggtgggcgcggttcaggacattccgtggcgacagcaggaacgaagagttctacactttgcctttcaacctcaacagattctttccaccgacttaagccaaattgccattgagaaca

SEQ ID NO: 810 - DNA, 542 bp, Zea mays
tgaaacggcagtcgaggccgcaagccaacccaccacgatttttctcactagtcgcaactcgcaagcaaatcgaacgaacccagccgaagcgcgagctgagcaaggcggaggcggcgggaccggcgatggagcggctgcagcggatctttggcgcctccggcatggggcagccgccgacggactcgccgctgctcgactcctccgagcaggtctacatctcctccctcgcgcttctcaagatgctcaagcacggtgcgtggatcctccctctcttccccgtcccttccctgtaaccctaggggtcagggactcagggttcgtctctgctccccccgctttcgttcgcgctcggggcctgacgcgtggtttcggacttcggtcgcagggagggccggcgtgcccatggaggtcatgggtctcatgctcggcgagttcgtcgatgactacaccgtcagggtcgtcgacgtcttcgccatgccgcagagcgggactggggtcagcgtcgaggccgtcgaccacgtcttccagacaaacatgcttga

SEQ ID NO: 811 - DNA, 176 bp, Zea mays
gtcctggctcttgaagtatctactaggattccaagtgttagatgagataatatgagatttaaactaggaggctcctttccttctatccgaggctttcaaatttttttttgtatctttgttctatgtttggtctcaatgccagtatgtagcatcatgtggtaaatggtgagttatcc

SEQ ID NO: 812 - DNA, 386 bp, Zea mays
cagtcctcgccgacgttgaagcgcttgagcaggcggatctggtcctgctgcgtttccggcgtgacggagcgcaggaagttgatgtagtcgtcggcgtggaagcggcagaggtcgcggtcgcgggccgggttggggcggtacacctgcatctggttgaggaggccgtagcgcgccagcagcgagtgcgtcatccggatgcggtgcggcttcatcggatggccctgcccgtagtagtagttgcccacatccgggtcgtagaagtagcacacgcgccgcttctgcccgtcggggccgacggacgggagggagttgccgccggagcccgccgatgacgggtccatcgccgccgcaggggattggggtttgtgtgtgtgtgtgttatctca

SEQ ID NO: 813 - DNA, 527 bp, Zea mays
atattcctcatctccttcttctccagactgatctgagctgcgggccgtcgtccaaggtcaaggagcaggtggcggcggcgccgacgggctccggcgacaggcaggggcaggggagaggcaagatcgagatcaagcgcatcgagaacacgacgaaccggcaggtgaccttctgcaagcgccgcaacggcctgctcaagaaggcgtacgagctctcggtgctctgcgacgccgaggtcgcgctcgtcgtcttctccagccgcggccgcctctacgagtacgccaacaacaggtgatgatgcatataattatctgtacgcgtatcttagttagattagatcctagtcgtacactacgcaccgcgcggtcgggctcgggtcagctgtttgcaccgtccgattggtcccaattggagccagagccagctcgtcgttcccatcttaatttctcgaggcagaagaagcaagaactagctagcgaggacgagggatggggagccgccatctttcttgtggctgacttcattctct

SEQ ID NO: 814 - DNA, 488 bp, Zea mays
  misc_feature (470)..(472): n is a, c, g, or t
tatgtactactatgtttatctttgggcttgaaactgttgtgttgtgatttccaggctttacagcttggacaagatgccaatacgccttttggtttttttaacggtcagagatgccagatgtgcctccggtctgatcctttgctgaaggtgatggagcgactggctaatccgggtgagtccgctctccgctggaacatggaggctgctgctgccccccgaacctgaagagcgatgtcttaacgtttttggtattttgttggccaggggtgcggcgggtgttcatagtagaagctgggagcaaacgtgtggagggtattatatcactgagtgatattttcaagttcttgctgagcttgtgataagagaagaggagcatgacggacatttgtttgtgatcaatagtaagaaaacagcagggtatgtgaagcaagctgccatggatctcgcatttcccctccccctccggcctnnngtcaagtaaggcagga

SEQ ID NO: 815 - DNA, 529 bp, Zea mays
  misc_feature (355)..(355): n is a, c, g, or t
  misc_feature (443)..(444): n is a, c, g, or t
  misc_feature (489)..(491): n is a, c, g, or t
aaatctgattttacttaagcagtgtgaggggaagtgggttggtgtattgttaagctattgaaggaattcaatccctggtattgtattactttctccaacgttaaatgttgtagttcgcctgtaagtgttccacatcgcctgttatcagtccgcaatccttcctgtaaatgttattaatgaaaaaaatacatcttgctatgttaccgatcgactcattccaatcacacattccgtcctgttgcaaacaaattcttgttttcattgtcagtcgtgctgatcgggaattgtttccagcatcttcctgcaaggaagtgttaattctgaatggttgtaccacttccgttgctatgagttnttaacttctttgttatgatctaatcctgagtgaattgtcatcttagatttctgaatggttgttgtaccacttccgttgctatgagttnnttaacttttttgttatgatctaatcctgagtgaattgtcatcttnnntttctgaatggttgttgtaccacttccgttgctatgag

SEQ ID NO: 816 - DNA, 508 bp, Zea mays
gcctcattcatcgcctctgcggttgcctctatattccatgggttaaccctaatagcaccgctcagtgacggtgagcagccaataaactctgacacaaccagcatgctcttctttggcccactcacctctgataccgactgagatcctggtgcaccctgcctacagacaacgtattcatacggtgtcaagttcatcccatccctcacagcagtgaccaccacacattccgctatcgtataataggcgatcttctcaacacttgacacatcacggccgatgaaaacaacagggctataccctgactggccaaagtctccattgatccgctggcagctctcctcaatctcagcctggatggcttccagatctttaccccttccacgggctgggttagcaatctgcactaacactgctctcccctgccacttgggatgtgtcctcaacatgttctcaaaggcgagaagcttcaaattgatccccttaaagatatccatatcatccacaccaa

SEQ ID NO: 817 - DNA, 456 bp, Zea mays
cctgcgttggctgttgtttgattgctcttgtccagccacttcgtggaggaatgggtcagggtcggcgccccggcgaagtccaaggtgctggccgaccacgcctcggcgcctttcgaagaccaatgctccatcctggagaaggtacgcactgcacacgctttgtctttgaccgcactgtacacacgcttgtagttgtattgtatgctgtgtgtgtcggatggatctctgtctgaagaacacgacgtttcgatctctgaatacttacctgctttcgtctttgcaggaggccgtcaacgtgtcccttgagaacctcaagtcctacccgttcgtcaaggaagggctggagaaagggaccctcaagctggtcggcggccattacgacttcgtcaatggaaagttcgagacatgggaaccctaagtggccatatacgtacaaatacgccccaccggacttat

SEQ ID NO: 818 - DNA, 428 bp, Zea mays
agtccagtactgtggttcttagatttctgtcataaaattataataactttctttgggggtctatgaacttattcttacacaaaattacaaaagaatatacttgaacaacaatgaaaatggcatgttattatagtcagacatgtgccagccaaactgtacatagtgatagtatttaacactattaaattattagaaagggataatgtgttcctttttgctaggaaaaaaaaactggactgagagcaacaccggtcgccgtagctactaaaactgtggtaagcaaaaggttcatccgccgcacatatcagcggcagtcgacctcagttggtagtaggacccaagttggaagccgcaaccttctcgacgtcaaccttcccgatgggaaggcgagccatctaaaagtcgcgttgctctttcatgttccttct

SEQ ID NO: 819 - DNA, 532 bp, Zea mays
agcgtccgttggttgtcggtagacgcgcatctgttgaattttgtgactcaccgtcgtcgatccgcagggtatcccctccctagggaccgtggatgcggctgttgcggctgtacgcattagattcttcggagtatgttgcggcttagattctccagagaaagatggagatctgttgtgcattgcggttttcggtggttgatccgtcgatttttttcgtttcatgttatgtctaggttagacctaattgtttaggtaacctcgtatcactggatgcgtatctccccagatggttcacgtttgcgtagaagcttgtgaatcctgggcttggtcatcttttttcttcagtggcgcgacgctgccaagaagccaagttcctggggcgaagagattgaggaacgggaactcgggtcgaggatcactattttttggaggcatggaacaaaggggctatagctccttgtatgctctatttgataaccagaacgccaaccgtaaaattttggaacgataatgtggaacgaggttcctgaaa

SEQ ID NO: 820 - DNA, 392 bp, Zea mays
agccttttcatcaagtatcacaccatcttctagcctggtaacacaaatacaaatgtcctaatccacccaaacgatggaaacaacggatacaaaatatattgtaacttagaacccccaaaaaatgcattcctcaagagacaagatttgtacctcacaagatggaaagttattttctcaattaatggcaccccatgtattgcaccctcagtggcagttgattcgttactttgtgcagtagatgttgcaaataaaccaaatcgatggcattccatgtacaggaaaaagtccttgcaaatatactcattgccagatgcaagaggaattgaataaagctgcttaaagaagctgtcaaacttctttgcctttggcggaagctcatgaggatcacattc

SEQ ID NO: 821 - DNA, 493 bp, Zea mays
ctggtggtaccaccttgaagagaagttcgttgaggaataacagtgcctctaatgttcacaatttcagtaaagctgatgtagtgcctgtcattgttcccagaactagctccggaggggagttggctactgattctagaagcgatgctgctgatgtggcacccgttcttccgaaggtaaccagaagggttgaacctgctaccgattctagaaaagaaagtaatgatgtggaacctgttgttcctagagcaagctcaagaatggaaatagccgatttagcacccatttctagttccaagtcaggcagaaggttggagtctgcccctgattcgaaagaagaaagtgctgatacagcacctgttgttgtttccaatcccagggctaatgtaagaatggaaataatctctgattctgcgcccgctctttcaaagtcaaacagaaagctagattctggcactaattcaaagaaagaaagtgctgatgcagtcattgtacc

SEQ ID NO: 822 - DNA, 398 bp, Zea mays
taactaccccttcagcatcatcaatggccttcgcacgactgttagccaaaagtggaaacttgcccacacgatagggaattcctagagccgtcacctgctcctcagtcttgccaacagatgcaacttctggatgcgtataaaccacaccaggaactgtgtcatagtcaacatggccttcctttccagcaatgaactctacgcaagcgacaccatcctcttcagctttatgggcaagcatgggaccagggatcgcatccccaattgcatagactcccttcacattggtcatgaagcgcttatcaacaaggatcctgccagctttatctgtctcaacgccaagagtttcaagcccaatcccagaagtaaatggggttctgccagcagagacaaggacaaca

SEQ ID NO: 823 - DNA, 549 bp, Zea mays
atagagtttttgaacattactccgaacaatacacataaaaggatcgagtctccgttacacgaaatcctggaggacgaatgcagctatgcacgcaggcccatggatcttttattttatgagctaaaatggcttcgagccgagccaaggttaccatggagactctacttgttctgcagcaaggacaccgctgccttatcagtgaaccaggtgaattctccatcttgtagcacagccatctcaacaggcagcaggtctgacgaggtttgcttgtctgagagcgccttctgcaccgctgccgcctttccagctccagtcaccaccatcgcaacgtatgcggatgagttgattactggaaacgtgaatgtaattctctctggaggtggctttggagaatccttaatgtatgtgacccacctctctttctcgttaacaagagggtggccagggaagagagacgcaatgtggccatcaggtcccattcccagaagctggagatcaaacctgggaaatccagtcgccgctgacatagaaatcacaccgttcttgaca

SEQ ID NO: 824 - DNA, 428 bp, Zea mays
  misc_feature (407)..(407): n is a, c, g, or t
  misc_feature (413)..(416): n is a, c, g, or t
cctgtgtttgcatcccatttgcttccccccctcttgcccatcccctgtgctgtgctgtgaactgcggccgggggcatccttgttggggggtggcgtaggaggctgctgacactactgcacagactgcagagcagggcagccatgaggcttcctctccctctgctggccctggtgtgctgcgccctgatggcgcgccagcattgcgctgcggcggcgggcaagggcaagacccggcacttgaggtgggagatcagcaacatgttctggtctcccgactgcgaggagaaggtggtgatcggcatcaacgggcagttcccgggcccgacgatccgcgcccgggccggcgacaccgtccacgtccagctcaggaacaagaatgcccccggccgcagttcacagcacagcanaagggnnnngggggggggggg

SEQ ID NO: 825 - DNA, 536 bp, Zea mays
gtggaaggcaggagccattccattggtgtaagctggcatcccgttgccatagccgccgtagggggcagcagggtagctcatgggcggggtggagtaggccatgggaatgccgacgttgacggtggctacctcctcagctgggtaaacatatggctccctgatcaccggcgggctccgggtgcagtacacgccgtgtccaaccggcctgtcgtaagggtaaggggaggctgtggcgtatgatgcgtggggaggggagggtgtggcgtatgatgcatgggatggggagactgtggcgtatgaggcgtgggatggggaggtattggcgtatgaggtgcgggacggggaggtgttggcgtatgacgcgtgggagggagactgggtcaatgtggtgggagctgggagagaagacacgcaagcattgttagtgagacgacctgccttggcaggaggcattgggcctccagtgctcgcacggatgcgcttggttgcagggccgccgctgccgccactggtagcgcttgatgctgccttcttct

SEQ ID NO: 826 - DNA, 408 bp, Zea mays
accctcacctgcaagagctggccgcttcggcggtggcggcttctgaaccaccaccgcgggcgcgcgtggtgcggatcctagtgcacgatgctgacgccaccgattcgtcctccagcgaggatgaggcaccgccacttcttcctcggcggaggtcgaggggtggtagcagcagcctgagcgtgaggcgccgtgttatggaaccggctggggcaagctcggccgttcggttccgtggcgtccgtcgtaggccgtgggggcgctgggctgcggagatccgcgacccgcacaaccgccgcagactgtggctcggcaccttcgacaccgctgaggaggctgccaacgcctacgacgctgcgaacatccgcttccgcggtgtcagcgccactaccaacttccctgcgacccgct

SEQ ID NO: 827 - DNA, 759 bp, Zea mays
  misc_feature (389)..(715): n is a, c, g, or t
  misc_feature (719)..(755): n is a, c, g, or t
acatcccttgcaggattgttgttcagtagattttacttgtaccgcggctttggagttccccaaaggactttacttgttcaagaacttcttctctgacaggaaataacatgtgagtgcagtccgtgcttttatctcttctggcgttccctcttaattaatgggaaaatgtgcttagtttgggtcgtgaaattcttacccgcttgagattttatattgaaaatttgaaatacaaacattagattaagggtttccttcaaatattccactcaaattttgcaaaattagatggctagttcatttggatgtcataagctaactatcaaatgttgcaaaatttctgattgtccctagattaattggtagctcgaatacctaaggcggaagatagnnnnnnnnnnnnnnnnnnnnnnnnnnnnnnnnnnnnnnnnnnnnnnnnnnnnnnnnnnnnnnnnnnnnnnnnnnnnnnnnnnnnnnnnnnnnnnnnnnnnnnnnnnnnnnnnnnnnnnnnnnnnnnnnnnnnnnnnnnnnnnnnnnnnnnnnnnnnnnnnnnnnnnnnnnnnnnnnnnnnnnnnnnnnnnnnnnnnnnnnnnnnnnnnnnnnnnnnnnnnnnnnnnnnnnnnnnnnnnnnnnnnnnnnnnnnnnnnnnnnnnnnnnnnnnnnnnnnnnnnnnnnnnnnnnnnnnnnnnnnnnnnnnnnnnnnnnnnnnnnnnnnnnntttnnnnnnnnnnnnnnnnnnnnnnnnnnnnnnnnnnnnntttt

SEQ ID NO: 828 - DNA, 360 bp, Zea mays
gccgacaccttgtacctgcttagaatcaaatttcctctagtgagtcaattccagaataataatatattcaatgcggtcttttgcaaactaagtcacaggtctgtttgaacagagtgttgcgtccatcacctctccagaataaactttccttccttgtatctctggctcttctcatgagcagcctcctagagaagagcatcataaaaacatagatgcaaggcaatatacgaagaacactacgaaataaccgttgcaaatcttacatatttccatccaacgatggatccacagccaacacagaagatatcagaaacagtatgcattcctgtcatcatcatgcgatcttcttttactccagaa

SEQ ID NO: 829 - DNA, 506 bp, Zea mays
  misc_feature (495)..(501): n is a, c, g, or t
actatatatatgttatgagtctatcagacatacatatgttaaatttgtcgctgatttaatcaaacaaatcctgttaactaaacgtgaaagtgtgagcttgtacacagtagctatacatattttgaggtctttgttttaccgatgtttaattttgctgatttttcaaatttctattttacttgtgttttgatgatgatcaccccaagatggctccatcctcattacaaacaataatattgcttcgtgagatcatcccattatagaaaatagagaaaatcgttccaaaactagatgcaacctaaatatttatggtgtcacgacggtgtcttgctaataataataataataataagcctatttcaacattggtatctaacaaaacagtagtatttgcttataaatggggaaggacgtaggcgtcacgccacagaatatataaatgcgtacgcgtcaaccacccactagcatgccgcctctttccgcaggataccagannnnnnntccga

SEQ ID NO: 830 - DNA, 511 bp, Zea mays
ttcataattggcaggtagagaaagacaagtaggtctgcaattgacgcatcatgcatgttttcaatgaactatcaactatcatgccagtaaatgctcacaacaattatgaagttgcttatgtcatagcagaaaagctatatgtgaacatttatccaatctttctttaattgacaaccaataggtaaataccaatgcaaaacaacatactacaattttagggcacttaatacattaacttccctaaaaattaatacacaaaggcacaactacaggtatcttgaggtaaatgcacattcgtgtcttacaagaaagtaaatagtggagaaaacagcaatagtcctgtactttccccagtacgaatctgctaaggttgctccaataagtggtgtaagataacaagttccttgccaggttgtgaagttcctggcagcagaaacgtttccttcatgtagtcttgttgaaaggtaagtgaccaaactttttgagattccatagtaggccaaacgttcac

SEQ ID NO: 831 - DNA, 426 bp, Zea mays
atttaggctggtggttctcctcatgcttgtcctggaaaaatagatcacagataattctgaattaaatttatatcttgatgcgtacaagcaaaatgttaggcaattcttaccatatagttgggatgtaaagcatgtgccatgtcagcagacaccaggaagctcctctgaatagctttttctagcaactgaaaattaaaaaatggtttgacattttctattacaacttggaatctaactgatacgaaaaactgcaaataatatggtaagatgaaaaaaatatataacaattctaaaagggtgagcacacgctactaagtaccttggaacctgaagagttaaaagacccagtaattcttgataaagcatccaacatggcaggggaaccagctccctgagcagaatcagacccaacttcttcatggtcaa

SEQ ID NO: 832 - DNA, 415 bp, Zea mays
  misc_feature (398)..(406): n is a, c, g, or t
gacctgcgtgctgtccaccaggtggaggcacctctggcgctctgtgccatgccttgacattgaccaggacgagttcaaggccgccggctcgaaccgcatcacagagaaggaacgggacgacttcgaggacttcaccgaccacctgcttatacctaataatatttccattgcgctcctggatacacttcgtctgcatgttagcgatgatgaatattatcatcgtggagcatcagttagatggatccgtcatggcataaagtacagtgcccagaatcctggcattatgcacaaggaatcgaacttagccttttggcgcctcaaaaaactacacctctccggtgtatatctggatggcagtttcatgaagcatgtcagttcagggtgcccgtatttggagnnnnnnnnnctcaaagat

SEQ ID NO: 833 - DNA, 347 bp, Zea mays
tgtcctgattcatatattcagttcccagctttctttctgagtatatatatacagtgtgtgagctctaaacaacattttttacatatcacattctactgattacagaaggatgataagcccttctttctgatcactatgacagttgacaataatacatctgtgttctggagagaaatcaatcaaatgtacaatctggtctcttaccagaatagatcatctatacccgcagacgtcgatggtgggggcacttcctcctcctcctccatctctggttcaggttccatgccaaactccggggactcaatatcagcaaggttcttcaagtcaacgacggatagctcgtctag

SEQ ID NO: 834 - DNA, 432 bp, Zea mays
agtaggctgtggagcttgatgatgagctcgtcctcctcctccgtgaagttgccgcgcttgaggtcgggccgcaggtagttgatccaccggaggcggcagctcttgccgcagcgcacaagtccggcggccttgggaagggagcgccagcacccctcgccgtgcgccttgatgtacgccaccagacggtcgtcctcctccttggtccacgcgcccttgttcgtgtgcgccttctcgcagcacggcgacctccccatcgttgctgcgactgcgagcccaagggtgggtgaagccaagcggggctggattttatagggcacttgactggatcgcgggagctcttctagagttggtggaaaagggttaggcctgctcccagctcatcacttccactgctttaaattaatacccaaacctgtgcctgatttggttaca

SEQ ID NO: 835 - DNA, 530 bp, Zea mays
tcttgccgagaagaacacgcgggacctgctggctcaaagagagcaagcagagaaacatgtaagacatttacacacaaagaacattctctctgtacctgcatttattcatagcattggtgtttatgtatttcagaggctgtctgaattcctggatcctgagatcaagagatggtcaaatggaaaggaaggaaatctgagggccctgctatccacattgcaatatgtaagcagctaaatttcatgcatccttaaacccgtaacatagaacatggaaaaggttatcacgtgtcgctctgtttcccctggcagattcttggtgccgatagtggctggcaaccggtgccactaacagatctcattacagcggttgctgtgaagaaagcttacaggaaggcaaccctatgtgtccatccagataaactacagcagaggggcgctacgatcagacagaaatacatatgtgagaaggtttttgatcttcttaaggtatgtgctctgtccacattgaatgctctggttatttggaagtt

SEQ ID NO: 836 - DNA, 276 bp, Zea mays
  misc_feature (256)..(260): n is a, c, g, or t
  misc_feature (265)..(271): n is a, c, g, or t
gggatgcacaacagcaaaggggggctactacgctcgtttcagagcacagagatttgtaaaaacgcgagctccgcaaaactccaacctactgccggggggcttagcgggcaccatgacaaaaacgtagcaaagcttctcaaagacggcgagtctagacggccgcgaagtactctttgcttcccttggggtcgggcttcatggacctctcccctggcttccaaccggccgggcagacctcgtctgggttctcctggannnnntgcannnnnnnatgaa

SEQ ID NO: 837 - DNA, 305 bp, Zea mays
acacacccgaggtggtgatggggttgcatacttggactagccattcccattcatctgtctgtactctgttcgactgttcctttgtgtggctcacacctgttgtgtttctgatggtggtcatttctccagccaggggcaaagaacacactgcgtttcgctgatcctttaattcagacccatagtccttttttttcttcagcacattctgatgtggctctttgtattgcagactgtatcatggtatcagattggtttcgacttgaaacccctctctcttcattacgcgtgtttctgatcttcttgtt

SEQ ID NO: 838 - DNA, 335 bp, Zea mays
  misc_feature (152)..(154): n is a, c, g, or t
ttttgactttttaagatgtataacttatgatacgcatctgtcatctagatatattttattaatatatgtcttataatttcgacacgaaggaagtatctaagctagctccataagtcaagttaacgatgctgcaagtcgcgcggagcatgtannngtgtagacttatctcagtagctagctggctataaattcgctccaggttcctcatccttttctccattcaacccgcttccgagaaagcaattaatagcactcgatcgatcgggctcaccacgtccagctctcggtcctcgtctttgctgctagcagctagctagcttcgcgatcgtgctcaa

SEQ ID NO: 839 - DNA, 497 bp, Zea mays
attttgttgcaatctgagactaacgaaggcaaaaatggagccatacacttgtatgtcattggcccaatattctttttacagaattccttgctattagtatttgctgttgaattcgtgcttaaacttgtttatgtatatgaatttctctgcaggctggcacttgatttgtcgtctctctcaggcggtgcgcctggacgaacaaggggccttaagataggctcagttaactccttttgacaagggcttatattggcgttttagatgacccaaagcattcttcaaaatgatacagcagaagcactgacttgaattttggatcaattcccatgagctgatatcttcaaaaacatcttagttaggaaaaagaaggaaacgaaaatggaatttatttccatttgttatttgtttgggtgccacaaggaggcaaaatcatagcaaggaattgtaccttattttttttagggattgtgtacttttctgctgttgagaggtatttg

SEQ ID NO: 840 - DNA, 402 bp, Zea mays
aggagcgacagcgctggcggcctgaggaagacgccgtcctgcgcgcctacgtccggcagtacggcccccgcgagtggcacctggtgtcgcagcgcatgaacgtggccctcgaccgcgacgccaagtcgtgcctggagcgctggaagaactacctccgccccgggatcaagaagggctcgctcaccgaggaggagcagcgcctggtgatccgcctgcaggccaagcacggcaacaagtggaagaagatcgccgccgaggtgcccgggcgcacggccaagcgcctcggcaagtggtgggaggtgttcaaggagaagcagcagcgggagctgagggacagccgccgcccgccgccggagcctagccccgacgagcggggcaggtacgagtggctgctcgagaact

SEQ ID NO: 841 - DNA, 399 bp, Zea mays
ctctccgcctccaggcgctacccggcggggacgtcaagctcctatgcgacacagtcgtggagcatgttcgcgagctcactggttacgaccgtgtcatggtgtacaagttccatgaagacgagcacggggaagttgtcgcagagagccggcgcgataaccttgagccttacctcggattgcattatcccgccacagatatcccccaggcgtcgcggttcctgttccagcagaaccgcgtgcgaatgatcgcagactgccatgccatcccggtgagagtcatacaagatcctgggctgtcgcagcatctgtgtttggtaggctccacgctacgcgctccgcacgggtgccatgcacagtacatggcgaacatggggtcaattgcgtcgcttgttatggcag

SEQ ID NO: 842 - DNA, 391 bp, Zea mays
tatgcaccaagttaaaaccaggaatttgcatcagttatagaaccagcccaccaggtaatgcacgttaaaaccagcaatttacatcacttataaaatcagaaggcaacgcaagcgtattagcccgataatgcaccaataccagcaacttgcatcactaataaaatctcgacttgcaccctacagtttggtggactcgaattgcaggacttaagcacagccttttaaagcacacaacctgtgaaccgaaccaacggagaccagataaaaggtaagtgacaagaacatgctgcagccacaagatcatagatctactagtttcagctggatacagcaccagaaattaagaatctaggcaaacggaaaatgggttccgattcaaccatagacaaag

SEQ ID NO: 843 - DNA, 384 bp, Zea mays
cagcatggctacacactgttccacaccggcaacccatgcacacttgttcttggttgccagattggaacagctgaaatcacacgactcatacggtcccaaatgcaacaggactacgccgctgtgctccaattgacagacgactaaacgatcatcacgccagcatggccggggctgcttcttcatctttcgccgaagcttctccgccgagcaggtgccgcgtcacgtctgctccctgcgccagctgatcctgcagcaggttcctggcgcccttcttctcggcgctcttgccccacagcacgaagtagaggccgatgacgatcagcacagctccaatgatcctgcagccaaaattagatatatagacgccaaattaaagcacatgtc

SEQ ID NO: 844 - DNA, 480 bp, Zea mays
  misc_feature (353)..(362): n is a, c, g, or t
attatggtgttggtgaagctcactttccgtccttgagagtcggtaaccctaccgtcgtccagtatttgaaggaagacattgaacacatccgaatgagctttctcgatctcatcaaacaagacgacggaatatggcctacgacgaacagcttctgttagttgaccaccctcttcatacccaacataacctggtggagcaccaatcaatcttgagactgaatgcttctccatgtactcgctcatgtcaatcctgacaacagcttcctcagtgttgaacataaaagctgcaagggctttcgctaactctgttttgccaactcctgtaggtcccatgaacatgaaactagcaatggnnnnnnnnnnaggagttggcaaaacagagttagcgaaagcccttgcagcttttatgttcaacactgaggaagctgttgtcaggattgacatgagcgagtacatgggagaagcattcagtctcaagatt

SEQ ID NO: 845 - DNA, 732 bp, Zea mays
ccaggattccgccctatccatcccatcaacctcagctaaggtccccagcggcggcgaggcgatggcggcgcctgtgacggtgtacgggccgatgctctcaccagctgtggcccgcgtggcggcctgcctcctggagaaggacgtgccgttccagatcgagccggtggacatgtccaagggcgagcacaagtcgccgtccttcctcaagctccagcccttcggacaggtccctgccttcaaggaccacctcacaaccgtctttggtacctccacctctcagttcttctactactattgttacatatcaagtaatatcttttgggttttaagcattagtattgcaagagcacatgcaaatctcactttttttttcacttctaagcttctttcgtcagcaaagatgcaataagaatacagatctgcagttacgtgttcaagcagaaatgcatacttttgcaaaagggcaaattaattgctgaagcattaggatatattctaggagttaccagtgcatatgcatgcctagccggtaaaagaaaacctaagagatcttactatcttagacggccaatctctttactctctgtgtatggtgttcatctttgacagagtcaagggctatttgccgttacatatgcgaccagtatgcggactctggtaaccaggccctcttcggcaagaaagaagacggcgcggttggccgcgctgccattgaacagtggatagagtctg

SEQ ID NO: 846 - DNA, 392 bp, Zea mays
catcaatccgatgttgtacaggcacctgtacgtttcactgttttcttctattctttgaaatggaaaacaacctaggcgccaagtcattcggcctcaaacccccccgcccaagcattacccggaaggaaacattagagccatcaccaaacataataatgtatgtggatgccgcaaagaacagtctatgagcctactgttgttaacccccacatatatgctacgtgtttgtttctagtaaattttacatcacgaattcacgattgacgcatatattttggacgggagttcattatgggcggtgtagatatggccgccatttacgctttgtttcgaaaaaaggaattttgcctgcttctgggcttttgggcaggcatagttgcgggtataattaa

SEQ ID NO: 847 - DNA, 416 bp, Zea mays
atcgcttccttttacggagtaccgcgcggtcatttgctagttgtcagtgtaacagtcgatatgctctgtcaagacaagacagtgtcctgaaggcaaaccctgccatggctttttgtgtctgtttcagctggtggagaagatgatggagcaggcaagggagaatgtgagcgccaagaaggtcggtcccggactgcgccggtggggcagcgccatgtggtgaacttgtgacgagtgagactcgcgttgtgcagttccagttcgattggcgcttgcttgcttgcttccatggaaagtgctgtacctgtcggtaccagaaccattggtaacagtacgcgatgtgattgacgcatacgtctctgagggactaatagatatatgggcaagagcttccgcgttggcctgctattgttcataag

SEQ ID NO: 848 - DNA, 459 bp, Zea mays
gccgagcttctccagccacagcttcgaagctagttcatccttcctccagaccgcgccttcataccatgcacaccttcatctcaaagtcgaagcctcctaagacagtatgttatactgtaaaatatgttagttaagtttttgaggaccttcggtagaagaaagcccccaacagtagccccttgcagtattaatttgtttttgtatttaacaaattcagactgcgatgtgaacgaatgcctttagccaaaggtccaaaaaaacaccttcccttcgctagaatagcgaaagtcaatgacatgtggggcccgccaagttgcaatgcactgggcatataaataggaacccgcaacgacagcatttgttgcgccatctcaatcgtttgtgctatttttcaagcttggattttcttgttagatttcgcttgatttgtgagcttcggtatttgaataagcgctcacc

SEQ ID NO: 849 - DNA, 454 bp, Zea mays
cagattctctgcggtcagctcatgatcttttgagatcagagacactcagattagaggtattttcaggatgcacacaagttatcttccaacatatcaactgtttaagactggagaagtgagatcagagacactcagattagaggtattttcaggatgcacacaagttatcttccaacatgttttagattttaatatcaactgtttaagactggagaagttcatcttcctcatttgcagaaatattgtttatacaatttaagttaacatttattgctacttacaagtaggtttgtttttggaaccagctccaaagttcagtagattatttaatagtctttattaatccatatgaatcttagaatggtcaaaaatattgtagcaatttggatattaggttggatttttttgactggcgattaggttggatttggataaggggtttctgatattgctg

SEQ ID NO: 850 - DNA, 387 bp, Zea mays
tattttcgtttttattgcacgcgtgcaataaattggatgccatgattcacgtagagtataaattcttatacaaaatcgtataaatacttacaccgtgtaccataattgataaaaaatatatcatcggttcaactaacagccccgcaagaattcgggacaattttatggcaaacgtagaaatcgtattcatcatagtaaaaataatcacttgaatgcataaatagtctaagtagtagacataaaacataatcatcgatgacataagcattgatcggatagctcgctggaagaccattccgaggccgccagatgaaaaggacgcctcagaggccattagatcgaagatggtcgtcggaggaggacgctcgagatgtgccgcatcggagg

SEQ ID NO: 851 - DNA, 496 bp, Zea mays
  misc_feature (491)..(491): n is a, c, g, or t
ggcatcctccagcggtgcatatccatcgccgaaggccaggagctcttacaagaaatacactcgggggcttgcggtcatcacgcagcgcctcgagcccttgttggaaatgccttccgacaaggtttctactggccgaccacggtggccgacgccactaggattgtccgcgcctgccaagggtgtcaattctacgcaaggcagacccacctacccgctcaggctctgcaaacaatacccatcacctgggcgtttgctgtgtggggtctggacctcgtcggtcccttgcagaaggcacccgggggctacacgcacctgctggtcgccatcgacaaattctccaagtggatcgaggtcctacccctaaacagcatcaggtccgaacaggcggtggcattcttcaccaacatcatccatcgctttggggtcccgaactccatcatcaccgacaacggcacccggttcaccggcagaaagttcctggacttctacgnggatc

SEQ ID NO: 852 - DNA, 382 bp, Zea mays
cgctgctggcgatggagtagagcctgaccttgtgtggcttgccgttcttgtcaacgtcgttggcgatgacgccgatggactggccctcttgtatggggtcttgcctgtgtttagaccatgctgaagaaattggttcctctcttccctgtccctgtcagagcggcagtgaccaatgggggcgcgagcacttggcgatgaagaatctgaaccgaaggtcgcggagcaggcgtgagtcgttgaggaggtggagtgcgtggtggaattggcgacgtgggaagagacggtaccgttggttggtgctcatcgggacgtgtgagtcgcgggcgtcgcacttggggtcgatgacagagaagacggtgtagaagagcatgaaggtgtcgaa

SEQ ID NO: 853 - DNA, 409 bp, Zea mays
  misc_feature (400)..(405): n is a, c, g, or t
aactctaataattgtattgtatctatcgaaaactagcatcgtgaagcttacaagcacagaaggctggatttccaaaaaaaggacataatcatacttaccaagctttgtccctacgagaattattggcacaccaggtgcataatgcttcagttcaggtatccactgaaaataaaaggggttcagagtcagcaaacaagaagtttggaagccatctatggattaatcctattcaaaaatttgattttggacatcagtttccactacagtttagtagattttattttaccaagaaaaaagtagtcactcagaatttggtcaagccagaagcaatgaattttatcaaataagaagctaaatgaagactgtctggtaaatgaactaaaacaagatgcccagagannnnnnaaat

SEQ ID NO: 854 - DNA, 447 bp, Zea mays
  misc_feature (398)..(400): n is a, c, g, or t
aagttaaattcttttgaaatgcttgctaatgaaaatgccaatgctatgtactcacgtctcaatattcttgtagaggaagtaaatggattggggcttactcaaatctcacaaccggatgttgtgaggaagattctcagtgtcctcccaatagacaaatatggacacattgtcactgtgctacatcaaatggatctttcagttaccacacctacacagatattgggaaagatcaatgctcatgagatgtacatgcacatcaatgacaaagaagagtcatcttccaaaagaaaggatttggctctcaaagcaaatcaagaaagaaaaggaaaagctaaaatacaaattgaggaagaatcctcaagtgatgatgaccttgatgctaacattgccttgatggnnnggaagaccaccaagatgttaaagaagctcaacagagaaggcatcaaa

SEQ ID NO: 855 - DNA, 400 bp, Zea mays
agttagttagtacaaatatgagaaataaagtcacactaccaaatttaaggtacgatcctatgatatatcatttcattttggattgagtgattttttaaaccaaacaaacgtgtgccaagagatttattgcgagcagaaaacacgtgcgaaaccgcttggtatctgccagtatcttaactccagtgtaatttttgagtttcatttcccgctttccttctctttacaggagctgaacgctcatttaggtgagctgcattgaagctcgagggagatgccgatataaggcagcgggacgcttcaactgaagggcaacacgtccacaatgctggccaccacaagcatcagctcccacttgcatacagaattcccaattgatcgaggatcagtgaggtttagacga

SEQ ID NO: 856 - DNA, 501 bp, Zea mays
aagcggcggcagcggcagcggcacgactgatccgaaagggcaagagaacaacgttcaggactccacaggctcgcctccgcagcaggaggtcgcggacaccgaagactcgtcggcagacaaacagcagggcgaggcgggcaacccaaaggagaagctcaagaagcccgacaagatcctgccgtgcccgcggtgcaacagcatggacaccaagttctgctactacaacaactacaacatcaaccagccgcgccacttctgcaagaactgccagaggtactggactgccggcggtgccatgcgcaacgtgcccgtgggcgcaggccggcgcaagagcaagagcgcgtcggccacttcccacttcctccagagggtcagggccggtctgcccgtcgacccgctcgtctgcgcggcagccaagactaacggcacggtgctcagcttcggctctgccatgtccagcttagacctcacggagcagatgaaacagctcaaggagaagca

SEQ ID NO: 857 - DNA, 357 bp, Zea mays
ggcagatcaagcagctgacatgggtgcctgcctcccagtcatggatcttgttctggtcccagccaaggacacagtgtgaggtgtacgcactgtgtggggcctatggtagctgcaacctcaatgcactgccattctgcaactgcatcagggggttcagccagaaggttcagagtgattgggacctccaggattacagtagcgggtgcaaaaggagagtaccattgcagtgccagaccaattcgagctcttcacaggctcagcctgataagttctataccatggcaaatgtgaggctacctgataatgctcagactgctgtggctgcgagctctcaagactgtcaagtggcttgtctga

SEQ ID NO: 858 - DNA, 421 bp, Zea mays
cgtctgagggttcctgccgcccggagctagccctgccgaggatgcatgcgtacacgtacgtgtgatcgatccggttagtttccacccatcttccaggtctgaaatggaacgcctgaaggcgaccgcgttccgtgatcccaaacccaaacaggtggcggtctcgctcgggtgcgtgtggctcggtccacctccgagccccggagcagccacttggcgtgcgcgtcatgccccgcacgtaacccgccgtaaatcgtcaaagcttgccataattgggggttcggttttcctcgaggaagcgcgtggagatcactggagttctcggtactacaagactctctgggccggcaataatgcagatgtttcggcgcgctctctgttgctttcatggattcaagtggaaactaaggcttggacttggagt

SEQ ID NO: 859 - DNA, 535 bp, Zea mays
gcttgctacgcacgctgacgactgctccacaaatttcatcaccatagtcgaattgttcgccgatcatagccaacagctacaagaaacagtgtgtaagggtggaggactggaggctataagcctataataaggacagatgtcaagaacaaaactcccttttctgataaaataaaactgcttacggtgtgcagccacagcgtgtcagattttcctcttccacagctgatggtccatttaccgccattagcacaaatagggtcttcccattttggctcaatcttgttcttgaagcaatggaagtcagctccgccaatcaacttgctagggtgatggatattattgtagaggctgcgaaatcacagatccattagatggaatatatttatagacgaaagccaaagttggatggggacacaaaaggaccaaaccaaagatagatcagcacatgtctgacacgggattagaccaagagcacttatcacaaggaagagaggaagggttattaaatatcagaccttccaactttcgatcacac

SEQ ID NO: 860 - DNA, 217 bp, Zea mays
cagtcaccgggttgacgacaaccacgtctaccccgttctcctccgcaaacctccaagccgccttctctgccagcgtcttggaaacagggtaccagacctgtatttgttcttattattattattactgttgctattattactacagtccatcacctgacctgagcaaggccaggcgccacccatgtcgacgtcggtcggtatgtccttgcaattatta

SEQ ID NO: 861 - DNA, 378 bp, Zea mays
gatcgattccgtggagacgagtagagagataaaaggagtgggggcaggatgcttatatatacacacacgcacaccacgagcgaagctacggcgagagaaagaagagagctattgtacagtagtggctggcacacacacactggaagtctggaacacagtttgaccccgggagaatgctgagctaataatcaacggacaacggcgacgtgacatatgttacatccacatgcccttatgggcacagcacagatagatgggtagatgtgcacagcgcggcaactcaaaagggacgggagaaacagggccgggagaggccaacccgcaatggcgtgtctcacgtctgaacccgatcgacgggtttggtagctagtctggatt

SEQ ID NO: 862 - DNA, 480 bp, Zea mays
  misc_feature (223)..(224): n is a, c, g, or t
  misc_feature (233)..(237): n is a, c, g, or t
  misc_feature (239)..(239): n is a, c, g, or t
ggtttgctgacgcagtggatctaaacaacgacgcgctatctcctgcttctgcatatgacatctgcatcaagttgaaggagagaggcattttagcgaaacccacacatgacactataatccgacttgctcctcccctcacaatcaggtatgatccttcacctaagtactttacagtcgagtcacacccttgtgattatatgtttggaaccaggaactgttcacnnactgatacnnnnngnatataatcacaagggtgtgactcgactgtaaagtacttaggtgaaggatcatactacctgattgtgaggggaggagcaagtcggattatagtgtcatgtgtgggtttcgctaaaatgcctctctccttcaacttgatgcagatgtcatatgcagaagcaggagatagcgcgtcgttgtttagatccactgcgttcagcaaacccctcccgcgcacttctcttaggatttgagggaatttct

SEQ ID NO: 863 - DNA, 456 bp, Zea mays
  misc_feature (374)..(376): n is a, c, g, or t
  misc_feature (445)..(447): n is a, c, g, or t
ctgccatgggatgggagaggaacgacgacgacaagcggacatgtaaaaattgtaaggacgccttgtctctctgtaaacaaaccagaaggccaacatcatgatagcgcagcatgtacagctaacaaccagactaccagaggttctgcaagcagggcacggaaaaaaaatactcctgaacctcaaccactttcacaagcatgtacaacctcggcgctgttcatcgctgctcccgcagtgagttgtcaagcattgaacttccgctcttcatgcgcgggctattgctatcgttcgatgggtttgtacaggacgagggttacatatttggactcgaacctgtgggttaggccgagagccaccagggggtgggcgccccnnnccttctctatgaagaggtgattgaggactatgtgctgcggccgcgcgcagctttcttccgagttctgtnnnttaaggacg

SEQ ID NO: 864 - DNA, 240 bp, Zea mays
tataggactgttgtcccttagtcaacagggactatgaagcaatggctcgtgattattatgcactagatttcttggaacccgatgtagatgtttccccgattgtgcctgctctcaagaatttttttgatgatgcactaaatgcaacagtgagtgagctgaacttcaagacaatagttgatggcctaggtgctgttctctatcagtacccattcaatggtaagcttggcattgtacaaatat

SEQ ID NO: 865 - DNA, 543 bp, Zea mays
acgaggttggcgtgcttgatcaccccgagcgtctgcacctcggctctgaactgcttgtccgcctgcccgctgcgtttgagcctcttcacggcgacggcggttggtcctgccattgttcccctgaaaacgcttccaaaccctccctcgccgagtttgtcggagaagttccttgtagccttcttcatctgcgcgtaagagtagaacgcgagagaacctcctgcttcaaactctctgcgactgcaagtaaatacacctctccaggtccgggatcgccataggagcgccagtatcactatcacggcagccaacgctactgacccgaccaccatggatacaatcagccctgtgcgcagaccactcttgggcctgagcttggagccccaacgaacataaaccttgctgtatggaggaggtcctctggaagcgaagctcaggttgtacaggttgtagtaccacagcttgcatccggagtgatacgcatacgcatacgcgacgcagtagcatctgctgagacaggcttgtttgcagtcttcatcagttgct

SEQ ID NO: 866 - DNA, 366 bp, Zea mays
atacgaatctacagatgaatgcttctggacgctaaaaagaattcttccagtactaattagctccctgtttttaggctgctattatatagaacgtatgaacacttcaacagggcatgaaaggccgaacttaaaatactgctcaacaatggcagaaagtcgctgctcaggtttctgcatctcctgaatttcttcagaagttgtgctgcaagtacaggttctcttgtggtgaagccggagcgatttcttcctccagtgaccgcagtccgtcacctatgctgctcccgacgttcctgccgtctgtggcccttcgaccaacgatgtcagcttcggatgcagatgatttcctcctctgtgatgaggtcacag

SEQ ID NO: 867 - DNA, 362 bp, Zea mays
tatgagccgcacaggtgctgggaggatatctttgatgctataagcaaggctcagcatttgatttacatcactggctggtccgtgtacacagagatcaccttggtcagggacaccaacaggccaaaacctggtggtgatgttactcttggggagttgctcaagaggaaggccagtgaaggtgtccgggtgcttatgctggtgtgggatgacaggacttctgtcggcctgcttaagaaggatggcttgatggctacccatgatgaggagactgcaaattacttccatggcacggatgtcaactgtgttctgtgccctcgcaaccctgatgattctggcagctttgtccaggatctgcaggcatg

SEQ ID NO: 868 - DNA, 351 bp, Zea mays
tacagtgccatcggttcgtgaagccgtgacaaaaatcctcaagcccaatcctgagctcgctgactcgatctataagaagtgtacgggcctgagcaactggtacggtgtaatcccagcactctggccaaacgcaaagtatgtgtacggtatcatgacagggtccatggaaccgtatttaaagaaactgaggcactatgctgggcacttgcctctgataagcgcagattacggcgcatctgaaggatgggttggtgctaatataaaccccacacttccacctgaacaggtgacatacgctgttctccctcagaccggttattttgagttcattcctttggaggtggagaatag

SEQ ID NO: 869 - DNA, 356 bp, Zea mays
  misc_feature (293)..(296): n is a, c, g, or t
  misc_feature (332)..(353): n is a, c, g, or t
attgatcttaatgacatgatttgtggtactttagtagctgcaatgcaacagttcaattcatccataagcaaaaaaaggactccagttctttctctttttatcttactactttgtatatttctgctaaatgaaaattgccaatgccatcaaatgtattggagagaatgagttggatataaacagcccacggggcaagatacataagcccaatgggcaaaatacataaaactctaacaaaatgttctaatttgtttatttctgtttgcatgatatattttcctgtgtcatgaagnnnnacctgcttctggatgtaagtacattttgctttcttnnnnnnnnnnnnnnnnnnnnnngga

SEQ ID NO: 870 - DNA, 454 bp, Zea mays
ggagtcctcggcttcaaacctgcaccgatcacacttgcattcgaacccccaagctctcgatgcctccctgcgcttgctcaccggcacaagcacatcaaagtatggaaatgtgatctcctccccggctttgatgtccctggacgcgtggacgatggcatggtccccgatgtgagtgcgccgagcattagggtggcaggaatggttgatgaacgacggcaagacccagagccccacgccgcaattgacgacgccattgttaccaagcacatcggcggctggcgcgtcctcagtcaagcaggtcacatcgagcaccttcaagatcctgtccatttgaacagcctcctgtgtcctcgtcgtcttccccgcggtagtaccatcactgagactgtcatcctctgtttctttcctgaacattgccatgtcagggacggcaagctcgtcctgcctctcctgg

SEQ ID NO: 871 - DNA, 340 bp, Zea mays
ggttcgagaagacgatccggtacgcgtcccgcaaggcgtacgcggagacgcggccgcgcatcaagggccggttcgccaagcgcacgcccggggctggggaggacacgctggaggagcacgaggagatgtactcctccgccgctgccgccgtggctgcgctcatggcccccggcggagccgatgcggactacggcgtcgtgcccacatattgatctatgcaattgcaacgccgacatgtacactagttagcctcgtgctctggggctgtaatttttgctgcatgcattgcatgcaaagctcttattgattgcctgtatgattaacggaagccattacaagc

SEQ ID NO: 872 - DNA, 354 bp, Zea mays
gaagctgtggttcgaatggagcgagcactgtactacggaagacttcaaacttggtcaaattgatattgatgactctggggacgaactgttggatactaaagcaatccgcaaggatatcaaagcgctgtatagaaggtgagcttccctccttcccttactcacaattgttttgcatgctagttgcctcatctagtgcctttgtaggtaggtaacaagctttgtggccactggacaccatgtacatattgcagtgctgaccgtcgagctgatccttaaactgaagaaagaggtgacggtgggtggctctacgatcatgaaaacgatgtttcctgttccatttcattgtatggcagc

SEQ ID NO: 873 - DNA, 502 bp, Zea mays
ctaaatactggtcgagtcaaacaccgtacgatcacacagcgagcgtgcttcgatttgcagtctagccacagggcgtgagcttcttgttgccagcgccgcgagggttgtcgtccttccagtcgtcccacgctcgtgccttggcctcctcggcatcctcgtccccgccctccccttgcggcatcgagctgctgctgctgtcgccgcccttgtgccacgcggagtttgcttctctcatcatctcggcggtcctctcttgccacctctccatcatcttcatctcgcgcaagccagcctcttctatgctcattgttggcatcctgtgattcaggcgaggacataacatgaaaaggaaaacgaatcagatggcactctcgtaagctcgctgttcatgaccctcaaaagcgtcaagaatacaggggtaggaattgtgacaactagtgctcattcaacattcagaaacaacattatcattagcacaaacacatgccatagaaaacggtaa

SEQ ID NO: 874 - DNA, 352 bp, Zea mays
caagttcaccttttacgatgtcgacgggaaggcgctgtacagttacacacggtcgagcctgatggaaacaggccaccacctccaagcctccggctacgtcaacgaggaatgaagcaggggcgagtcagcatgcagcgctggagaactgagatcgatatatgcagttcaagcgtacgtataaattctcgagtgcttgatgtggttcatctgtcaagggcaacaacagttaggtttatatgtgtgcccttgcatctctcgacatctgtcactgccgtccggtactatttggggtcatgccatcgattcgaaaacatgacatggtaggggcagccatgatgtagcaaaaaaaaaa

SEQ ID NO: 875 - DNA, 299 bp, Zea mays
ggagacggcgaagatccagtcggccacccggccctgcgtggtggcatcgatgatgatgccgatgccgacgccgacggggctggagatggcgaacgcgaaggcgtaggcgaagcaggagaggaggggccggttgggcagcatccggagcagcgcgatgcccatggcgatggccgcgaagatcttgtgcaggcttatggtccacagcgccttccatgcgtcggccttggtctctgcaggttcgataattagtagtagttaggtaataaggccagacagagtctcagagagctgctagcgct

SEQ ID NO: 876 - DNA, 526 bp, Zea mays
tacaagctcttgccggtgtctgtggtttactaagatcatggttcatcactgttcactaaacttgggaatgttaaacacttaaaacaaatctacccatattgacatcatgtcttgtgcatgtatcaatttgtgtgtcaccctagttaatttccttcagtagtatccaagactataagaaagtacatagcataccatcatcatcttcatcaacccatttgtcccaatcaactttcacaaagtgaggtgccctttgatcatctcgaacgagtttcttccaccatttggcttcagctttttctacgatacagaatatggacctgacccccacacttattttgctagcctgttatattaagaagcattgaggggcagacaactttaaacatcaaaggtttaaactaaaccaatacacattaatattacatgaaattgcattacctcaacgtttactttgtcattcagatctagtttcaattcatacaagtttgtaccagcgctgccagagaatgtgaagacaccatctgga

SEQ ID NO: 877 - DNA, 359 bp, Zea mays
gcagctcaaagcattcgtcaagcaggatcaacaagggaccttgttattcttgttgatgacaccattagtgaccaccaccgcaaggggctggaatctgctgggtggaaggttagaataatacagaggatccggaatcccaaagcggaacgtgatgcctacaatgaatggaactacagcaaattccggctgtggcagcttacagattacgacaaggtcattttcattgatgctgatctgctcatcctgaggaacattgatttcttgtttgcaatgccggaaatcaccgcaactgggaacaatgctacactcttcaactctggggtgatggtcattgagccttcaaactgcacgttccagtt

SEQ ID NO: 878 - DNA, 281 bp, Zea mays
acacactacaaagaagcttgaattggtgcttgctgagtccacttcctacactgtcccttagataaattgaagccttggcaagagatgacatctcatcaaatgaaacatagcatttaacaaaataagcatacacatccaggagcagataagcaacagcaggggccttcaaaaccagcgtaattctgttgtaatatccatcaataattgttaaactcttcagcgtgggtgatgtaatcccagaaagcccattacatttgcaattttccagaatcaagttcttc

SEQ ID NO: 879 - DNA, 516 bp, Zea mays
tctgtgtgtacccagtcccggccttgtgctagtaagtagcaagcagtgttaccttttggtattttaaccagcagctaagttcgcggcattttagtccctgtaagcggtaagcagctctgtagcgtgagatagatggccaagcgccggtacgtacgtgtagtgtctggtcttctcactgagtgtactataaagagttaatataggagctgaccctgtgaacccgcgtgatggatgcatatgcttagtgcaaacctgcattttgtctctatttgaccatctgtacacgcatgatcgccttgcttgcctggtgtctggtctgctgatggcagcgcaaagcgaaaggcaaatgcattgaagggaaggcaagtggaggttggagttgatgctgcggggtgcgggcgcgatttgctgtccctttccggtgtgcggtgttgactgacgcgcgcgagcacgaaactgggggaagtggtggtgccgctgagctattttctgcagtggaaggctagagaggaaggg

SEQ ID NO: 880 - DNA, 372 bp, Zea mays
gctccgggtcgacgacctccttgccggtaccctccctgaccttcatcttgacccagccgacgaggttggtatccccgaagtcctccttgtccgtcggcctcctcccggtcaggagctccaggaacaccacacccagggagtagacgtcgcccttggcggtgcaccggaagctctggtagtactccggcggcacgtacccaggagtccccgccagcgtgctcacgctcaggtgcgtgtccagcgcgctgatcagccgagccatgccgaagtcggcgacgcgggcctccatgtcgccgtcaaggaggacgttgctggacttcatgtcccggtggatgatgtgcgggatgcagttgtgatgaaggaagcagagac

SEQ ID NO: 881 - DNA, 359 bp, Zea mays
cgaccttggcggcgacagggaggctggcaggagcgtgatgaggactctgagcaggctgcatgatcccatcatacgggagaggatccatgagtgggacggccttcgcgaacgcggcgagaagagagaggtcagggatttccttgacgcgctcgtctctcttgtggattcgcaggggcggcctttcttgtcgttcgacgagataaaagcgcagacagcggtacgtaagatatactcctacgactatacgattattcatgcatctaaaagaattaagttgtatgtgttttgcattattcatcatcatctaacgttgtgccattcatgcatgcattgttatttcaagagatgatgtttgcaac

SEQ ID NO: 882 - DNA, 1039 bp, Zea mays
tttaatatatttatttatttatgtaatgtatttgtatgttatcttaaatcatatcagatagatagttatacactacatttatgttatagagaaacaagtagaagagcgtgctataaattgtacattagaaaagtaacatgtaaatctatagaattaatttctatctctcgccccatgaattagagataggcttatatatacactttggaaagttgtggaatgtcatattctaaaaaaaatagcctattgcattagttaaattccaattacttaaaatgaagagaaacaaacgggccctaagagtaaaatgacacctattcagaagctgaaagtaacggtaaagggaaaaaaaataattggtaactgcacatctgcaccaatcaagtaggggggataacacttgttagcaaaatgagggtgacattctgatgaaattgtattgaagaactaaagtaccttttgcttctttagcttctcatttgcctcttctaatcgagataccttgttttccagctcattagtgtaggcctgttgatgatgcttaggttaagaacagcatcatcatttctaaaattttactcacaggtcaaaagaaaaattagcttaatcaataagctaaaacatacaaaggcagaaacatatattgcaacctgcttcctagcccttgaacgagcagttgactccctattcttgaccgttaggactgggcaaaaaacccgaaacccgaacacggaatacccgaacccgaacccgaaatacccggaacccgaatttttttcgggaatttcgggtagcaacttacaaaacccgaatttatttcgggtaattcgggtatcacaatcgggtacccgaaatacccgaattacccaaactttcatgtgtcatgtactcatgtcatgtttaattattagtttgtacatctataattatttgtaaatgtgcataacttttaattgtagattgcttgtgttttatatgtccacgtatatcattattcaaactatatttgtatactatattaatagggtgtatgtgtttt

SEQ ID NO: 883 - DNA, 371 bp, Zea mays
tttgatcgggcgccgtttgcccgtagtgtacggtactaaggacagtgtttggcaccacaaaaagggtcggaaaccaaattcattttcagcagcgactgggtccagacggaacatttctggaacccaaaaacggacacgtacgtcttctagcagcgttggcagacgtttacaccgtatcgcgtaaaaaaggttgaagcttgcaacacggccccctttggcgcttttagaaaattacaaaactacaaggttacagcaacaacctgtcatgtctgcctcttaaaaacgctgccaatctgcgctgcgacagatgaggctcaaatatgaatcgattcgaggcatgcgtcaaaactaccgaatgagaacagccagta

SEQ ID NO: 884 - DNA, 448 bp, Zea mays
gatggccaatgcaagcatggtggttctgtggagcgaagtatcccaaaggtgtccagggaagtttcagaagaaccttggcctttaaacgatcttaattccttcaccgctatggatgtaaaggatgatcctgtgcaaacggctccagatacttctcctcgggcaaggcacatcacagatcattgttctattactcaagtcgttgatccaccatacctgtcccgaccagcggcaaagattggtgctttcagaccatattatctaggacacacggaacctacccaacaagaaatgccaggtgctgtcgtcatgtttgactcaactcataaagtctcgactcctgaaagcgaggtattcaagtttgttgatcctatatgctttgctgctgaggtgccagacaaatgtgggtatggttgctgcggcgctcatgagcagcatcgtaagaactcat

SEQ ID NO: 885 - DNA, 368 bp, Zea mays
acttctcagtgcgtgtaaagtacacaagaacatcgaaattggggagcttgcagccaaacatctcctggagttagagccccatgattcggcatcatatgtcctcctatcaaatgcatatgctgttactgggaagtgggccaacagggatcaggtcagaaagatgatgaaagacagaggaattagaaaagaaccaggtcgaagctggattgaagtaaagaatgcagtccatgcattctttgttggtgatcggtcgcaccccttgtccgatcagatatacaagtttttgtctgagctaaatgataggttatccaaaataggatacaagcaagagaaccctaatttgtttcatgaaaaagagcaagagcaga

SEQ ID NO: 886 - DNA, 366 bp, Zea mays
gctcttaccagtgacttgcttcagtcggttgtatgtgatgaatagtggtttgggggtttacttggcaaaaacaaacagtagctatggcgcctgttgtgcccttaaccgcgtcgagacgtgactgaattactcaggtcatcagcttgtgggacgtgattgcgaacgagattattcatgtaagatgtttgtcataaaaggttgtcgttggctgattgtgcttgtgctgcttgtattgttgagcttgtaaagaatatccaaaatttgtttggacttcatcgagctctccaggtttattttctcgtaatctctatggaaattaccgttactagagataaatggcatccttgcaatgtcccaaattctcac

SEQ ID NO: 887 - DNA, 392 bp, Zea mays
gttgggtacactggacactggttatccttttctttgctaagtatattcatggagattgcaactagctgtaaagcggttataaaaccatcagtctgttggttttacgggatggactttgtataatatgtaacagcggattaggagcttattatttcacttctagctttgctaatggcagttttacctttcccttaaaatattacagtgcagaacaactggtggacatcggttgtcaatgggttattcttggacactctgagcgtagacatattattggtgaaaatgacgaggtgattattttatgtgcatatgctactggtttgatgcttgcagaaacatagtttgtgattgcaatataacaagttgctcaaatgcagtttattgggaagaag

SEQ ID NO: 888 - DNA, 382 bp, Zea mays
agtcgtcctcgtcagctcagctcgaaaaacaccagccgacggagtggccgccgactgagagggagaaggacccaggtcggccgcgggcccgatggacctagaggaccaagaagcgcagaagcctctcctggtcaccgcgcccgggagaatcggtgatggcagtcacttagctgagtccgacgctgcctcgtcctcctcttcgattgcggtggtggtcgccagcaccgcagtcgccgtcgccggatccttcgagttcggcatctcggtaaccactaaccaaggccttccgctgtagtttctgctacatcgtgcattaaattccgtgcctccgtggagttggagtagatagataaccaaaactagctagaagacaactaaacaa

SEQ ID NO: 889 - DNA, 354 bp, Zea mays
atttggctcatcctaccatgaaagtagccaccctgcagtatgttttgggccttttggcatattgatatgtttcataacatgttctttttccttaacagaaactgtacaggcgttatgttgtgaagaggaatcaacgcaaacgccagagagaggaagatctaaagaaagaagagaagaaatcctcagagaagcgatccaagaccatgcatgagactataattgaaagtgttgataaccttggaggcagtgttgaagtgacaaaagaggatgaagaaaagatgagcaaagatcaatcagcaaatgttcatgctgaactgccaaaagagggtcagataaaacttggcacagatcatc

SEQ ID NO: 890 - DNA, 496 bp, Zea mays
cacaccaaccaacccctccatcagctgcccagccatgagctcaggttttcttcaaccttctctctctctctcttcccgctttactctgggtcctactgtatgagtggccattaagtggatcccaagcatgatgcactgattcttcagttggtagaaagaggatcagatacacgagttttataatccgcaagggcttgttcggttgcatctggatagatctaagtgggttgagggatttgatctccttggatccagacgcaaccgaacaagaagggaatgaacattgtgtggtactactgataccatccacctatatctatctataagaagggaatgaacattgtgtggtactactgataccatccacctatatctatctatttgatgaatttgatcaccaatgatttgttctaggaaagatgtgtgggcaggacctgggcttggctaggtgctccaccgagatgtgcaaccggcagcgaggtgatgatttgctgta

SEQ ID NO: 891 - DNA, 209 bp, Zea mays
ctacccgttcacgtccatcttcctgatcgtctactgcttcctgccggcgctgtcgctgttctcggggcagttcatcgtgaagacgctgaacgtgacgttcctgacgtacctgctggtgatcacgctgacgctgtgcctgctggcggtgctggagatcaagtggtcggggatcagtctggaggagtggtggcgcaacgagcagttctggc

SEQ ID NO: 892 - DNA, 433 bp, Zea mays
  misc_feature (126)..(126): n is a, c, g, or t
  misc_feature (147)..(147): n is a, c, g, or t
  misc_feature (172)..(172): n is a, c, g, or t
  misc_feature (240)..(240): n is a, c, g, or t
  misc_feature (324)..(324): n is a, c, g, or t
  misc_feature (340)..(340): n is a, c, g, or t
  misc_feature (350)..(350): n is a, c, g, or t
  misc_feature (382)..(397): n is a, c, g, or t
  misc_feature (400)..(403): n is a, c, g, or t
  misc_feature (414)..(417): n is a, c, g, or t
gcgagtgacaactcagggtcctagtagcactaggcagcaagtgccaacattccatctcccgcgtacctcctggtgtccgttgtggttcttgatgatatgctccctgtaccagtcgatggacagtancttcctgattgctgacccggntgcctgcaaatctttcacggtctcnaacaagggaacaactcttaacctgtcacacagaatgaattgagagagtaatcacaagcagcatattgnaaaaaacaagatgatgtatcatcatagtaggaaaaagcatacaaaaccatttttattttgttactgaagttctgcgaagtttanttacttctcaaaaggnataactttanctctcccgccggttccgtttcaaaaaaacaannnnnnnnnnnnnnnnatnnnnatatatacagnnnnttattgatggttctgt

SEQ ID NO: 893 - DNA, 406 bp, Zea mays
tagaactcgccgttaaccagtcggtgccactgcctcaggggcggttaattctaaataaacaacaacaacaacaacaaagtaacagcaacatgctagtaccaaaacgggtgaaatgaccacaggcaccctgtgttactttgccacatcgacaagctcacggaggacgcagcaggtgacagaacttctgaagcaacccagagctgacagtggacgcaacgagttgcttaaatgtttagtacgcttcaatagtttcaacagacagtggacgcaacgagttgcttttgatgcaagacatgccagattattatgtacacggattcttgagacgcctatttttttttaagtatttacaggaggaggggcattgtccgacgtcgatccacggcggcgtggcgccactcataca

SEQ ID NO: 894 - DNA, 435 bp, Zea mays
  misc_feature (378)..(379): n is a, c, g, or t
  misc_feature (385)..(389): n is a, c, g, or t
  misc_feature (391)..(392): n is a, c, g, or t
ggccagttaatttgttaatctaacaaaagtagcgcaacacgtaacctaaatgggtggaaccaccgcagacgccttcatgttacttcgtcacgtcgacaggcacacggaggatacagaaggtaacataatttctgaagcatcccaaagcagagtagtatatattattacttaaatgtgtttagcattgcacgtcaagttgcgtaatgacagacagacagacagacagacagaccagattacgttatggacacagattcttgtgatgcatgtttagtatttacaggaggcattgcccaatgtggatccatagcggcgcccactcagaacagcccgaaggtgttctcgccgctgtacgtcatgtagaggaagacgattctnncagacnnnnngnngcgtcctgcactgtacgtcggaggaggtgcttgggctgttcta

SEQ ID NO: 895 - DNA, 348 bp, Zea mays
  misc_feature (291)..(294): n is a, c, g, or t
acatatgccttctgaagcagtatgttcctgtgcatagattcctggaggtcataagtccaacagcacagttgaaatttctcaaaacgttcagtctgttgacagtagtaagatgggatcaagtatcaaacatgcaaattttgttgaagatggttcttccaccgaggacttaaatgaggcattgccatgtaactctcattcttcttcaccaaacattaatggtcatagcagttttgtaaacaaagaattctgcaatcattccaaggaataccaaagagctaaggatgccactgnnnntgaggattgttctcagacaagcagtaccagggagcttgaagacagtagcattcc

SEQ ID NO: 896 - DNA, 538 bp, Zea mays
ctctcatggccaatggactgccagaggcatcggtggttgttatgaccgccatccttccttcattagagacatcataacttgctgaagaagatgcatcctcagcttccatcataataaactttgcaatgttcataactaacatgttctcaaaattgtcatcgtcccgctgcacatctttgtaaccatatctaacgatgcaacggtacatccgatattctttaggtccaatcctacccacaaggtatcgctcgtccggtgaaacatacggcactggcactgatttcacacaaaggaagaccaggacttcatggaaggcagggagattagtgacaaaatgtgagaaaatggagggtacaccagtgaccagctccgtgtaaatcaatccaataccaggaacccgaactataccaaggcttggaccgagagataagatggacctcattgatactttgttctgtaggtcaaactggtacttcctccttaacccatagtgccaaatgtacatgactgacatgaatatgaaagcaagcacaagagg

SEQ ID NO: 897 - DNA, 263 bp, Zea mays
gagatgctcaagctgcacaccacgcggtcctgggacttcatggacctggagcgcgacggtcacgtcctccctggctccatctggaaccacgctaggttcggacaggacgtcatcatcgccagtctcgacagcggagtgtggcccgagtcccacagcttccaagacgacggcggccaagtgccagctcgctggaagggctcctgtcaagacaccgttaagtacggtgtcgcctgcaaccgcaaactcatcggcgctaggttctt

SEQ ID NO: 898 - DNA, 328 bp, Zea mays
actctgaggaagaggtacctgctgggatcagtgcaggaaccgatgtctgttttgtagcggagtttgcagaccacatcctgaatatgaaggagctctatgcaaaaggctatgatgaatctgattctgtagacaaagatgcagaagatttacctgatttctctgatgatgaaaaggaggctgagtacaaacggtcattacgtcaagcaaaaaggcagactgatagacagcacgagcctatgaagacttcttgttacatgaagggatcacagcctagaggtagcggaatacggaagcccatgccgccaaggaacctggatacatcaacacg

SEQ ID NO: 899 - DNA, 322 bp, Zea mays
  misc_feature (289)..(289): n is a, c, g, or t
  misc_feature (297)..(298): n is a, c, g, or t
  misc_feature (309)..(314): n is a, c, g, or t
taggtcgagcaggggccgatgggggaagaggcggagagcaactgcaagcgcaaggcgccggactcgagcgtggaagagcagccgagcctcgcgccggcgccggcgcagtcgcaggcggacccggcggccaagcgcccgaacatctcccgctcttgcgtccacgaggtagccgtcccgaatgggtacgagtctgttaaggacgaggcggtgcacgggacgcttgccagcccggccttcaatggggagatggccaagcagtacccgttcaagcttgaccccttccagagcntctccatnncttgcctggannnnnncgagtccg

SEQ ID NO: 900 - DNA, 395 bp, Zea mays
  misc_feature (314)..(323): n is a, c, g, or t
  misc_feature (333)..(346): n is a, c, g, or t
  misc_feature (354)..(357): n is a, c, g, or t
  misc_feature (362)..(390): n is a, c, g, or t
tttttgttctttgaatctaactcgtcgggttttcttggactattgtatgcaagcaagaggggggtatggtttaaatcagatgagtgattaacaacgtacgacgtaccctcatggaggcgttgcggaacttcatggggcggtaggcgtgcgctgcctgcgcgtcggcggcgaggcggtactcgtgcatgatccagttggtcttggtgcccttgggcggccggccctcgtagaagacgagcgccttcttgacgccgacgctctcgccggcggtggtgctgctgtggatgggcttgtcggttccggtggccttccannnnnnnnnncccgccgcgnnnnnnnnnnnnnncccgttcnnnnacttnnnnnnnnnnnnnnnnnnnnnnnnnnnnnccttg

SEQ ID NO: 901 - DNA, 428 bp, Zea mays
attttcatttagtctttacatattggcactgtagtattatgccaagacatgaaatgatcggcttactttatcaatacaaaaggatgtcaaattcccagtggagatgttctgttttgtgttcacgtgcagaacgttgttgaattcatgatcagagattgataaggttggaagttcttaaggtggcaggaactatgttggctgatggcaaaatgtgtctaaatttttatctacaagttatttgtaaaccctacagtttgctatttgcagtctgaatctgtttcatgttgatttatcctggctttcttcatttgatcttttaggtaaacaatgtaggaacaaacataaggaaaccaactactgagtttactgcagaggaatactcgtttctgatggctactaatcttgaatctgcatatcacttgtgccaa

SEQ ID NO: 902 - DNA, 456 bp, Zea mays
aagaaacgtgtgacaactggtatgcatgcaaagcctgcaaaccatgtgcccttacaaagacctctgatcaaatcatcagtttatagttggaaccccaattcattgcatattatctcaggatttgtctattgttttttttctgttttgtgtaggggagatgctaacagggccagcaacggctttatttatggacgaaatatccactggtttggatagctcgagcacatttcagattgtaaagtttatgaggcatttggtccatataatgaatgaaactgtcatgatctctctgctccagccaccgccagagacctacaatctttttgatgacataatcctgctatcagaaggatacatagtgtaccatgggccacgcgagaatatcctggaattctttgagtctgtcggtttccggtgccctgacaggaaaggtgtcgcagactttcttcaagaggt

SEQ ID NO: 903 - DNA, 350 bp, Zea mays
tctctctgtctctctccctctccctcccgtatggtctatgccctcgccccctctttcgtagcgcttcttcctatgcctctcgccggaacggaacagcagatagcatctcaatctccagtggctgtgggcatctttccttttcctgccataggctctaggccgtgacgggagctagcttctcgcttgcgtgcgtgcttgctccggctatcatattgcctgcctgcctgcctgcctatgaaacctctccggccaatggaggagctacctcttcttcttcttctctagcctttctcgtctctgatccacccattgaccttcggtgcccccggccactctgcgccggcctctcg

SEQ ID NO: 904 - DNA, 351 bp, Zea mays
tggagcacccacttcttctgttccagatcagaatacaatacattttgcaatttgcagaagtggaagctagtgaaaaccaaagcaattacagtgatctatctatgccttctctattagctgcaagacctcagtttcagtgggcaaagacgggatcgcacccttcttcgtggcggtgattgctccacacgcattagcgaatttaatagactctacaagcttcttctcgtcctgtgcggtcacaccagataccaaatttcaatgtcacatggtaaaactgaaaaccgaaggaccaccttggcatgtaggacccaacaatttcagatcaatgaacaaatttcaggcgacttactt

SEQ ID NO: 905 - DNA, 518 bp, Zea mays
gtcgcgagagggtagccacgggtcagggagtcgtcgctgccgtttctcgggagcgcggcggggacgggagtcggggcgagggaaggtgccggcgcaggcgctggcgcaggaggaggtggttggtgggcggcgttgtcggcgacctgcagcttctcgagccccgggatctggcgctggtactccgcaggggagacagccacgttgtcgcccgcggggttgggaatgggatggcggtcctcgtttttggctggtaactccacgggcacgctctccctgaccgcaggaggatcgcccgccgggtccttgaccttcaccgcggggggatggacgaagccattgtcgaggccgaacaggtagtcggggctcgccgccgcgagcaccacgtgctgcggcggcggcatctgcatctgcaccaccgtctgcggctgaggcggggactgctggacgaacaccgcctcgtgcttggcctgcggcggtggcgactgctgcgcgaagaccgactcctgctcctgcttctg

SEQ ID NO: 906 - DNA, 240 bp, Zea mays
ggtgagggcatggatgagatggagttcaccgaagctgagagcaacatgaacgatctggtgtctgagtaccagcagtaccaggatgccactgccgatgaggaggagtacgaggacgaggaggaggtccatgacgagtaaggtgatcttggaccctgctgcatattgtaccgtctctggacctggctttctttcaagctggagcttaggtttggttgttgtattcgaacatgctatgatggg

SEQ ID NO: 907 - DNA, 458 bp, Zea mays
tgtgagcagcaggcagatgcagaactctatctgttaagaagacaagaaagcgtaccgtcagtatgttccagggatagtaaaatgtcatcaacagagttaccacgacaaaaacagacaaattgtatatgtcactgctccatcccacgctgagttccattcatggttcagattagtcaaattagctgtctgatttttacccactccttcccatcaggagaaaaaattgtggttgcgaaatggatgctgctggcttgtcctataacagagcatcactgtcacatcacatcaacgtaatgggcttctgagggctacggaaacatcaaacatgaatttatggacctagtcctcgatacaatccttcctttgcggggaaccaaacaggagccaacccagcaacaaatggccaacacgggaacgaagcagatcaggaggtactacagtttatgcagggatctacg

SEQ ID NO: 908 - DNA, 379 bp, Zea mays
aaattttcattttgatctccctaatccctccggctagctgctttccagtgaccaaaagatatcaaagaccacttcccgtcttcctcccgtggcctgtctgtcatctggctctgaaacgatggcagtcctgcaagttgctgctgctgcccctccccctgtctctgtgattgggttcgagggatttgagaagcgccttgagatcagcttctctgaggcacctgtcttggctgaccccagcggaaggggactgcgtgcgctctcgcgtgcccagatcgactctgttcttgaccttgctcggtgcaccattgtgtccgagctctcaaatgacgacttcgactcttatgtcttatctgagtcgagcctgtttgtctacccatac

SEQ ID NO: 909 - DNA, 464 bp, Zea mays
tatgtatattttacacaggtgatgttttacaagagcaaaaattaaggcgagaatcagataatcgtgtgagtagagtacaacgtcagacaatggctatctccctcctccttccgtccctgccacatatctcaagcgaaatcttggagcgaaattcgaattcacgactcctgtgtgctcctgacggatgaatgctggccatggtgacgctacgatgctagtccaggccatcttgatctggatggagcgcatgtattggatgcgaatgggatgctcctgtctgtgttcgtttacgttgaactttgacggctggctggctggctggcgttggttggttggtccggcggtggtgccacggttcctgcctgtatgccgaccaccagatgccctgtgctggctgggcggagacggaatggatttcccttctttcgtgctcgtctcaactctcatctcttgtgccaagattg

SEQ ID NO: 910 - DNA, 1603 bp, Zea mays
  misc_feature (232)..(235): n is a, c, g, or t
  misc_feature (240)..(240): n is a, c, g, or t
  misc_feature (283)..(285): n is a, c, g, or t
  misc_feature (292)..(295): n is a, c, g, or t
  misc_feature (305)..(307): n is a, c, g, or t
  misc_feature (313)..(322): n is a, c, g, or t
  misc_feature (327)..(330): n is a, c, g, or t
  misc_feature (332)..(333): n is a, c, g, or t
  misc_feature (338)..(339): n is a, c, g, or t
  misc_feature (341)..(341): n is a, c, g, or t
  misc_feature (343)..(346): n is a, c, g, or t
  misc_feature (351)..(353): n is a, c, g, or t
  misc_feature (356)..(361): n is a, c, g, or t
  misc_feature (366)..(367): n is a, c, g, or t
  misc_feature (369)..(377): n is a, c, g, or t
  misc_feature (391)..(391): n is a, c, g, or t
  misc_feature (403)..(405): n is a, c, g, or t
  misc_feature (407)..(407): n is a, c, g, or t
  misc_feature (410)..(410): n is a, c, g, or t
  misc_feature (425)..(429): n is a, c, g, or t
  misc_feature (446)..(451): n is a, c, g, or t
  misc_feature (455)..(455): n is a, c, g, or t
  misc_feature (458)..(458): n is a, c, g, or t
  misc_feature (460)..(464): n is a, c, g, or t
  misc_feature (466)..(467): n is a, c, g, or t
  misc_feature (503)..(504): n is a, c, g, or t
  misc_feature (507)..(508): n is a, c, g, or t
  misc_feature (518)..(519): n is a, c, g, or t
  misc_feature (521)..(526): n is a, c, g, or t
  misc_feature (533)..(534): n is a, c, g, or t
  misc_feature (569)..(573): n is a, c, g, or t
  misc_feature (578)..(580): n is a, c, g, or t
  misc_feature (582)..(586): n is a, c, g, or t
  misc_feature (591)..(598): n is a, c, g, or t
  misc_feature (605)..(607): n is a, c, g, or t
  misc_feature (612)..(615): n is a, c, g, or t
  misc_feature (623)..(623): n is a, c, g, or t
  misc_feature (628)..(630): n is a, c, g, or t
  misc_feature (632)..(637): n is a, c, g, or t
  misc_feature (642)..(645): n is a, c, g, or t
  misc_feature (649)..(652): n is a, c, g, or t
  misc_feature (654)..(660): n is a, c, g, or t
  misc_feature (662)..(668): n is a, c, g, or t
  misc_feature (673)..(675): n is a, c, g, or t
  misc_feature (677)..(681): n is a, c, g, or t
  misc_feature (685)..(685): n is a, c, g, or t
  misc_feature (691)..(691): n is a, c, g, or t
  misc_feature (694)..(694): n is a, c, g, or t
  misc_feature (699)..(704): n is a, c, g, or t
  misc_feature (715)..(722): n is a, c, g, or t
  misc_feature (725)..(726): n is a, c, g, or t
  misc_feature (729)..(729): n is a, c, g, or t
  misc_feature (731)..(737): n is a, c, g, or t
  misc_feature (739)..(740): n is a, c, g, or t
  misc_feature (742)..(744): n is a, c, g, or t
  misc_feature (748)..(755): n is a, c, g, or t
  misc_feature (767)..(780): n is a, c, g, or t
  misc_feature (786)..(795): n is a, c, g, or t
  misc_feature (797)..(797): n is a, c, g, or t
  misc_feature (801)..(803): n is a, c, g, or t
  misc_feature (806)..(806): n is a, c, g, or t
  misc_feature (808)..(820): n is a, c, g, or t
  misc_feature (822)..(825): n is a, c, g, or t
  misc_feature (827)..(832): n is a, c, g, or t
  misc_feature (835)..(836): n is a, c, g, or t
  misc_feature (838)..(849): n is a, c, g, or t
  misc_feature (855)..(872): n is a, c, g, or t
  misc_feature (874)..(877): n is a, c, g, or t
  misc_feature (882)..(882): n is a, c, g, or t
  misc_feature (884)..(890): n is a, c, g, or t
  misc_feature (899)..(902): n is a, c, g, or t
  misc_feature (913)..(918): n is a, c, g, or t
  misc_feature (920)..(922): n is a, c, g, or t
  misc_feature (929)..(934): n is a, c, g, or t
  misc_feature (936)..(936): n is a, c, g, or t
  misc_feature (944)..(944): n is a, c, g, or t
  misc_feature (950)..(958): n is a, c, g, or t
  misc_feature (960)..(961): n is a, c, g, or t
  misc_feature (965)..(977): n is a, c, g, or t
  misc_feature (979)..(1000): n is a, c, g, or t
  misc_feature (1003)..(1014): n is a, c, g, or t
  misc_feature (1017)..(1020): n is a, c, g, or t
  misc_feature (1023)..(1025): n is a, c, g, or t
  misc_feature (1027)..(1060): n is a, c, g, or t
  misc_feature (1064)..(1066): n is a, c, g, or t
  misc_feature (1068)..(1070): n is a, c, g, or t
  misc_feature (1072)..(1072): n is a, c, g, or t
  misc_feature (1074)..(1081): n is a, c, g, or t
  misc_feature (1088)..(1093): n is a, c, g, or t
  misc_feature (1095)..(1103): n is a, c, g, or t
  misc_feature (1107)..(1112): n is a, c, g, or t
  misc_feature (1117)..(1137): n is a, c, g, or t
  misc_feature (1140)..(1145): n is a, c, g, or t
  misc_feature (1151)..(1151): n is a, c, g, or t
  misc_feature (1153)..(1155): n is a, c, g, or t
  misc_feature (1160)..(1161): n is a, c, g, or t
  misc_feature (1167)..(1181): n is a, c, g, or t
  misc_feature (1183)..(1184): n is a, c, g, or t
  misc_feature (1186)..(1187): n is a, c, g, or t
  misc_feature (1189)..(1196): n is a, c, g, or t
  misc_feature (1201)..(1206): n is a, c, g, or t
  misc_feature (1208)..(1212): n is a, c, g, or t
  misc_feature (1215)..(1217): n is a, c, g, or t
  misc_feature (1222)..(1226): n is a, c, g, or t
  misc_feature (1229)..(1232): n is a, c, g, or t
  misc_feature (1234)..(1240): n is a, c, g, or t
  misc_feature (1243)..(1244): n is a, c, g, or t
  misc_feature (1248)..(1252): n is a, c, g, or t
  misc_feature (1254)..(1256): n is a, c, g, or t
  misc_feature (1258)..(1259): n is a, c, g, or t
  misc_feature (1261)..(1270): n is a, c, g, or t
  misc_feature (1273)..(1273): n is a, c, g, or t
  misc_feature (1275)..(1295): n is a, c, g, or t
  misc_feature (1300)..(1310): n is a, c, g, or t
  misc_feature (1312)..(1313): n is a, c, g, or t
  misc_feature (1317)..(1328): n is a, c, g, or t
  misc_feature (1331)..(1333): n is a, c, g, or t
  misc_feature (1336)..(1336): n is a, c, g, or t
  misc_feature (1340)..(1342): n is a, c, g, or t
  misc_feature (1347)..(1348): n is a, c, g, or t
  misc_feature (1350)..(1354): n is a, c, g, or t
  misc_feature (1357)..(1358): n is a, c, g, or t
  misc_feature (1361)..(1368): n is a, c, g, or t
  misc_feature (1371)..(1390): n is a, c, g, or t
  misc_feature (1392)..(1410): n is a, c, g, or t
  misc_feature (1412)..(1414): n is a, c, g, or t
  misc_feature (1416)..(1417): n is a, c, g, or t
  misc_feature (1422)..(1433): n is a, c, g, or t
  misc_feature (1438)..(1447): n is a, c, g, or t
  misc_feature (1449)..(1452): n is a, c, g, or t
  misc_feature (1454)..(1454): n is a, c, g, or t
  misc_feature (1456)..(1457): n is a, c, g, or t
  misc_feature (1463)..(1468): n is a, c, g, or t
  misc_feature (1470)..(1480): n is a, c, g, or t
  misc_feature (1483)..(1492): n is a, c, g, or t
  misc_feature (1494)..(1513): n is a, c, g, or t
  misc_feature (1515)..(1523): n is a, c, g, or t
  misc_feature (1525)..(1537): n is a, c, g, or t
  misc_feature (1541)..(1553): n is a, c, g, or t
  misc_feature (1555)..(1562): n is a, c, g, or t
  misc_feature (1564)..(1568): n is a, c, g, or t
  misc_feature (1571)..(1573): n is a, c, g, or t
  misc_feature (1575)..(1578): n is a, c, g, or t
  misc_feature (1581)..(1581): n is a, c, g, or t
  misc_feature (1584)..(1591): n is a, c, g, or t
  misc_feature (1594)..(1599): n is a, c, g, or t
ctggctgaataccgcccattcccattgaatttccaaagaccaataattaatacactagtgctagcatcatgatctctaagaaacgagaccaaataatcatcaaacctaatcctaatagtggagttgcctagagtcacaattaaaccgagcttgctgctgatgacttgtactaccatctgcttccattctgctccctgatgatcgtcagagcttcatgacccagctgttcacnnnntaatnggctaatgatgtctatccaggacgtagttccattacgcgatcnnnaccgtgnnnntatatatcgnnnccagcnnnnnnnnnncatgnnnnanngttcnnangnnnncgtcnnnggnnnnnnaggcnnannnnnnnnncgagggctcagatncaccttctcccnnntnttnaacaccgacatcggnnnnngcgcaccactaggggtnnnnnnccgngantnnnnntnnacatgccgggttgtgtgatgaagctatgtacatcgnnaannatctgatcanncnnnnnngtctctnnctctctactgtgcgggcgaccgacgatgagcatannnnnatccnnngnnnnntcacnnnnnnnngcccttnnntaccnnnngttccgancttannncnnnnnnctgcnnnngcannnntnnnnnnntnnnnnnnccgannnannnnncatntaaaangcntaagnnnnnnacttaaaacannnnnnnncgnnttncnnnnnnntnnannngacnnnnnnnntgctaactgctnnnnnnnnnnnnnngcccgnnnnnnnnnntnaaannnccnannnnnnnnnnnnntnnnntnnnnnnctnntnnnnnnnnnnnnggggcnnnnnnnnnnnnnnnnnnannnnaatcntnnnnnnnccaccctannnntatattatatnnnnnnannnatttgtnnnnnntncataatgntcctcnnnnnnnnnanncctnnnnnnnnnnnnnannnnnnnnnnnnnnnnnnnnnntgnnnnnnnnnnnntcnnnntcnnncnnnnnnnnnnnnnnnnnnnnnnnnnnnnnnnnnntcannntnnntntnnnnnnnnactttcnnnnnntnnnnnnnnntcannnnnnaattnnnnnnnnnnnnnnnnnnnnnatnnnnnntctctntnnntttcnnctcttnnnnnnnnnnnnnnntnntnntnnnnnnnnctccnnnnnncnnnnnccnnnccccnnnnnctnnnncnnnnnnntcnncccnnnnntnnncnncnnnnnnnnnnctncnnnnnnnnnnnnnnnnnnnnnctctnnnnnnnnnnncnncccnnnnnnnnnnnnaannnttntcannntcccnnannnnncannctnnnnnnnngannnnnnnnnnnnnnnnnnnncnnnnnnnnnnnnnnnnnnnannncnntactnnnnnnnnnnnnacttnnnnnnnnnnannnncncnnttttcnnnnnncnnnnnnnnnnncgnnnnnnnnnntnnnnnnnnnnnnnnnnnnnnannnnnnnnncnnnnnnnnnnnnntacnnnnnnnnnnnnncnnnnnnnnannnnnaannntnnnnacngcnnnnnnnnccnnnnnnccac

SEQ ID NO: 911 - DNA, 380 bp, Zea mays
gccgccaagcacggcgggaaggtggccacgcccgccaactggaagcccggggagtgcgccgtcatcgcgcccggcgtctccgacgaggaggccaggaagatgttcccgcaggggttcgagaccgccgacctgccctccaagaagggctacctccgcttcaccaaggtctagctagccgacgtacggcacggacgtctagctcgatcagtccgcgtcgaccggggtgcgcggatcttttgtgcctgctggtggtttctctgactagtactagtatatatataggctctatgtatgtgcgtactatgccgtgccgtgttgtctcgtgtagtggtggcaaccggttcgtggcactaccgcgctagtattgtccacccatatca

SEQ ID NO: 912 - DNA, 356 bp, Zea mays
ggaagcctgagtggttccatgacagtcacacccaataagagtaaccctcgagatatcgacattaagctcaagtactccataaatgggcataggtgtcaggtatcaagaacacagttctacaagatgcggtgacaatggaacaaacaagagttgcttcaaagctcattaaattttgtttaacgagtatcttgtttgacagaaattgtgctatttttattgttcatgtactattatgcatcaaatattagattctttggaatctagcaaaagtagggagtagattaaactggcctgctgatatgagattgatgtagtgcaaaactgtcatattgccacaaggtcgttggtggttgtat

SEQ ID NO: 913 - DNA, 460 bp, Zea mays
aacagcagcatatgccatatcagccatccaaccgctctcggttcagcctttcatttcatttctagggttaatcccgaacccgccagtttcagcagggctcgctcagtcgaaggatacataagaccacagtgaaaattagagggccttacaaaagcagcagcagcagcaatgcagcacgcagatcaaatttacacatcaaaacgccggccaaaacccgagaagaaaccgaaaccccgccgccgccaagcacacacatgcacccacacacacacaccaccgcccacggccgcaatatacacaacggaacctaccccggcaactccaaccgaaacacagcacccatcaccgcactcggcaagccgtggccgggacggcaggggagcacttggggttcgggatggccctgaagtggacgctgttcccggttatcctgcggcgacccctatagtcaggaaggcca

SEQ ID NO: 914 - DNA, 518 bp, Zea mays
gacatgcatgcatatgcaactcatccttagcttcttcattcattgaatgacatgtatatatatacatatactcatctcaagaggaaggaccggaccggaccggacgcaataatcaaaatcgatcaccttggccctgccgagcgccatggtgattgcgctgtaggagacgtggaagacggcgaggaagaagatgaagatgtgcagctggtgcagggcgttgatggagatgagcggcactttcccctcggggcacttggtcgccatgctcgcctccgccagcatcctggcgttgtgcgcgtagtagggcggcggccagtccaccacaccgccaagatgatcgacggcggcggcggccttcttcttcttctttccagggacggcgacggcgaccttcttcttgccagagaccacggcggcggcctccttgccgtggccgtccttgccctcgacggcggcggcctcgagcttgcaggggagcatggtgttggcggcgtggttgctgatgcagaccttgatga

SEQ ID NO: 915 - DNA, 378 bp, Zea mays
gcggggtcgatgtcgaggccgaggtggtggagccggtggtggtggtgcggttgtgggaagagggaggaagacggcgaaggatccaggccgggatggtggtggtgtgggtgtgcaggatgcggcggagggtggtgggaagaggaggaggaggagaggtggaagggtaatggcggcggcggcggcgggcccgggttgtgatggctgtcgaagaggagcgggtggtggtggctgccgaggctcatgtccagatcccatgagctgctgctgctcgagttgtgcgtgatgttgtccatgccggctcgccgcccacggacacggacagcgccgcccccggagaccccctctcgcagctttgtctgtggtatgtacagcctccat

SEQ ID NO: 916 - DNA, 364 bp, Zea mays
ggctgcttaacggtgagtactcgttgttttagttcagatctcgtcagaattcagactgctcgatcgcaatacagtgcaaatttcacatatataattatataaatataacagcgttacaaatatgacattacaaaaccacataataaacaaataaacgaatcacaacattgtgcatcccgtccccccacatagttctataatactcgacgcttgatttcccttccaaaaactcatggtccccttcagacctggaagggccagggccaggtgccggcgccgtcctcgccgccgaccttggcgctgcggcgcatggggttgccgccgcactccctgtcgacgtagacgtagtacctgagcacgaagg

SEQ ID NO: 917 - DNA, 347 bp, Zea mays
ggaggaaatcgaaaggcttaagtgtgacaatgcagctctgacctcagagcttgaaaagaatgcacagaagaaacttgttacagagaaacgaatgcaggagctagaagataagttgatctttttggaggatcggcagaaaaatctgatggcgtatgtcagggatattgtacaggcaccaggatctttctctagctttgtgcagcaacctgatcatcacggaaagaaaaggagactaccagtacctatctctctctaccaagattctaatgctgaggggaaccaggttgtgcatgggagcttcatcaccaacccaccagcttgcagggaatcattcgacaagacggaat

SEQ ID NO: 918 - DNA, 371 bp, Zea mays
atcgaatatgaagcatggagtcaattctaaccttgtgctggcgtattcatagagacgaccggtgctggagaagatgaccaacccgacctctgcgtcgcagagtatggcgagctcccttgccttcttgaagatcccgttccgccgcttggagaacgtcacctgccggctcgtggagttgtcgatccggcggatcactatcttgccgcgccccatcgtgaagctgcgcccggtcgatcttgcacgcgcacacacgggggcaggcacactcacggatagtaaccgagaaggaaagagggagatgggaactccggccagcaggagcccggcctggaaggagaagggttacgaattattggaggcgagagaagaat

SEQ ID NO: 919 - DNA, 505 bp, Zea mays
cgcagagctttgcgcgaaactagcaggctgcttggagagcactgggtcttctcaggttgccattgacaagttggttagctacattctgtctctgtgaatcttctgttctatggcgtatgtgtgttccgctgggttagcattggcagcagcttaacagctggtactcttatatggacaattattcctgtcaattatatgtagtgttctctttctctagctattttttaatttctctacacaccagcttctgatttcgttttaccgccttccatatcggagatattataaacctgactccctttcaagctctccccgcgcttcacgggacctctgccctctgccggctgacgcgtgtcctctccccctacagcgttttctctaccgcgtcctgctccacggccaagtcgacctcgtgtagatggaagatccagtgatcgaaaagaatgttgtaggcagaattaacatttcctgttgctactgggtacagaagtactattcaccactc

SEQ ID NO: 920 - DNA, 398 bp, Zea mays
  misc_feature (47)..(48): n is a, c, g, or t
  misc_feature (73)..(73): n is a, c, g, or t
  misc_feature (173)..(173): n is a, c, g, or t
  misc_feature (358)..(358): n is a, c, g, or t
  misc_feature (364)..(364): n is a, c, g, or t
gagaccggtaccgtacctttttcttctccctgtgatggaacgtctgnntgtgtctctccaccaccctgcgtcnatttttgagttgagtcaacggtagtagcacgaggagggagggacacggtaacaactaacaagttacaataacgcacttgaccgcctgagtgatggtgtcnaaagggttggtcccggcgtgcacgtacagcatgcaggtcccctgcgcagtctgcaccgccttgtcccctgctcccggtcccggccacggaaaatatcgccggcgccggccacggccacccaacggtatcagtcacgcgtcaccacgtgaagcagcacaagaaaagcaaagagagccgaaagcggntgctanctagtggcagcaaccagcaggcagacaggtcata

SEQ ID NO: 921 - DNA, 414 bp, Zea mays
ctgtctcggcgtcatagaaggacccttctttgtgttcgttgtggtttacagcctgcatcagtccgatgtcttgaggacaacacatcactttgccaaaactgtgattggaatgggcatgatgcagcatcaggggcttctgggcataaaaggcaggccataaactgttactcagggtgcccatcatcagcagagctttcgagaatctggtcatttattatcgatatcccgactgtagctgctgagcccaactgtgaggatgggctaagcatgatgacaattgatgacagtgatgtgactaatcatcacggtgcttcagatgataaacgattgttggaaatagctaacacagcactcatgagtgatccaccttcacctgacaagcttaaacctctgataggctcttcttctggagat

SEQ ID NO: 922 - DNA, 431 bp, Zea mays
cagattgctcttgtatcttcggtgccgaatacagctcttacgaaaggccatgaaaggtctaggcactgatgacaagacacttataagggttgtggtgacgaggactgaaattgatatgcaatatatcaaggcagagtacttcaagaagtataagaagccattagctgaggctatccactccgaaacatcaggaaactatcggacattccttctttcacttgttggtcctggacattaggtttgttccctggagatacagtgattaaagcattttcaaactgatctcatatttacttgtattttcctttcgtcaggttatgtttcgaccatgggacatgatattccacccatccaccctaaatgcagcgacctacctggaaaacttatgatgttgccatttgtcagtggtgactcgtggattcgtctaactt

SEQ ID NO: 923 - DNA, 377 bp, Zea mays
tggcgcatacggtgttggcatctgcggtgttggaacggagtatccccaggagatggctgtggctgatgcacaaggcctgcgtgagcctcctgctacggacggagaacggctgcgggacgcccagaatgacgcccatttcccctgccatgccatgcggccctatcttcatcacaagctgaaagagggcagcaaacacagctgatcaaaaaagaatcaagaacgccactgcaatttcacgttattgtgtggtgtttgaatggcttgccttctctgttccatcgtcagctgttgtcaacacgtcctgaagcaacaagcaagcagcaggatcgggatgaagagtgttggagcaaggatatataaggttgtagagagaagac

SEQ ID NO: 924 - DNA, 333 bp, Zea mays
  misc_feature (327)..(330): n is a, c, g, or t
attgattatctctgtgaatccattgatacgtgggcagacatttacagaagaagatttggatctccctgcctttgaaatatatagaccaaggaagatattcgaagccattgacgttccgagaactggagtgccccagcaatcttgtacgccttcaagaacaaaatgttttcaaatccaaatgaagccgtaatgtggatgctcatgcttctttggtactgcaccatcatttttttatttgtgtaaggcttttctggtaaggtagatactgttaaatccatttcgagatttgtgacgcagaatgtgtccggtttcaacatcaatgcgggnnnntgt

SEQ ID NO: 925 - DNA, 425 bp, Zea mays
ttcaggtacttgctgcaagatgccagtatgatctctgatgcacctttgcagtgtgctcgcagtgcaccctctgggagctggattaccactcccattctcttcttggcagagttgaacggctccacctttacaagagtgcttgctttgcgcaccgccaaaaagtctccaccaagtgacagcccgaactctagaatcgctgtctcagtaggtgtccccagtatttcacgtttgccatcctggttcaagacaacgtctcccccagtgttgttgaatatggactgggagagaatcgccatgacagagtctgggagttcagagaacaggttcttgatatccgaaacaccatccacttctttgatcttaccacagatgcaggctttgacaacggtcatgtggttcgttgtgagagtgcctgtcttgtcaca

SEQ ID NO: 926 - DNA, 315 bp, Zea mays
tcctcggctctctgcgttgctaccaccgccgccgccgttcgtttgatcttcaacaatgctaggatctaccacttcttcgccgacatgtagcgagcgagtagtagtgggattgacatgtgtatcgtcaccacgaggtgatagtatggccacttcgttctcaattttttgtttgcttcaagagtggaagggtacggtggtcacttattagctcatgtttgataatggcactaccgcactacatgattaataagcatgcatcatgtacgtagtcatcctatcaaaatttagaaaaatgagcttattgtgatcgatgga

SEQ ID NO: 927 - DNA, 405 bp, Zea mays
gcatgtttggccccgccctcggttatggatgactgttccccttatccctgcggagtgcatataccaccatggtctccattcttggtttaccttggcacgaatcactgtgttggagatggggaaggctgctgttatgtttttacctggctaacttttgttgcgttaccacaggtcacggacaagcccattctgatatatcccaacagtggcgaaagatacgatggtgaaaaaaaggagtgggtggtaggttcattgagcaaacttaagcctattcgtataatagaagctatcttctttagaacatgaaaaaaacaacaggggaaacacccagttttatctcttccatagtttttgtgcatgctgacctacttccctaggttctagtgttaaatgcaagccatcctt

SEQ ID NO: 928 - DNA, 533 bp, Zea mays
gattcaggtagtggtagaggagatagaggtccctcctcttctcaaaccctggctgtttcggcatcacctgtatcagagtaatagtataaaagtactgctgatgtctccatcaaaaacagtgaagaattgagcaatccaccgaccacacgtcttcaaattctatagtagggctagagaaaggcaagcaagcacccaggaagcaaagctggaggtggtaactttattttgtgaaagtggtccatggtccatggacattccctaccctacagaacaagtaagcaatttccacgccgacacttggaccaccctattcgactgtgtgatacaataactatcttgcgtcctttaccaaaggagccttcagccttcctgcctgctagagttttcaggtctgggactttagaggccaacaaaagctaactccgcaaaaactaatccgacccgccaccaataacctcggacggtggtggtttgttaagtatgtcacctcggacggtggaggtttgttaagtatgtctattgtccatttgcac

SEQ ID NO: 929 - DNA, 356 bp, Zea mays
tggtaattgttcttacagcgatattgactggtgactgctgctgatgtagagaagaagggaccggatcaatgaaaagatgcgcgcattgcaagagctcatcccgcactgcaacaaggtatattattaatacatattatgcatcttttcttgtcaggtgcaagtcccttgaataatgacattctgttgggtgagtgtatttaacatgctgtgtcctttatcattgtcagtatgcttattttgtttttcgccgatcttttgtcttactttatcagctccaattgttttcagactgacaaagcgtcgatattagacgagacgattgagtatctgaagtcactccaaatgcaagttcaggt

SEQ ID NO: 930 - DNA, 216 bp, Zea mays
tttcaaggtcgcgactctggtagctttcttcagatgacaagcctgcatagggtgccaatttttcccttgactctccatcaaccgtgctgcttgatacggacgggaaatcttttagttgagccagttgtcgattttgaaaagtgaatcaaatagtttatcgtttgatgcattgcaagcaaagatgctaatgtaggagtaaacgacaaacaaacctgc

SEQ ID NO: 931 - DNA, 507 bp, Zea mays
ctgcagttgacgacgaggatgtcgatgtccttgggcttgagccccgtgcggcggacgaggtcgtcgatggcggagaagatgacgagctgcgcctcggcgcgcgaggcctccatgctggggttgggcgggatgtagtggttggcgggcgggaggcacgtgtcctcgccgagccccgagcgctccaggatcctggtctggaagcgcacgctcttgtcgtcgtcgctgatgaggcgcgtgtgctccatgaaggtggcgaagggcacgcggcagctggcggggggcttgtagcaggcgtagtccaccaggtacaccgccctggggcgcgacatcacgtacacggtgccgacgaagacgaccaggaacgcggagcagaggatgtggaccaggtccagctccagcgagcgccacagcgagagcagctcgccggggccgaggcgcgccagctccagcgccgtggcggccatcaccggcaccagcagcagcgtcaggaagtggttcaccaggtac

SEQ ID NO: 932 - DNA, 218 bp, Zea mays
  misc_feature (206)..(207): n is a, c, g, or t
aaggagctgggtctgctgtcgagcttgcagatcgccctgaatttgagttacaacaacctctctggcgatattccatcagagcttggtaaccttgcactgttggaaagtttatttcttaataacaacaagctgatgggtgaaatcccaaccacatttgctaatctgtccagtttgcttgagctcaacgtctcctacaattatctctnntggtgcccaaa

SEQ ID NO: 933 - DNA, 474 bp, Zea mays
  misc_feature (265)..(269): n is a, c, g, or t
  misc_feature (334)..(334): n is a, c, g, or t
  misc_feature (344)..(349): n is a, c, g, or t
  misc_feature (363)..(366): n is a, c, g, or t
agcagcaacagatgatgtctttcctggctaaagcaatgcaaagtcctggtttcctagcgcagtttgtacagcaaaatgagaagagcagaagaagaatagtagcggcgaacaagaaaaggcggctgcccaggcaagatggtggcctagactccgaaagtgctgctgcttcgttggacggtcaaatcatcaagtatcagcctctgatcaacgaagcagccaaagcaatgctaaggaagatactaaagctagattcttcgcataggtnnnnnatgtctgttgcgttgtctgtctcaggtgatctgtccgggccatcaggttttcagatgtgccactnatctcagcgnnnnnncggagactggtatnnnnaccctgctcatttctaagattaaagaggagtacccggatcgaatgatgatgacgttctccgacttcccatcccccaaggtgtcggacacggtggtcgaaccctataac

SEQ ID NO: 934 - DNA, 463 bp, Zea mays
gatgagatacgagagtcaggtgccagcaacgatttggaaagggggagggaaaatcctgacatacatggaacaattaatatatcaagaacataccaggcatcagaacgatttgctggtgtaaggaatgtgccctctccataggctgcacacttaatgggcggcttatgaacttgtaaagaactattcagcatcatttcatgcacagtgcttttggagcaaggaagccatgcataacggacatttgcgtttccacgatgacatctggtaacctgtacatgcttttcgtgattatggtaacggacttgtccatggtcatccaataatggagtcctgtagattccaataatatccttggattcaataactgaacccatcccctgcaacaacagcttctccacggcttcaatagtgcgctgggcacgtgatacctcacccagattagcttggcgtggtagtaggttac

SEQ ID NO: 935 - DNA, 527 bp, Zea mays
ttgcttgagaggtcaagatagtttaaataactgacatcagaaagtaaaaagggcaaacttccagtgaggccgttgttgtggatatcaagaaaagacagttgtgtgaagttcgaaatagactcgtctaggttccctgagaaatggttactgctcccattgaacaatatcagggagctcgatgactcttcttctttagaacaagagaatgggatttgtccagagaggctgttattactgatatccagataggttaagtaattgatgcagagtaaagactcgggtagtgttccagtaagtgcgttactggataagtctagcttttcgattttgggaagtatttggcctatctcagcaggaatggagccacctaagtggttatcagagagaaaaaggccttgcagttgtactaatgtgtgcagaccaaggaagcatggggccaaccaatgtgttataagaaaggtagatggctgtaacatttggcagttctgcaagctctggtggaatggtgccacttagcatatttcctt

SEQ ID NO: 936 - DNA, 450 bp, Zea mays
gttcgcgagcgacaccgccgattccgcgaggaggagggctgcgagacggagctctctggggagcgagaggaccgtgacgttctgcaagccatcccccgagcgcaactccgtcagctccacgcggagcatcaaggagtacacgacgacgacccagagtgccagggagctctctgtcggcagcagcctgcaggtcgacgacgaggtcacgagtaaggccgttgtgacgaagacggcaggcgttctacggactcccagcaagagccgtgctccggcatctaagacgttggcggcggctagaagccggctggatcctccgaagacgtcctatgccagaacgaaccgtgccgaggtatagtagtagggatctttgtctgcatcgctggtttgcgttgacatggccatatatgttacctttttttggggttatatgttgtgtagttggactcaagg

SEQ ID NO: 937 - DNA, 449 bp, Zea mays
aaggaaactgacggcatagaacacgtcgtcgtcgtcgtccggggctggggtcatcgctgtcatccggtcgtcccacctgtccttgttcatggggtacatgaggatgatcccagctgggttggcgtccttgagtagagccttgaacatgccgtcgtcgaagtcgaggatgcgcgaccgcgggatgaagaggtttagccatgggtgcggcacctcccacgcgccggctgaccggagcaccctctcctcctcgcgcacccggtcgaggaactgcacgaacgtcacgtccttggtgaacgcaaaccctggctcgaagctcagctgatccaggagtgccttcattttctgcaacgattcatatagcaacaacgaatgagtttcctttcgtccaaagcattgaaagcaataataaagttcgcttttttgtgtgtgttcaagctgatctgtacctt

SEQ ID NO: 938 - DNA, 351 bp, Zea mays
cataagggggaagtttggacctgaagtgtgggggcatacattgccacataactatggaaagaacagagattgatcatcatattcctgctttcaagaaaactttgaaatatttgaatggtacgatactatttttctgcttttgagaaaacaaacagaagcctgtttggaaagaagagactggatggtacaaaacaaggcagaactgatcatcatggaactgaagtagagctttcacgaactcccctggagaggtcaaaagcttattaaagcaagcattcttgaactgccagtttagcatccatagacgaaagcaatactgattctggtaacgcgtccacaccctatcataac

SEQ ID NO: 939 - DNA, 543 bp, Zea mays
gcaggtcatacttttgtccaatatccaattgaaatgtttccattcaatatacataccttttgcatttcagctcattataattccttgcatatgcctctgcagacttatgagcgggggtacatagagatgtggctggaggctggccatgatacctgtccgaagacacaacagaagcttgccaataaatccctgaccccaaattatgtcttacgtagcctcataactcaatggtgcgaggcaaatggtattgagcctccaaaacgccctgctcaacttagggatgcaccactgtcatgtagtgctgctgagcatagcaatgttcttgagcttcttcagaaattgtcttcccaaaaccttgaagatcaacgtggctctgctggtatgcttcgtcaacttgccaagcgcagtgctgaaaatcgtgcttgtattggagatgctggtgctattcctattcttgttagtctgctatcaaccactgatgttagcacccaggaacatgtggttactgctctcttgaatctttccatctacgaagagaacaag

SEQ ID NO: 940 - DNA, 531 bp, Zea mays
gcgtggcgcaagtacgggcagaagccgatcaaggggtcgccgtacccgcgcggctactaccggtgcagcaccgacaaggactgcagggcgcggaagcaggtggagcgctgccggaccgacccctccaccgttatcgtcagctacactggcgagcacagccacccagtaccactgcatcgcaacgccctcgctggcaccacgcgcaacaagccgcagccgacgtcgtccatctgcaactccccaggcagagctgcgtcgccaataggagatgatgacttaggggcggctccggcggccatcaacgtcgtcactgacgagaagtgccctttctctcaagcctaacgccacgggacactgctgcgagcctgcgaccaactggggctgacttgtgctgtatacatcgatctccaagcacacactgcacaggatgctgttagtcttgacatattgcggcagcaggatgcacaatcatgatcgactctcgtctcgtcatcaacggaactgtgattttttttagtagcggcgtaggta

SEQ ID NO: 941 - DNA, 551 bp, Zea mays
  misc_feature (474)..(513): n is a, c, g, or t
  misc_feature (521)..(525): n is a, c, g, or t
  misc_feature (527)..(531): n is a, c, g, or t
atttttttctgatgcccatgggcaaaagtggtgcagaagcatatcctccccgttttaaaactatatttgcatctaggcatatattatgtcgtctaggtacataatggaatttatgaacgcgtagaaatgccgaaacattttataatttaagacagggaaagcattatctactactattcaccggcagaaagctcagcttgatattcttcaaggtagtgggaataatcagagtgacaacagccggtctttttacggagagaatggaataacttggcctcattttcctgtttcacacacatatatatatttctgtggattcggtcgagtacagtatggacggcggccattgagcgtcgagaaagagattctccaaactactctctctgtcctctcccactcgtagacatagtcacagccagccactctgttcccttgttttgttcttcttctttttttttccttgaggggcttgannnnnnnnnnnnnnnnnnnnnnnnnnnnnnnnnnnnnnnnaatatagnnnnnannnnnggaggatatgcttctgcacc

SEQ ID NO: 942 - DNA, 416 bp, Zea mays
attttctctccatgttcgacgtgtcgtacaacaatctgaccggagatatacctaccggcgggcagttctccacgttctcgcctgagaattttgacggcaaccctgccctgtgccttcggaactcttcgtgtgtggagaaggactcgtctgcgggagctgctggacacagtaataagaaaaggaaagctgccaccgtcgccctcggactgggaactgcggtcggggttctcctcctcgtgctctgtgcttatgtgatcgtgtcaaggatcgtccattcaaggatgcaggagcgcaatccgaaggccgtagcgaacgccgaggactcggagtgtagttccaactcctgcctggtgctgctattccaaaacaacaaagagttgagcatcgaggacatcctcaagtccaccaacaacttc

SEQ ID NO: 943 - DNA, 209 bp, Zea mays
  misc_feature (200)..(200): n is a, c, g, or t
ccctgatgatcttctccagagggctgaactgcagccctagctcgacgagcttcttcgacgccactcccgcctccgctcttaccagcccaggctgggtgtccttggggaacctgccacggagcaacaccacaagcctcaggcatgcacaccgtacccggagatcattgcaaaaccaacagagaggaggcaagcattcccanagattgctg

SEQ ID NO: 944 - DNA, 459 bp, Zea mays
gctcatgcatgacgaggagctatcagagccagcagagttcatcatcagctcttcatcatgcctggagccttcatcatttcctgcgcaacagttttgttggttcaccataagagtactactagcacatgaaatagtttgatttctcccaccatttgcacatggttgatctgaattacattcatccctggaactttcagaagcctgaggctgtgattcacatcctactccaaaattttgagatccactgttatcaaaaaccacatgtttcagtgaatcaacatcgttaactgaacctgaatcatgaactgtattgtgtaatttagtcttccttcgagcatccataggctcccatatttgctttgggatagcatttttctgtgtagaaccagcacggtttccttttgacactataaagctatccaatgtatagcatctgtggtactgcaccctaggtttcta

SEQ ID NO: 945 - DNA, 428 bp, Zea mays
tctaatgaacgaggaagtcatgctgggcaccatctgatcctctcgtctccgaccagtcactcccggtgcgtggatagcaggttgaaccggctgtcggtccacttccatccgtagttcttgagggaagtcgatcggcggctcatccgtggaatcgccgaggccttcttccattccgttctccatggcagcacgagaggctgcctcaagctcccacatctctgacagggcatcctgcaacctggaattggctgcatctaactcgacaatggggcgtgggtagttagatcctagctcaacccctgcagcctgaagcacagactcaggtgcatcccagggatggtgtatccattccgttggcagccttgccagctccggtagccatcgccggacgtactccccgtgcggatcaaacttgtacccttcaaaca

SEQ ID NO: 946 - DNA, 401 bp, Zea mays
atctgcatgttcgatactggaggactcaaatatgctctccagctcagaaacctcaaagcatatgtctttctcagcaattatgaaggggaagaagccattgctaaaaccactatcttcaacctgaaattgcaggtgatattcaggaggaattcaaagttacagaagaaaactaaaataacaacatcatgataaaaattatacaagtatattttgttccacggttgggttgatagcctagaggtgaaggcggcgttgtccctttcaccaggtcaggggttcgacttcgacccctagttccgcacccttaaataaatcccctcgttgtgtcccgcccgctctcgggaatcgatgtcctgtgcgtcaccctccggctgagccgttgcaaagtggacagttgtact

SEQ ID NO: 947 - DNA, 248 bp, Zea mays
agaaaaaccatgggctgctcgtcagaataaactctaatgaaatcaggaaatgattttcttttaccatctattgctaccttgctgagctcattcagcttctccctggcatcttttagtagaagttcagcatcagtatcccacttgtagaactccagctcccttccttccagaatcttttcgcagatctatttcaaattttcaattcacaaatcagtttactatgcttctattcaggcactacctaattt

SEQ ID NO: 948 - DNA, 425 bp, Zea mays
aaataggacagtaacgttacttaccaaaccataagagccgaaggtacagccaaccgcatgaaactgccaatcccttgaaaagcttcccacgtgaatggagcacgagttttctcacaagaaggtgagaacttaatataaagaccaagaaccgtgacttcaacccagtcacagatgctgactgcaaaagcagctccagcattacccatcccaactttgtaaaccatgaaccagcacaaaggaatgaagacagcgagtgtagtcaaggagctcagaaccaggggaaaaatcaagctctgagattggaggaactttgaaaggcattgagccacactgaaggcgaataaaccagggataagccacaaggcatacctcccggcctcaatcgctatttgtggatcctgacctatgagaggaagtacgtttgg

SEQ ID NO: 949 - DNA, 415 bp, Zea mays
aagagctttagaagttatatcacgctatgagaaaaattagacaaggatcaaatatttgtacaatctacaatgccaagcttaccattgaacgggtactgatagagaacagcacctaggccatcaactattgtcttgaagttcagctcactcactgttgcatttagtgcatcatcaaagaaattcttgagagcaggcacaatcggggaaacatctacatccggtcccaagaaatctagtgcataataatcacgagccattgcttcatagtccctgttgactaagtggacaacatgtcctataatggctaccctcgcatcctctggtgtttcactcatcatgccaaaatcaagaaaagccagcttcccctcaggtgttgccaatatattaccaggatgagggtcagcatgaaagtaac

SEQ ID NO: 950 - DNA, 380 bp, Zea mays
ctgatatttgccgggcgactcggcgcgtaggaggaagaactctccctcggcgcggtggcggcctctcccacaacttctcctaattcaattcgatctcccttccctatccggcatcagcgcgcaccaccactaactagcgaatcccgtttggtcatcaagaagacgtacggctgtctccaatcgaagttccagtcccactccaacgtcggagagagagagagcacatgtctgacttgcgaactccttccctctcctccttcccccaggtcaggagtcccagatcgtgaagccagctattttactctactcccccctcaccacgagtcgcaattcagccccgcgccgcgcgtcgatcttatcctccagtctgattccagcat

SEQ ID NO: 951 - DNA, 521 bp, Zea mays
atttaagatcgtgtcaaaaacctggcagatttcatcagcaggagaaagaaatcaccacacgagtgcttaaacgatgctcataaatatcaggagaataaagtaacagaattacgttttttctacttatattaagtatcacaacaccgggtctccaccttctaagggtgttatagtagctagttataaataatacatttagaaatggtaaaattcctggtccaaactggcttcaacaaaaactggaagacgcgacgcgagtgttgcttcccagaagcccaaccgttcgagtcatttcttcagcaactgtttcaacacatcttctgcgtgccgctccatcttaggtagagcccagtcatgctgcatgatatccaggctgtctttctctgctcccaaactctggatattgccaatcgaaaaagtaaagttctcaaatcttgtcaagacacaagttcaaaaaattacttgtcacaaatatagacatgtaaaataaacaaacaaatccagtaaccgtacacaccaag

SEQ ID NO: 952 - DNA, 371 bp, Zea mays
cggaagtcgacgatgtgcacagctaaatagacgggactctggaggtggcgcgcgactgggcgtcctcgaacgcgtccagatcttcgagcttatcaggcttcaagcacggcggtatgtacgcggtgtagatggcctccatgttcggagtctccttcaggtcgtgccgcaccaccacctccaggggagtcttggcgaacgccgggtagaagcgcatgtggcagacgtaggcgaagattatgctggctggaagcaggggcacgagaacggacgcgtaggcgaacttcttcagggagatgaagccgatcatggtggtctggtaaaccatcagagccgcgatgatcctcgtgtgcatgtgtggccacattcgtccg

SEQ ID NO: 953 - DNA, 392 bp, Zea mays
gagctcaaggcaaagcatggcccgactctgatgatcggcgacggcatgaacgatgccccagcgctggccaaggccgacgtcggagtctcgatgggggtatctgggtcagcggttgcgatggagacgagccacataaccctgatgtcaaacgacatccgccggatcccgatggccgtccagctggcgcggaggacgcaccggacgatcgtcgtcaacatcgtcttctcggtgatcaccaagcttgcgatcgtcgggctcgcgctcgccgggcatccgctcatctgggcagccgtcctcgcggacgtcggcacgtgcatgctggtgatcatgtacagcatgctgctgctgagatcggaatcgaacggcggccggaagtgaagaagtgctgtgcc

SEQ ID NO: 954 - DNA, 215 bp, Zea mays
ggacagcaagccgaggcccctgtcgcgtagcctcgaggccgccgcgccaggacaggtcggtttcggttcgccgctgcaactcttcgtctgtctgtcctgttgcttgctcctgggaatctttttagtgtttgctcatgcggttcctgtgttcttgtttcacttgcaagatttccccatttttgttttagattcagtttccgccgtgagaatttggc

SEQ ID NO: 955 - DNA, 378 bp, Zea mays
  misc_feature (273)..(273): n is a, c, g, or t
  misc_feature (276)..(281): n is a, c, g, or t
  misc_feature (283)..(288): n is a, c, g, or t
  misc_feature (291)..(296): n is a, c, g, or t
  misc_feature (301)..(302): n is a, c, g, or t
  misc_feature (304)..(307): n is a, c, g, or t
  misc_feature (310)..(314): n is a, c, g, or t
  misc_feature (317)..(320): n is a, c, g, or t
  misc_feature (330)..(332): n is a, c, g, or t
  misc_feature (337)..(352): n is a, c, g, or t
  misc_feature (355)..(357): n is a, c, g, or t
  misc_feature (359)..(373): n is a, c, g, or t
ttgcacaacttctagttagaaaatcaaacaggagccgataatattaccttgtcgagcaatattaatagtatgtcacataatgtatagtgtaattcaaatatcaatactaatacaagtacccaatcagatactattactaatcgtcgctcgacacgcaacattatttgcatcgacttatatatagcttacatgcaagaggggagggaagtctgagagttgttgagcacataaaacactcgctaaatacaccgagccggagcaattccgtatatntcnnnnnntnnnnnngtnnnnnnacggnntnnnntcnnnnncannnnaataacaggnnnacggnnnnnnnnnnnnnnnncgnnngnnnnnnnnnnnnnnntgctc

SEQ ID NO: 956 - DNA, 418 bp, Zea mays
agcggcgccgcaagccgaacgaaccagagagagagaagcagagaacccctcctcgacctcggcctctcctcttcctcctccgctcccaaaatcctagggttttgctcgccgcggcgcgatggagcccacctcgtcggcgtcgatcgcgcggcagacgtgggagctggagaacaacattcccgcggcggcctccgacccggacgcgatggacgcgatctaccgctacgacgacgcgtctcaggcgcgggcgcagcaggagaagccttgggccaacgacccgcaccacttccgccgcaccaagatctccgcgctcgcgctgctcaagatggtcgtccacgcccgcgccgggggcaccatcgaggtcatggggctcatgcagggcaagtgcgagggcgacgccatcatcgttatggacgca

SEQ ID NO: 957 - DNA, 389 bp, Zea mays
  misc_feature (375)..(377): n is a, c, g, or t
gagagagctggtgtgagagatgcgtagtcaccacactcacgcatagtataccatacaatacatatagccatataggtcttcctgttcctgggatctgtatccttagctgtcagtatagtgtagtccatacatacttcgttctcattgcaagagatgattgatggattagttagtgctctgtaacataagcttatttataaatggattaagattactgtggaatcagataccatcttctcgcagcactctgtgttcatgtatcggttgctcaaaccatccgtttgcttgcttgctttcatgtgaagaaaaggagcagtctgcatcgcctctctctctgaagcagctagcgtcctcttgctttttctatccacgagnnnccatcactaaaa

SEQ ID NO: 958 - DNA, 357 bp, Zea mays
cacgtcgatatcagcagtgccaacagatcagaaatataaatagtagagccgagtgcaaaaccctcaaatcaacattttacgaacatcatcaccatcctctaattaattgtacacatccacattagcagcttataataattaatcgaccaacacagcactcaagctccctagcttagcttacaacagatccagcacataacaccagagacacacggtgaaactgaactgaacacaacacagcacagaagacagcacatcgaatcctcctaattactccattaattaattgagcaacgacgacgccgacgacgacaacaattagatgaagcatggagaccaagcctaccaacattaaca

SEQ ID NO: 959 - DNA, 364 bp, Zea mays
gcagagagacattgtccctaatgctggaagaccacagcagcggttagttatgaagaattggtctccttacaatgatgtttccaacaacaaacagtacaattatgtcgaggattcgtttgctcgtagaaatgttggtaataatgctgcatcatcatcatcccagatgccacgaccagccgtaagatctaaccttaattctggattgcataatgatgcatcatatcataattatgatagcattatggctggtacctctgccatgaagattacatctacagctgagaccgggaaggttcctgaaagggttctgcgtggtgatttggacaagggtcaaacaaattatagattggaggatcaacatgtc

SEQ ID NO: 960 - DNA, 390 bp, Zea mays
cagcaggagcgcgggcaagagcaggttcccgttcgcgctcgccgcaaagccccacgtctgcggcaccaaggacaaggaggctgctccggaatcgtcaaagtcggagacgtcaaagtcgaaggcagcggcggcgaccaggagcgatgacaagttggctgtggtcaagggcggtgccgctgccgccggtgatggcgggccgcagctgaagcacaggaagcacaagacgagcctgtctgcctgttagtttttagatatctacaagcacacagtataggccctgaatgaacaacgactgtgagtgagagacgctatcgatgtgatgctcatttttttttcttggacatttgctcagtgaaaaatgcatagcgttaccagcgcgtgtcttggact

SEQ ID NO: 961 - DNA, 357 bp, Zea mays
cgagatacgcgaggccggttcaggacctgaacgacagagacatcagcttgtttcgccctaagctacataagcaggagcttttgagttttaaggataaattggttggtgcatgaattgaacaccactttctgtcagtttatgcttttcggatgaacggttcatggtatcaaaaccactcaggtttgaatcatggttaacacaattaaataaaataattgatgatcaaacgtagttcaggccttcagaataacgtacatgtgagttgccttcaattgttggatggttcagtgatggggagagatgtatactgtgtatgattacagttttgttctgtacttctttctacctctgttaggc

SEQ ID NO: 962 - DNA, 368 bp, Zea mays
actcgccggctggggctacgccaactgcgacatccgaggctacctggcggcgctcgacatcatgcagagctactacccggagcgcctcgcccgcgtcttcctcgtccacgtgccctacgtcttcatggccgcctggaagatcgtctacccttttatcgacgacaacaccaagaagaagttcgtcttcgtgtcggacaaggacctggacaggacgctccgcgaggccatcgacgactcccagctgccggagatctatggtggcaagctcaagctcaagctcgtcacgccgcctgcaaataaattaccaagccactagctaggcacatgcatgccggtggtttcacggtgatatcagtcagtgcaaataa

SEQ ID NO: 963 - DNA, 785 bp, Zea mays
ttaaataattctaagagacaaacaaacagtctagcttatttgcccagattatataatctaaccccttagattatgataatccataagcaagtgaggaggtacttatttcagattattttttcccacttccccactaccctttcaagtttcctagaaattacccaccattgccattataatccaccgaatcgttttttcgccttccgtgataatattgctaatgcaatatttgtcaatgtcaattgaattttttaaaattatttatgtaataaattatgaatactcagaaacgtttgttacattgttcatctcatatatgagtttcaacctagtacaaatatagagggcattcttgtcttcctcatacaaaagaatcctattaacaactcaaataatctgggtaaacaaacagaactactcagattatataatccagattatataatcctccaaaaataatccagattatataatccatggggtaaacaaacaggccctaaaccatcacgtattccggtattcacaaatttgctactgaagttgattttatacattaacgcatatatacatctgacgaatgcccataggtctacagcagtgcgtgacggaattctactatcacaagtgacaactgacaacccgaattcctgggtgtcaccggcacgagaagattgcccatgccctgcatcagcccaatcaattcgcagatgctacgcagcttgaacccccaaatgctaggcgcctaggcttccatccatcagtgtcgtttctcgcttattaccgtg

SEQ ID NO: 964 - DNA, 340 bp, Zea mays
atgcaacagcccaaatctgtaattaccaattaactctgcaaagattaatcagcatgtcctaatctcttctgcagtgttgccgcagatcaacaatctggatgccgactaagtgatggaagatacaaaattctagagcatgttgctcttgtattatccaacagtcaaaaggggggaaaaactctataacgcatgtttaattattatcagccatggttgggaaaaaacagcaactgttaaaatcttcaggcagccttgttattgcagtagttctccagccactccatggtaacactcttcggcctctcaagtggcaggccaagggcacggtcccagatgagct

SEQ ID NO: 965 - DNA, 351 bp, Zea mays
ggttgaagacatgaccaagttagagcctttggtaggagtgtcttcaatgccactgggtgcgccttgcaatagcacagtttctgactgttttgtccccgatgaagatgcttgtatggagtcctttgcagtatttatctctgccacaactgcgttgacctggaaacaaatatttccagtattgattgtgtggtcagagaaactcacattccatatatacgtcttctcgagcagatctgtgattggatcaggaataaagccgatcggattgttggcaatgagcatatcgcacggcttcttgatgatgcgttgcgccatccgaccaaagaggatgaagtctgtgtcacctgtctc

SEQ ID NO: 966 - DNA, 336 bp, Zea mays
tttttctgtgtgcacaataagatcaaaggggctaacaagttacaccaagtaagttgcatggcattaagaggtttacctctgttacgatatgccttatatttataaactatattagctaaaataacataaatcaaagcatacttatcagcctaatggaattcataaaatttctaaggtcagtgacctgcaagaaaaataatagaatttaattttacattgattgcaaaggtcctcagaatcaaacaggtatatcatgaaaaagaaacaaaaaatgaaatagctgaaccatgaacaagaccacataagcaagagatatgagcactttcgaggttcaga

SEQ ID NO: 967 - DNA, 353 bp, Zea mays
tggatatgtctgttcagtttagagcttatattctctaaacatgaacattcaaaatcgacagcattgtgcgcacacgaaaattctgcagaaaacatttcagacggacaaggatggccaaagtatggcacttcattgtatatatgtaggtagccaaggctatggtgtacatgtggacagggaattgctttcgcttacgtgacatggagacacatcctgatagccattgctacaaatcctcaagaaaccctagatagcggtaacaagacatcaaagaatggtggacatgagtatctccgtcagaaagtcgatcctctgcagcctctcctccagccccagtttggatgatgcatcgt

SEQ ID NO: 968 - DNA, 218 bp, Zea mays
agctcgatcggcacgattggctctgcttgcacgcgaacctcagtcacctttgtatgtatgtatgtgttgtgtaggctactaactagctagtaactgatgacttgtgtgttgttgtgtgtacggctgagctacctaagggaatgaaagaaagaaggtaggtagcttgctagtaggagtctacggcggcgacggcggccgagaagagaaggagggcggtg

SEQ ID NO: 969 - DNA, 339 bp, Zea mays
  misc_feature (293)..(296): n is a, c, g, or t
gcaagcctcgacggctggcggcggccgaagcgatgtcgcggcggccgttggagtgtcatcttgcggcgtaagacccggactaccacccactggccagacgacggaggaggaggaggcgcgcgtcaggcgcgaggcggagaaagccgagctcgaggaggagatcgccacgttgaaggcggagatcttcgccctggaggaagagttggccaggatggatgccgccgccgccgccgctacgcgcgcgagcgcttctcactctcgtgtttcagctaaaaatgagctgaacagggcannnngagaggcgcctgctgaggaaatgctctctaatgactattatga

SEQ ID NO: 970 - DNA, 346 bp, Zea mays
gtggtggtggtgggattggatgacatggtggtaggccatcccagcatatccaggtgctgcattaggcgctggagcaggggtagccgcagctgttgttcggtagacaccaggttgttgcaattcaggccttactgccatctgaggaattggcacggttggctttggcgttgtgtcaacaagggtcggaggtggcaaagtgacttgtgcaccaggaggcacgccatatgcctgatgtgcgttctgctgcataggaacataatacatccctgtatttggggcgaacgtaggtgcctgttgctgcctttgcatggtctggggtgcctgctgagggacaggatggtggtaa

SEQ ID NO: 971 - DNA, 621 bp, Zea mays
  misc_feature (58)..(60): n is a, c, g, or t
gaggatgatgagatgctggatgttagtgtttcatttttggttgattatgttttccttnnnttactactgcaatactatttagtttagcttgaagtaacatatactattcgtattgcagttaatgactttggtgatatggacttctcggtaagtgtctagtggaagcctcctttgacgattaaggtgggagcaatgtttcatggtactttcgtcattgtagaaactggacataggaggtgctgatgacgacgatattggggatgatgaagatgatgtggttgaaagtgctaacaaaggtacatcgttctcgttgtcatcatgattatttatttgctcaagggcagttgttcctggatttagtcgtagctttacactatcatgggagtcctgacattctactacttatttgggtgatttggatattggaataatcttgttggatgcccagaatttatttctgaaggtgtattgacatagtagcctagaatttcttgcaaccttagtatgaatagttcactgacccttttcaagtgacatcaatagtagcatgcaatagctcacatatcaccctgtcagcaaagaaggatggaatgtagaatttcaatttctttggttgttact

SEQ ID NO: 972 - DNA, 371 bp, Zea mays
ttcctctgcggatgaggccgatttcgctgcctccgactccgcaactgcctctgttgtctctgcctacctctcggttgctggcgagggggccgacctctcgaaagttggcattttcctctcatccgccgcgcgccgccgatcgccgccgtgccttatctgcttcgatcctatacgcccctctgacccggtgtggtcatgctcttcatcttgctttgccatcctccacctcccctgcatccagtcatgggcgcaccagtcagcatccgggcccgccgtgccgtgcccaacctggggatgccccaagtgccgcttcgcctaccccaagtccgagatcccctcctcctacgtctgcttctgctccaagaccatag

SEQ ID NO: 973 - DNA, 350 bp, Zea mays
aatgaacggcacaagggttaagggcagcttgcaaaaggttagcgcacgtatgcttgcaattgcaaggatatatcttatctacttctatctcgatctctgtacaacttccgtagtgtttcgtttgctcggtctgtctgatttcgtgcttttagtttcttcttctttctttttctttttcctcctctcgcgtgtgcctcttgaaacttgatatgtggtgtaaccttgtcttaatttttaatctggtgtttaataagtcgtcttcaaaagttgttctctaggactcgatcgatcgatgcgcaagtgtgtgctgatcaatgtttccatgcatgcatgggcttctgcttgttgtt

SEQ ID NO: 974 - DNA, 350 bp, Zea mays
  misc_feature (70)..(70): n is a, c, g, or t
  misc_feature (72)..(73): n is a, c, g, or t
  misc_feature (77)..(77): n is a, c, g, or t
  misc_feature (109)..(109): n is a, c, g, or t
  misc_feature (115)..(115): n is a, c, g, or t
  misc_feature (163)..(165): n is a, c, g, or t
  misc_feature (171)..(171): n is a, c, g, or t
  misc_feature (183)..(183): n is a, c, g, or t
  misc_feature (188)..(189): n is a, c, g, or t
  misc_feature (215)..(215): n is a, c, g, or t
  misc_feature (303)..(304): n is a, c, g, or t
aatgaacggcacaagggttaagggcagcttgcaaaaggttagcgcacgtatgcttgcaattgcaaggatntnncttntctacttctatctcgatctctgtacaacttcngtagtntttcgtttgctcggtctgtctgatttcgtgcttttagtttcttcttcnnncttttnctttttcctccnctcgnntgtgcctcttgaaacttgatatgtgntgtaaccttgtcttaatttttaatctggtgtttaataagtcgtcttcaaaagttgttctctaggactcgatcgatcgatgcgcaagtnngtgctgatcaatgtttccatgcatgcatgggcttctgcttgttgtt

SEQ ID NO: 975 - DNA, 659 bp, Zea mays
tatttttctcttattgaaaaggcagaacattttgtttacatcgaggtgtgttttcttagctctgcagttttaagccataagatttaagttttattgtaacacttgatattcagagttattcacgttcatatgtttgagaattaatagacctcatatttcgatatgcacatataattacaaatagactgatatcccttgtaacatacattcgttctgctggcctttgcagaatcagtttttcatttcaggtctttcaggggatgacacaattaagaatcgtgtattagaagcactatataggcgcatacttagagcagaaaaagagaaaaggcgcttccgggttattattgtcataccacttttacctggttttcaggtagcgtgcttttgtatcaatgacactatgacacatggtttggtgcttaaggttggctgtatagttaattgttttatttcagggtggcattgatgatggtggagctgcgtctgtgagggcaattatgcattggcaataccgaactatttgtagaggacctaattcaattcttaaaaatctgtatgatgtggttggctcgaaggcggatgattatatctcattttatgggcttagagcacatggaagatcagatgatgggggtcctctggtcaccaatcagata

SEQ ID NO: 976 - DNA, 413 bp, Zea mays
gaccagcgctaccagcagggcctccccgccgagtgctccatgcagtagcgcccggttattcctcgcccgtccaacaatggcgcgcgcgcgcgtgtgtgtgcatgtggtccgctctactgctaccgctacgacgatcggtgtcgatcaccggatcaaggcaagacgaaaggcatcgaaacatggtagataaataaaggacttgacgatttgtaacgcagtagctggtgcgtgcgtggtgtggtggtaagaaattcttctgctgcctgtgttcttgtagagcctcctcgtacgtcctcgcccaccctgttggtacgtgtacggtgtacgtagtctgccgccgcgcgctgttcgtgttcgtcgtgtctcgtgtctgtattatactcgtcctccccatcaaaaaaaaagttgttcca

SEQ ID NO: 977 - DNA, 370 bp, Zea mays
tgcacctcatcaccgtaccccgtgacttcgcccgcctcaagctcgtccacatgtacgacgtcgtcgtcaagacccggaacgtcttcgaggttcgcgacgccgccgcagcctgatggtcttcgtggcgatgcaagctagctcttttctgcgggctcgatcgtcaggccagcgctgtgctgggagatctgccggcctgtcgccgccgtttcagcgtacgtacgtattgtatgtttgtgattggtatgagtacagacgtgcgctttgcatggcgcaggccgagctcgtgcgtgcgtggccacctctgccgccaaataaatgctacgcgaaagcgcgccgccgctgccgtatgtatgcttcttatgtccgaact

SEQ ID NO: 978 - DNA, 593 bp, Zea mays
acgatctgcgcctttccccgtctcttccgtctgctttgggtggcaaaaccctaaccccctttttttcccgcgtaggcacgtcgtcctcccgcccgaggtcgccaagctcctccccaagaaccgcctcctgtccgaggtaaacgcctgcagttccacctgcatttatgttgattgcgttcttgccctgttggtttggttatctgatgcctggatgaattttttggtgtggggatttttccccttctcttctttgcagaacgagtggcgcgcgatcggagtgcagcagagccgcgggtgggtgcactacgcgatccaccgcccggagccgcacatcatgctgttccgccgcccgatcaactaccagcagcagcaggaggcggctgccgcgcagatgctggccaagtgagcccccggtggccagggcggcgaccaggaacgtttaaaaccctaaccccctttccatctctaaaaggggcgtcgctgttctgttgatcaattcctctatgctgttagttggaaacttcgggtgtagttggtggatttgctggtgtgtgccttgtgttcgtggaaattcctgtgaaggaactgccatg

SEQ ID NO: 979 - DNA, 364 bp, Zea mays
  misc_feature (218)..(222): n is a, c, g, or t
  misc_feature (234)..(235): n is a, c, g, or t
  misc_feature (245)..(260): n is a, c, g, or t
  misc_feature (274)..(295): n is a, c, g, or t
  misc_feature (340)..(345): n is a, c, g, or t
  misc_feature (350)..(356): n is a, c, g, or t
acacctctcctaggaggaacagagatccagagaaccttttttctcttctggatccttgccgccttttggcgttcgaaagggggttgttttgcaataccctctctctgttttttttcttcttcgcacaaacccacctcgtttctctacttttattgaggaacagagctggttttccaaaaaaaaaattctactttgattttccataaagacaacctctnnnnntctttcttctanntccatccaannnnnnnnnnnnnnnnccgcagccatcgannnnnnnnnnnnnnnnnnnnnnagcgcacaccaaatcccctcctcctccccctcggatcaggagctnnnnnnagcannnnnnncttttata

SEQ ID NO: 980 - DNA, 571 bp, Zea mays
aggtgccgaccagcaatggcgagacagcgacgacgacgacgacgacgacgctcgtcgcgttcgacgccgacaccggcatgaagaaggtaacgacaccgtgcgcgccaacctgtttcttcttcattcgtccccttttgtcgtttcgtttcgtgctggatagaccgacgcgcgcaggctgaccggatatgtgcttgctgtgaagccagaagacatcgtcagggagttgaacgagcacccgcgtcgggagttcacgacggaggacgagacggacagcgacgacatgggcgacgagtacaccgacgacggcgaggaaggcgaagacgacgacggcaaaatgcagtacaggatacagttccagaggccgaacccgggcggcaccaacaccgcgccagcaccggcagcagcgacgacggctgcgccagcggtgccgacttcggctccgaccagcaccttcctcgccatggttcaataggggcgcgggtggcaggcacccctctcaaaccgtacgtacgtatatgcgtccaaaccaaaaaccagcgcgcatcaccgtcaccgtcacctcctcctttac

SEQ ID NO: 981 - DNA, 267 bp, Zea mays
ggcagctcgacgccctcgcggcttatgctctggaaggagactcgatccagcgccgcctcgggcttgggaatctgcgccaccttctccaccacgaagcccttggccctgtccacgaggccggccatcaggccgacgctcctctcccgtctctcctcctcccctcctcccgcttctgcggcggcgccggacctctcatcctctgtcgtgctcatgttggggaacggagatcgtgccgcgcggccggaggcggtgtgtccctcgctcgac

SEQ ID NO: 982 - DNA, 446 bp, Zea mays
agctctatacctgacctgccactagcgaagcatacttcgtcgacgtcgagcacactcttgcaattaatccaccgagttcggtttagtgttttactactctcagacgtacgcataaatatagcatagcatcgacaataataatgtcgctcgtgagtcggcgcagcagcaacgtgttggacttggaccccttctccctcgacctctggtgggaccccttggacatgttccgctccatcgtcccgtcggcggcctcctccggcggcggttccgagaccgccgccttcgccaacgcccgcgtcgactggaaggagacgcccgaggcgcacgtgttcaaggccgacctccccggcgtcaagaaggaggaggtcaaggtcgaggtggaggacggcaacgtgctcgtcatcagcggcaagcgcagcagggaggaggaggacaagaacgacaag

SEQ ID NO: 983 - DNA, 410 bp, Zea mays
gcgctgctctactcattgcctctttcggtatcgtgatccgaaggaagatggtgccactgatttgtcttaatctattttgcttgacctgagggctggggcgctggcggcccagagatatttccattgcttttccaggaagaacgcgttacctttgtgcacgagggtcagaagcggttcttcgttttccttgctgtatatgtaaaggccaggtaatagtagaaaggattcaataacattgccgcagaaggaggtttctgtacacggtgggaagccagtaccaccgaaaggaatttcatggaatcgcaatttttgtagggtgtagggggagattccacgactgtaaatatgatgagatatgaaacagaaaagggggtggcagatcaacatcgaccttctgtaattagccagaa

SEQ ID NO: 984 - DNA, 699 bp, Zea mays
  misc_feature (657)..(696): n is a, c, g, or t
ttattacaaagttactagtagaattttctacacgtgaacttaaattttccaagtatgctactactgattgtactcaagtgtccctgtgcacactcgcatgagctagcatctgccgatgctcttttccttctcttccagttggtagtcttttcggtctgaaatctagattgtcagatattctcgttatttggcaatccatcaaactgcaacttcttaactactgaagcagcaccttgatcaactccaagtaaaagacttgtgtatcctccttgtacaccctgagcatccatttctgaagaactcaaatacatattaaagtgtggcactattctctgattcaaaagccattccaacttctggaacaaatgaagtttgttgaattttattagcgacctgttgtacagggtaaagaaaacgtaagcatatttatgcatgatcaaactacatcaaagagaaataatcgatgaaagagacatctaggtgaccatacctgagttccttgtgcgtcttcatctccatgttccacggcaactacatttatctcgtcgttctcgtacccgacgacttcacgaatcacgatctccatcaagtggacagatgagttgatcggcctctatgttggctgctggacctgaggatgaggaaatatccatggcnnnnnnnnnnnnnnnnnnnnnnnnnnnnnnnnnnnnnnnngtc

SEQ ID NO: 985 - DNA, 426 bp, Zea mays
tggagagggtgagatcacaaaagctttcaaccgccgggactcaaagctagaaaagccatcgccgccaactccaagaccggcccgtccaacttccaggcattcccctttgacgccctctgctagagtggcaccgatacctgcgaggagaaaatctgtcacgcccaagaacgggctttcacaggtggacgatgacgcgaggagcgtgctcagtgtgcagtctgagcggccaaggaggcacagtatagccacctcgactgtgcgggacgacgagagcctcacgagctccccgtcgctcccaagctacatggttcccacagaatctgcaagggccaaatctcgcctccagggttcagcaatggccaatggcgcagagacacctgagaaaggaggctcaactggaccagccaagaagaggttatccttcca

SEQ ID NO: 986 - DNA, 697 bp, Zea mays
tactctgggttctttgcctccatggtggaggctggagatgtgagagctgcctttgtgggacatgatcacattaatgacttctgtgggaagctcagtggtattcagctctgctatgctggtggatttggttaccatgcctatgggaaagctgggtggtcaagaagagcgagggtactgtctgtgcaacttgagaaaacagacagcggtgaatggcgaggagtcaagtccatcaagacatggaagaggcttgatgataaacatctgagcacaattgactctgaggttctctggaacagaggctctaatggtaaaacactctcctatgcctggatacgatacttaactcaaacctgccatagtaactgtagagtaggagactataggtggcttcggtgaatgattctcgtaaaaggggggaaaatatctaggacaagtgatatgatgtttgatatatggtttatttctcgatgacatgaagttattcttttctatgcaacaactaatctatgaattgccttgacagggaggcgcgggaaaaatcctgatggtagttaacttttgatgcagacaggaatggtgctccataagggatctctacatcggtgtgtattgttggatggccagtttactatagaatcagaaatatgcagaagtgtgtacatgggggagaaggtctatacagacacatacacgcagg

SEQ ID NO: 987 - DNA, 401 bp, Zea mays
  misc_feature (388)..(398): n is a, c, g, or t
taaaaactaagagtcaacatagtaaatgaaaatatttatgttggcatatattatatacatggacacagtgatccagccgctatgtagtgtggtttgaactacacaactaaagtagctaaaagaatgcaagatagggttgcgcgaaccggctaggtggcactatattggtctccatgatccaagatatgctttctgggtaccatggaactctttctcctacaatcaacttgagatatcgagggcaagtgggtcgttcaaagatgtgttaatgttgatattggtgccaatcgatctactgatggtggcgatgatgaaagtgttggcatctttcgtcttcaggagcaaccccgttcgataagaaaatcgttgattctaaagatctcaacgnnnnnnnnnnngac

SEQ ID NO: 988 - DNA, 164 bp, Zea mays
cacagcgcgcggcggcgtggatcccgtctccctctcctcgatccagccctctgaaccacatgcatgtgatcatgcacgggctggtatggtaaagggcgcgccgtgctgctagactcgtatgggctcttggcagcaaggagagctgcagggagcagccatggatg

SEQ ID NO: 989 - DNA, 395 bp, Zea mays
cgtatagtaagtatgtcgtgccgtgcgtatgggatctgggcaagttgtactagtactagtagttagtggtagagtcagggtgctcttcacattttccatgtttcgtgttcgtcgttagcttagaccactcgcactgtactgtactgtactgtgtgccataccgattgctgtatacgtacggcagcacggagcagattagaggacccagcagcagttgttgtgccagccaagaattagagagtagtaccggtcaaattcaacagggcccagtagttgttggttgcagcatctcttgtctctctgggtttaccgaaactaaaacactgccttagttttcagccgcttcagatgtttgtactcatgtactgacaagtatgttgccataagcatgcaga

SEQ ID NO: 990 - DNA, 577 bp, Zea mays
cagcacaaggtattagtgtgtgtgtgtcaacttttgtttctagctagctagttccttaatgaaaacaattggcagccttttgtactatattctcgatcggcgcatatgctcatatcatttttctcctcaactagggctctgaggattccaaggataacggcgacacgaagcaagcagacctgcggagccggggcctgtgccttgtcccagtggcgagcacatacacggtggcggccgagacaccggagttctggcaccctacatttggaggcacattccggtagacaaacaaacaacctcatgcaaagagtgttctgaagctaaagcaaagcaacaacctggctcatctgttcttatcaaactaagttttgtacacagatggtgatgatcgtccagttttagtagcaagctaagtagcctgctgagacggaaagcaagaagtcatgatgccgcccaaagcaatcgaaggatgttttgcaagggaaaagacgtacgagatggatatgataataggtttccggtggtctcttctaagacatgcatacatgctggatcaggtgcagaagagagaatgatt

SEQ ID NO: 991 - DNA, 406 bp, Zea mays
tcaactatcaaatggagcacaggacagagtggtgccaatgcaatggtacctcggccccatgttttttatttgccaggaagttctcctatagtgcggccatgcatcttttggaacaaggagccattggcacaccgaaatctgctcagctgatgattaacttttaacaaaattgtttacacaagtctgcgctcacttttttgatgggtcattataccgttcacaatttcaccagcctcaatgggagctgtagcatttgcagcggtagctacagagacatggagtatcagagtattgacagcgaccggaatgcgcttagacagctaaggacttgaagagagttgatgcacaaactacagagcctcggttttgaagtttgtcagctctatcagtatgcgaatttccaggg

SEQ ID NO: 992 - DNA, 405 bp, Zea mays
gctccatccatttgcttacttatatgaagtatgtgtatctgtgtccttccttctcttgctatatatcttcaagcgcatgcatgcatgggcatggtataacacatagtgatgtagagctatctagctttaccttttttacgtcgtcgtcgtgattatgctgatactaatctgggaggtataaacttaaacggttaaaccataccttcttgtccgacgttgagggcggcagttgctatatatggccgccgtggcgtccagcatgggaacaccaccctcctccatatgatccacctccctgtcttcctcctccgttgtctcgtgggggctccacggtccttggtgccttggtggccaaggggattaggagcggtggaagccacagctacggtgattccagtcattgat

SEQ ID NO: 993 - DNA, 358 bp, Zea mays
atctgctaattcatctggtggtactcttacttctaactcagagctagggcatggttcatccaagagctctatttcagcgtccattgattcaccctctggagtagggaacagcttagagttcaacttcgccgctgttgagaggcatgttaagaacacgggcacgaacggcagagtcgatgactcggggaattctccatcgtcaatgatagctttcaaccaaggagagccattaatcagcctgaaacttgggaagagggcttacttcgaaaacgcctgcggaggacaggatgccaaggtttctgcagcttcagacgttacttctgcagccagcgtggtcaagaagactaaggtgtctcag

SEQ ID NO: 994 - DNA, 907 bp, Zea mays
agtgctttttatcactctattcagcacttggactgtttgttatcctttatcagtaatccgtactctaataagtttcacataactcttcccaagcaattcacaagccatgaaaaatatcacaaccagtacatatgggtattttgttgctatggaaaatataaacttacaccgtatttatgtttaccggcttttaaatatctgaacttgagctactaaaagtgagatgaacaaacaaacgatggtacttataattttttttcttcaaagcttttgctagctatcattttgagcaacatgcttccaacaacaattctcgatcctgatgaccttatagtttgctgtgctagataatgatattcagaaacgagctctatgtagctgctttctaacttatagtttgctattgacccgtatatgacaaaatagacaatgcatggttaagcagtcaggctaagatacattaaacatcgttgtttgattgtttctaaatttgggtgatatttctaactttagcacaggcttcatgcttttgaatatacaatatcttctttcagggtggtttagtacgagagaaattatgggatttgctgggtaatgagcctgacgttatcatggaagaaggcttcccgaatgccaccggacgtgaacaatcaataaaagggttgcggacatcggaattttgcttgcacccagccggtgacaccccaacctcatgtcgcctctttgatgctattgccagtctgtgcataccagtcatcgttagtgatgaggttgagctccctttcgaagggataatagactacacagaaatctccattttcgtgtcagttagtaacgctatgagaccgaaatggctaacaagctacttgaggaatatttccaagcagcagaaggacgagttcgaaga

SEQ ID NO: 995 - DNA, 234 bp, Zea mays
tatttctgcccgaataaagaaaacttcggcacgatttcgagggcgcgcagcagacgtgtgtctctactctctagtctctaggcatgagcacgagcctcaacatcgatcgagtggttccaaccacatcgcccgacccgacgcttccagcagcagtcgcgaaagaagtagcatctcgccgatggggacgggtaccagaccgtacggaccagggagtctacaacttgacacgcttca

SEQ ID NO: 996 - DNA, 476 bp, Zea mays
tacgtgcccacctgatgaactgagctgaacgtaggttgcatgcactgcatgtgtatagctaggcttctcagatcgcttcgtgtggcgtaaggtgtggagcaacgacaggtacgagagcgcggagcaccgggtgtcggtgaactcggcgagggagaggttctccatgccctacttcttcaacccggcgacctacaccatggtggagccggtggaggagctggtgagcaaggacgatccgcccaggtacgacgcctacaactggggcgacttcttcagcaccaggaagaacagcaacttcaagaagctcaacgtggagaacattcagatcgcgcatttcaagaagagcctcgtcctcgcctaactacgtactgctagtactggcctactgctaggatccatgccattgccatgtcgtcttcagattcagagcacgccatgtcgtcgctagcttcgtggtagaacaaataatgatgtgc

SEQ ID NO: 997 - DNA, 352 bp, Zea mays
tactgcttccgcgtgttcccgtccgggcaagctcttggcggccacaagcggtctcacctctgctcggcagcggcagcggcggcggccgccgcccccgtcacatcaggcgctgatccgtcgatcacaatgaggagcctgggtttcattgatctgaacctccccgcgcccttcgacgacgtggaggtctccgccatgtctgaccccttcctctcgtccaagccagcaggttcttgaaagctagcagagcaggcaagccggccgctttacctcgctcgcgatatggctggttccagtggcgacgattcgaggtaaggatcagagacggagagaaagacctgctgattaacgaagc

SEQ ID NO: 998 - DNA, 379 bp, Zea mays
gactcacctcgccgatgtcctccctgccatgtctgtcgccgaccatcgatctccatcgtgctgacgctcggtcttcaccttgacgtcgatctgcatcaaggatttggactgcgtgttggacctcacctcccatcgtcgcagcagtagcccggcaccatcgaccttccagtttgtgcccctcgacccggctctgctcttgtgtcgtgcgcgcgctttctctagctgctctagctgcacgtcgggtgtgtactcatcttccgtcgtgtccacctactcgtcaaattgaggagccagcagcccccttgctcctcgtcgtgtccacgacatgctcgtcgatctcgacgatctatcttccaattacgtgctacttgtgttgagc

SEQ ID NO: 999 - DNA, 454 bp, Zea mays
agcagggcctcctccttcggggaccgcagcagcagcagcaacagccagggtggcgagctggaggaggaggaggagaagagcaaggtgcaacaacaagtcgccatggccagcgtcgtcaagcaggacgccgaactgaacggtgagcgcagcgagagccggcggagagaaggagaggagcgccatatccctgaggtgtgatccccacttctgaaagaagttagattaggtcttgtctcgggttttccatcggtggagtggaatcgtgatggccagaacgtaacagggcagagcattttttttttcttcttcttcttcttggtttgctcagagaagctgagcgcttgcgcttttgtgacgctgtaaacccgtctccgagacaaaccccgacccaagcaaaattttgtgggggctgtaaaatttttgcattgatgaatcttcagaacggggactgacg

SEQ ID NO: 1000 - DNA, 301 bp, Zea mays
  misc_feature (133)..(133): n is a, c, g, or t
acccagatccggctgggaaccccatccagaacagatgagaggtacggacggtaacgcgcctcacacacacacacactcacacacaacaagctctcattgttagcctgtgatctaagctaagagaatctctgcntggcgcgcatttcatgtttcagggaccgcgtcctagatgaagccgccgtccgtacgtcggcggcagggtcccggcatctgatgggctgcgtcttggaagcgtgctcgagctctgtccaggactagctcagaaaccacacgcgcccacacggcgcgacccatcgagttt

SEQ ID NO: 1001 - DNA, 448 bp, Zea mays
ccgcctgcatcccagtcacagccgccgccgtcgtcctcctcctcctcctcctgccgcgcttctgctcaccggccggcgacaagttgacccccggggagtcgctgttgcccggtgagaccatcgtgtccgacggcggcgccttcgcgctgggcttcttcgcaccgtccaatgccacgccaggcaggcagtacgtcggcatatggtacaacaacatccccgtgcagacggtggtgtgggtcgccaaccgggacgcgccggtcaccgtcggcgacgcgcgctccggcaactcctcgtcgtcgtcgtcgtctgcgccgtcgcttgccctggctaacggctccgcctccaccgacctcgtcttgtccgacgccggcggcggtcgcgtcgtttggaccacgaacaccacgagctcgggtactggttcgaccgccgtgcttctcaactccggcaa

SEQ ID NO: 1002 - DNA, 372 bp, Zea mays
cagagagcacccgagagaacgacagcgagagcggtaacagcgcgtggccccttgtcccttggttcttcagcgggctgttctcggtacctgaaccgtcgcacactgacagaggcactctcaccaccgatcaacagagtccttccaccaacccaaatgctggaggaaattgatttcgtcatcctttgtgaataatgctcatacatctgagaatagcaaggagccttgtcagtagatggcttattttttttctgtactgataatccttctcggatgaatcgcaaggtacggagtctgtgtctgctctgttttgtcaggattctagcgatcgtttcgcctctagttaatctcatagctactgagactgtctgtctg

SEQ ID NO: 1003 - DNA, 365 bp, Zea mays
  misc_feature (351)..(361): n is a, c, g, or t
agttgctggattcaccaatcaggctgcatctcaagatgacgtgtcgagttgtgacgacgacattgcagggatcgcgggcgtcgacgaagagagcagcgatggtgactacgatgggattggtctcggtggctgcaacgtggatggagctgctgatccccaggctagcatcggtgaggtgaggaggaaggccccctggaagcggtggaggaagcctgtgaaggcgcggtcgctcaagtctttgatgtgagcacgcaagcgcccgcgttactcttccatctccgtggtgtagatgtagaagataagttaatcggcagcttggcttattcgcttgctaactcctgttccttctgnnnnnnnnnnnttgt

SEQ ID NO: 1004 - DNA, 361 bp, Zea mays
  misc_feature (333)..(341): n is a, c, g, or t
  misc_feature (345)..(353): n is a, c, g, or t
ctccttccttaattatgatgagttgcatgagatttacaatggtatgatcaagtccatcctttgtctcttcaattttatttaatcacgtgttctgctcattggtaaaatagtttatttctttatactcgatacgtaatattgtttaagggtagggaaacactatagaagctttcagagaagtcatgcaaaaccgagaacaaatttgttgtagatgatcgcggacaaaaataagtacacctagcccaaccattcctacaaccttctccatgtgaaattctcgcctagctcgtatcttatgaccttgggaaatttcttcaacatgttttttttccnnnnnnnnnggannnnnnnnnatatgggt

SEQ ID NO: 1005 - DNA, 605 bp, Zea mays
ccgcatccgcgtcggcgcctgggccgtcgtctgtggacgtcgaagcttcatccaaggccaccggaccatcgccgtcagaggcgccatcgcagagtggttcgaccggcgaagacaagacgccggttcgccgacaatctcgtccatttgtcgactgcgagtctgcgactgcagctgtcgcatggatttgactccccttgtgcatggctgacggtgcaggaaaaggaggagggaggaggagacgctccgccaccggcggcatcggccagcgggccggccgacgaggcgtcggagtcggagacagcagcaaaggtatgctcgtgcatgcattcagcattggcctcgccacttttgggacgcattttgcgttttagtcgtctgccatgcattccctgtgaagagaaattcgattctgctgcttttcttacttgatgattacctctatagtttgaaagcatatagtttcaactctcgctaatggtctttattgtttttatgatgatgaaacggatcaggacgtcgatgctgctggaggcggcaaaacgccggcgcctgcgggagcagagtctcagggcagcagcaacctccgagtccccgtctcttccgtg

SEQ ID NO: 1006 - DNA, 448 bp, Zea mays
gcacgccctctgttgggtccgccagcgatgagcgccgggaagggagggtggggggcatcgcccaaacttcacctctgagcccctgcatcaggttcctgacagcgaaagcctagcacctgctgcaacctacctgctcgatggaatgctcaacctctcgccggatctgtgcagctcttacgcgatgtcgttgaacccggtgagctcctcgctgtcccacacttctatgtgtttgattaaatgtctaaactagtgtggcatcgttgctcgcagctagttgttgacactgctcctcgtgcatcgcttattcgacaaaaatcccaagcccatggacagcacacgcgacatgcgcaacccaaatccgatcgaccaggttgttcgatgtgtgtgtgtttttctatcgcttatgtgtgtgatttgtagtttgttctaaatatgttctggtcgatgc

SEQ ID NO: 1007 - DNA, 381 bp, Zea mays
ggctgggtgcttgtctaccattgagagtatagttgttgccatgaggaaactgggagaggattcaaagggactggatgatctcttggatgtttttgagtcgatgattgctgatcagcgacgatgcaaggatgagaatgtgaagcaaaagctcaagtcctaatcataaaaaggtcttatcatcatcagtctgttacctaacttcatgatgacctctggatgcatttttcagtctagatgacatatatacgttaattcatactcagaatttttaaatgccaagattttgtagttatatggtgttttccatttgagctttatctcattttctggataagggcagagcatatcattgtcagtttcaccttctatgatcagatccga

SEQ ID NO: 1008 - DNA, 1186 bp, Zea mays
  misc_feature (1164)..(1165): n is a, c, g, or t
  misc_feature (1172)..(1176): n is a, c, g, or t
tggcgtgattctaggtaaaagtttatgtttacataataatcagagatgtatttcgagtaactgaattattgtatataccttcgtccttttcctttcttggaaactagctttgtaaactattgctttactatactaagttgggaaacctacttctgttagtagtctccttttgcaagtgtttttctggttaatctttcataacgagactggagtgaataggttaaatggattatgatccctatcgcatgcagccttttttgtatgcacaacagcatttttttgttgctgcaagccttctacctttgagaatatatttgctcttacgtagttatgtattttgacaacatagttttggtcattgtttagtactcctataagctcccgcgtatcctatcaggtgcatttccttttagcttataaaattttcccttaatcctttatatatgctgattttacatgttccatcccattgggaattaaaactgtaatacctaaaatatatgttagtttacttctcactgtttcatgaggatgtcttttcaagttttcagcaaatttggtgatatctttgacgaagatcacttcattgagtcacttagaaaatatgtaagggttgtaaaagatcttcctgaagatgtttttctgcgattcaaccataatatcagcataataccaaacatgagaaccaaagctttctcacccccaagttactacttacaacatgtgcttccaaagctgttggagctagggtacgtgctccctcttttttctccttgacatgaagtagagtctgatatttgcactgagcatcacatagcaccatgtcttcacttatttcttgttctatgacacagggctgtgcgtattgcccctttctcaaatagactggctcattcagttcctatgaatatccaggcattgagatgtttgacaaactataaggcattaagattttctgaaccaataagaattcttgcagataatatggttgaccgaatgatcaagaggagttttttaagtggcgggaagtacgtctcggttcatcttcgctttgaagaggttttactaaagtttatcttgtgtggactaatattactacttttctcaagttgtgatgagttatatgtctaggacatggtagctttttcatgctgtaattatganngtggctnnnnngagaataatg

SEQ ID NO: 1009 - DNA, 403 bp, Zea mays
gcactgacgacgcgctcgaccgcgccaagtcgctcgtcaacctccagttcagctggtacctcaccggcacggtggtgttcgtcgtcctgttctacctccagatggcgaagctctaccccgaggagccgcagtacctgccgctggtgaagggaggcggcagcggcagcgatggccggttcagcatcggagatgatgatcacgacgatgaggacgacgtcgaggccgcaaaacgtggcggtttcggacacgtggttagcggcacgaggcctgtcgaaatcgagaggtgagggtcgtgcgtagcaccgtacaaaaggttagcatgttgttgcgtggttatagtgtaatttgacttgaacgttttttgtttattggtggaattaaaacatgcaaatattctctaggg

SEQ ID NO: 1010 - DNA, 211 bp, Zea mays
ggccgccgcactcatctccttcctccatccgaaaccaactgacatcgccccgcagccaagaagctcggctcagctcagctcagttggttcctccattttgagtggaggactgactgtcctcccgtcgcccgtctcgcgatgctgatggggttccccgtggggtactcggagacgcccaagctgctgctgcacctcctcttcctcctcgacc

SEQ ID NO: 1011 - DNA, 383 bp, Zea mays
gcatggagctgcgcaatctgccaggtgagcgcgaccagcgaggccaacctgaacgagcacctccaagggaaaaagcacagggcaaagctggcccgatgcggagcgacgaccaaggcgacgacggatcctcctcctaacagaagcggcgatggcgcagtagcactagcagcaggcccgagcgacgcgccgaagaggatccagatcctggtcgacggggaggcgcaccaggtcgtccagaggagcagctgcgtgtggtgcgagcgctgcagggtcggctgcaccaacgccgccgccatggccgaccatctgcggggcaagaggcacagcctgtcgaacaaggtctggacggcgataaaggccgtgaggaggagcagctaatacgg

SEQ ID NO: 1012 - DNA, 206 bp, Zea mays
aggcatctcagcagaagatcagttgagaccctttaccggatttgtaaaatgtgttcacaatagctgccattgtttcctcatgctggaagcaagcaatccatgtaaatgactgggtgtgcggatcacatggtcaacaaccgtgtacaggccacccttcccgtaaatacatctgcttatgcattttgacatgatgaacaagtgcttca

SEQ ID NO: 1013 - DNA, 515 bp, Zea mays
cacctggtggtcaaccaatgaccccaggcaatgctgggatggatatgctatccccaataataggtgtgctgttgtgatcactatgttctcagattttaatgtggtgctttgcttttatagatatctaaccatgtggcgcaatgcctgcaggtggtgatggtgaagttgcatggctgttgccggatgttttggtcaatgtgttgaggggaggtgatgacggccctggcgtggttagggaagtactcggggtacgtgtgtggtggactagaaaattgtgtttgagtttcatccagcgccattgctcatgtgcacttcaacttacaggatggatcttgccgggttgcacttgggtcgtcgggcaacggtgacgtggtgacggtccttgcgaacgaggtcgaggtcatcaggccgaagaagagcgacaggatcaagatattgaacggcaatttccgtgggtacacaggaaagctcataggtatagatggttctgacggaatagtgaggcttgacgaaac

SEQ ID NO: 1014 - DNA, 878 bp, Zea mays
tatgttgtctattaaatgttctctttcaagtacatattttaagtgatcataaatgtttgtagtgacaacacaaagtcactgaacaaagttgtgctacatgttaggtcttctgctgttgtcagagaagcccacagtcccatactaaggagccgaacacggtctcgagcaaaggtattacactgtcatgatatggtttttgcttgtgatgatcttatgtcctcttactgatgctggtttgttgaaactggtgacatttaggcggcttcaacaagtatcacatcagttctttatctgaaagatggtgtctccattgctacttctggagctgcagacaagtaagttgcactttcatttttattctgcattttaatttattacccactttcatacttttgtatggtttgcaatagcttattgattttatgatattattgtgaacataatgcacttgcttgacgatgagtgagcctgatatcatctactctctgtttcttgtttttttttaaaattttgtagagtaaccaacgtttatatattttaaatactaatattgtaccttgtaaattgtatgccagtgttgtgaaaatatgggatacacgaaacctgaaagtgccgttctccaacaaaaactctcaagcaggggcccaacctttggtaaacatctctactcactaaagaatgttaaactatcagtacaaaaagcaattgaatcgtgcaattcagagtataatcatgtctatcaaattgagtcaacaattatggaatgttgtgtttccgtagctcaaatctggacaatctctgaacaaacatactggtcttttgtctctgaaggagggggtgaaacatggcatctcttgcctgtctcaagattcgtatgg

SEQ ID NO: 1015 - DNA, 352 bp, Zea mays
gtctacggtggcaagcagtactacaattaagtaataatggagggcggcctggtgttgacagccaaacagcgacaggaataccctggcggatggaacccgttcgtgttatggcgcggcgtgcctcgtggcgccatagagcttcattacaatcatcttcttcgtgttctatgctatcttcatgacactatctatggttgtctatatttagagagagaatatggatgaaggagtatcctctatatttagagtggactctagaggacatctttgaagtctatagaggagagaatcttttctatatttatagctagtagatgaacatatagagttagtcgttgaagacaacctgaga

SEQ ID NO: 1016 - DNA, 720 bp, Zea mays
  misc_feature (597)..(601): n is a, c, g, or t
  misc_feature (608)..(612): n is a, c, g, or t
  misc_feature (615)..(620): n is a, c, g, or t
  misc_feature (633)..(642): n is a, c, g, or t
  misc_feature (649)..(661): n is a, c, g, or t
  misc_feature (683)..(716): n is a, c, g, or t
tactgcgtacagtgaccttgctttcctaagagctgcaagatgttagcatattgtgcctcaaccttaaagtgtcactgtgttgtgtattgaagcaatagtatgcatcaatccgtgtaatgctgcaattgttgtatttctttcgtatttacagggtaatctcgtgttgttttacctttaactgacttccatgcatctattgagaagtcatattcagtagtttaaccttttgcaaagacccatgagatgaaattgctattcccaaagtaccactgttcctgtctatatggtttttatagcataatgtgtaattcatgacagggcctctgcgatatttgtcggggtgtatgagccaactaaaagaaaattactggaaacacttcctgaaaatctgagtgcagttgcccattttgtaagttagacaaggcttattatttgacattgctatttatgccatgtaattttcattttatagcaccagcacattttttattttacattaccagaatgatattttgtgtattctctgtgaattcttagtgcctactacagcatatattcattaatattgatcatatcttttataatgcaattgctacnnnnngcagggnnnnntgnnnnnnttgctgcttcccnnnnnnnnnnccctacnnnnnnnnnnnnntttatatcttatcactactccnnnnnnnnnnnnnnnnnnnnnnnnnnnnnnnnnnctgc

SEQ ID NO: 1017 - DNA, 367 bp, Zea mays
gcctcggccacgggtgcgccaaccagacctccgcggtgcgcgtggccggcgtcgcgtacagggacatccacggcacgtacaacccgcaggccggcgcgcccatccgcctcgcgtgcagcgacgccgtcgcctgcacggacatcaccatgtctggcgtcgagctgctgccggccggcggggacgacggagcactgctcgccgacccctactgctggaacgcgtacggggtcatggagacgctcacgctgccaccggtgtactgcttgctggagggcagcccggagtctctccaggatccgctcaccagttgctgagatgagatcgttttctttactaacaaagatttctctcctgagacagtcaacgc

SEQ ID NO: 1018 - DNA, 393 bp, Zea mays
cgccgctgcctcggcaactgcaccgtcaccatgcgcagcgccatgcagaagctccacggcgccaccgccgcgctgcactcgggcgacacgcaggtggccaggacgctcgcgatgcgctctgccgccgacgtctcgtcctgcaccgtcagctgcagggagctcaacggcgacgtgcgcctcatcgtcgtgcagagcctcaccgagttcaccaagatgctccagatcgccgtcagcttcatcagcaagatgaagccgcttccaccgtcagctccagcgcgaactgccacgccatgatcacctacatatgcgcagcgtggttcttctaactaagagagcgggatcgagaagaaattgaagccgctaataattagccatcgttctctagagtttctt

SEQ ID NO: 1019 - DNA, 250 bp, Zea mays
ttctctgttcctggacgtgtgcaggggcagaagctccagcagccatggcgtccctctcctccagtcgctcccatggatggcgcccaagcccttcttccacctctagccggacctgcccagcgccactcctttctctccatggctggcgcacaggaagcccgcagccatggacgcccaggcccgacgccctacctgcgtacctccatggctggcgctccccttccttggtgccccatggctgctcgttcag

SEQ ID NO: 1020 - DNA, 476 bp, Zea mays
catactcagacaaatcaaagtgtgccacgccaggctgctgcaccaaaggaggaactgccacctccacctccccctccccttgctaagccccctatggctgacctgacgcctttaggaagagagaggcttccacccactccaaaaaagccggagcctcctgtcgtgacacttgacgatctctttaagaagacacagtcctctccgaggatctattatcttcctttatcagaagaggaggtggcagccaagctcgccgcacagggcaaaggaaaaaagggataggaggtgttagcttccattttcggctagcttggagtttgttgcggtatgcttaagttctgttgaaatgtgctttactagtccttttttgtccaaataattaatggatacgaatctgccctctttcaggaacatggcgtgcggtggtcacagcagctgacacgtgctactgctgtggcgaaagagttgtagccttg

SEQ ID NO: 1021 - DNA, 491 bp, Zea mays
gccagcgtgcaggccatggtggccgctggtcgtcatgcaccagtgccaccaaggtatctccgtccagatctggccgcggatgtcgtcgttgccgacgacgcgacgaccatccccatcatcgacttccagcgactgctgctggtcgacccagaggaatctgcgcgcctccatgcggcctgccaggactggggcttcttccaggttgggtttctttgcttccctttctttcttgcttgccagatctggatgtttatgatggacttggggggtgaatgaagaagaagatgtgcacgcagctgataaaccacggtgttccggacgatgtgatggaggcgatgaaggccagcatccagtcattcttcgcgcttcctgcggaggccaagcagcagtaccgtcagcaggcaggccagctggaggggtacggccagctgttcgtcgtctccgaggaccagaagctggactgggccgacgtcctctacctcaacacgcag

SEQ ID NO: 1022 - DNA, 429 bp, Zea mays
cagctgtgcgacgtgggcacgcgcttcatcagctgggacggcgtgcacttcaccgaggccgccaacgccatcgtcgccgccaaggtgctcaccggcgactactccacgcccagggtcaccatcgccaaactcgtcaactccacgctgcccaacgacgactagctggctggccgatcgatcgatcgatcgtcgtcgtcgtcgtcattctgataaacatactgcaggctgcaggcttcatcgatccatatccaattgtccgtagaaatctacgactagctcattgtagatccgtaatgtgggctaagagatgcatcatgcatggcgatcgactatagctgcccaactcgtcaagagctggttcaccgccctcgtcatgatcgagctagtttggacgagcaaattccatggcaccgagtaacacaattgata

SEQ ID NO: 1023 - DNA, 881 bp, Zea mays
  misc_feature (814)..(824): n is a, c, g, or t
tgatattgattatttaggcgaagggaaatggcaaccgttccaggggatctgatctggcaggttgtgaggaagaacaactccttccttgtgaagcagttcggcaacggcaatgccaaggtgcagttcaccaaggagccgaacaacctctacaacatccactccttcaaacactcgggtatgttgcgtccttcaaagtttctggattgtctaattgtcgtgtatatgtaacacctgtgatcttagtaataaaaataataaatggctttgtgcttactgctctggctgttttgttctgttaggtttggcgaacaagaagactgtgacgatccagccagctgcaaaggactcggctgtggtcctctctactaccaagaccaagaagcagaacgcacctgcgaagctcagccacaagtctgtgatgcgcaaggagttccgcaagatggccaaggctgtgaaaaaccaggtactagcacatggaatcacattatgcttgattgtacggtaatatggcagtgtttgttttgctactgcaatgcgtggcttttttatgtattggatattgtttccaacacatgaaatttgttgctgtgatgagccataacaagtaagaagaccaactgatcaactggatattggtttcatattcctctatttagcactgttttaaacattatgtgttggtttgtaagataattgttttgttctgttgcttgtttggtgttatgtggatttttcttgttagattgattctcctctctttatgagccataacttctaagaaaactaactgatcaattggttcttcaatgaaatnnnnnnnnnnnacgcttgccttctgagctgttcttgcaggttgcttaaatcttgtatgattaagtaac

SEQ ID NO: 1024 - DNA, 454 bp, Zea mays
aagcttcagttgcaagaaattcagtttctgggcttgtgcttgttgcaaagtcttgtggcaatgatgtttcaaggtaaattatgactaccttctactgcttgttgccccttattgtcattaccatcaattccttcagatcaaaatttaagtgagaatctaattttgatgtaggttgacattttggctatcgaacacagttgtcctgagagaaatcatcgcacaaacatttggtacttcacaacactcaagtccagttaaggttttcagctcaaatggcaatgcaaacaagcctgacaggagtttcactccatcgcaatggaaaagtaactacaatggcaagtatgtgaaacccaatatcatgcagctgccagatgattggcaggaaactagcacattgctggatgcattggagaagattgaatcttggatcttttctcggattgttgagtctgtg

SEQ ID NO: 1025 - DNA, 337 bp, Zea mays
gtcgccgacgcgatcgcgatgggctcaggtcagcatcgtcatcatcaggggcggacaccaccatgccatgtgtcgcctccgcccgtgttgccgccgccgtgtcctggtcaccaagatcggcgtagagaagcactggtgccgccgccaattgttctcggtgtgcagaggaccgcgccggctccgccctcgccgcagcacgcgcaggtggagcattatagggcgctattggcgccaccgccacctccagcttgctcattctaggcgatggctcttgttgttactgtacttcctaagcgtctagtagccgtctagtgtttggagttcatttactcagcaa

SEQ ID NO: 1026 - DNA, 397 bp, Zea mays
ggtagcgttctaagttttgtaaggctatctccagcaggataactatctttgtattcaaacttcactctacaaacagtacagtctacactacataacagtgtaaatcagtgcttttaggtaaactattgataaactgctgcatacggtctaagtttagaaattagcctaataaccttttctatcttagttgtttgtgagatattggaggtcgccaaacttgtaaataacagcgttggagctaggtcgtaatgggctagatcccacggagaagatggaggtcaaaaagtagatcatagtaaggcacaacagtggcaagtttggtgacagcatcgatcgattccaccatcgcatcgttgagcgcaacacaacatggcgtgcagtgaccagctagtttcaa

SEQ ID NO: 1027 - DNA, 364 bp, Zea mays
ctggcgtcctcgtgtacgacgacaccgagagcacagagctggtggcccggagggcgcctccgttgatgtacaagttggggctgaagctgtacgattcgtccctgtttccgatgcgtgctgatcctacagatcgagatgcctgcatgctccggcggctgctgccaccgtgtgtcgcagatggcgaggagagttaccggcatcgcgtgttgctgttggttgggatggatactcagaagctcgacgctgcagagcttgcacacttcctgcagtttgaagcggatctcgtccacgccgccgaggcagtgatcatccaccggtcagagggacttgttgtcgtggtgctgggaagctcggaggacacgac

SEQ ID NO: 1028 - DNA, 940 bp, Zea mays
cctctccgtggagacagccaaggcggccgtgagccacgccgccacgagccaccacgagcacggcggcgagctcagcgatctggagtcggatctggtggggcggcagaagactggctgctcgtcgtcgccggcggcaacaacgccggctgcagagctgatcgtgccgccagcacagcagatctagcaattccaggtgaagagaagagagccgatttgtgcttgctaatcactggcggagacctacagtgctacttgcatgtgtgcgttgcgtgcagatccagcaattccaggatttttgccacaccatgtgtgcgttgcgtgcttcgaatggattgaaatccaaatccatttcgtcttgccactgcactacacctgcacgcctgcacctgcacgcccggccgagctcttgaccggtggggaactttagttttgttatggtgcacaaccaatagttctctgtgttggtctgcttgtgggtcttttcattattcagcaagttgctattttcagttttgttcgaactttttaggttgtgtaactctttagttttgtttgaactctttagtaaaatctgctatttagttacctctggtgttatttacttacctctattgtttacttgcttaaatctgctatttattacttctggtgttatatacaagcatgctcagaacttcaaataggattatttattattctttcatgcctaattcctgtattttagtcactatttagtatttacatgtccaattctttcatgtcctgaaacagttttgatgctcttgtttcttagcattaagttcttagaagatgaggaattgaaaatatagacatttgtctgagttttttttcctcatcaacaggtggtacaaaagggtttttcatcaacaagtggtcaccaaaagaagaactgaaacatcaagatggtgtttgcttctac

SEQ ID NO: 1029 - DNA, 404 bp, Zea mays
tcataaagagggtgtggctggcttctaccgtggatgtgccacaaatctgttgcggacgacccctgctgcagtgataactttcactagcttcgagatgatccataggtcccttcttgatctattccctgctgaacctgaacctcacatccaacctctaaagcattgaccatacaacatttgtaccctatccatgcggcagattaggaccccagtaaccatccagcaacagcaatgttgtttactgtgccagatggctcttgtaaaagagagaattgtttttttccccagataatagctgccattcaaaagttgaaacaatagtgtaggcagagcaatagcatctgtgtacgtaatagatttgttagcatgcatttggggtggaggtatatgagcgatgttgggta

SEQ ID NO: 1030 - DNA, 713 bp, Zea mays
  misc_feature (99)..(99): n is a, c, g, or t
tatcaagaaggagatgatcatgacttagtgctgcagaaacaagaatggatcaagtatgccttggtccccttctaccacctgtttgtagtcatctcttcnatctgccaagaggagttgactcatatctcttgctggtgtttggccatacagaacacaagacatgctcaagagtaaacttattcttgaagatgaatttgcctggagtttaccttcggtgggctcaggtttagatgaacctgagtggtgcaaactgaagtatattggtgggactgacatcagcttcttgaaggaagacccatccacagcatgtgccgcggtggtagtcctcaatgtcgatactttagaagttgtccatgaagagttcaatgttgtccgactgcaagtgccatatattcctggttttcttgcattcagagaggtattatgcatttttgggcgtgcaattgttttcatagaaaaattgctgtctttcaaccaataattaagttgttacctttgctgcaagaagtgtgacatggcctgttgctaactgttcgttcttactgcctctaaagtctagagccaagggattctagtatgatcaatccaaaatcatagatcttgagaaaggtgcatgtctttcaaaaattctttcttttgtgttgtctgataaaaatgtatgatatataatttcatgttattgttaaactgtaccaacatgtatgtgaacaagc

SEQ ID NO: 1031 - DNA, 446 bp, Zea mays
ctgtagcagatgctgctcaaccggcaaaaggcactgctgatcctgtgaacccatcccctaagaagcgcaagggcttcctttcattcggcttcagctggaccaagtcttggagcagacgtggtgcaaccagcagctcagagaacttcgggaagacgctgtctgcagcccttacaggcagtgctcaaggcaacagcaggggcggtagcaatgagcaccagggctgtcaagaccctgctgcccactgcctgcatctgcacaggaggtccaacacgcctggcgtctctgcttccccgcctggacctggtgcccttcggcctcagctgatctcagtgcagatgcagtcggtgtctgtggcaggtgtggaggacgtggcggagtccaccgcctcagtttctcccagagagaagcgcaggaggagcttgcagtagtgacagtttcgtctgtcc

SEQ ID NO: 1032 - DNA, 371 bp, Zea mays
agcccccgtagaccatggaagatgcatggcttgagcatctgcatggttcttgagagttaaagctgcacgacgatggatagtggaaacagagcttctcaagtagaagcattcgttttcgtggtgcctttcctgacctccttggtggtcagctgaggtgcgcacaaaccggcaagtcacaatacggcaatggcggattccattaggagtcgtccttttttatttctttacccctttttacattctagttctgtgattgtgtcaggcggaagctagaagacaaataacctaagtattcatgtgtgatggattatatacgtatacattggtgagacaatgtttgtctcatgtgtactccagtctccagaaacaag

SEQ ID NO: 1033 - DNA, 404 bp, Zea mays
cgcgtccgcgaacagctccgagctgcgctcctcctccaggggcatcgacgacgactcccaggccccatcgttccggctcagcccgccgccgatcttcccaaccggcagcgtcgaacgccgccctcccccggcctctcccgtgaagatcgtccgaaagcttccgttcgggtacgtgattggccgtcagctggacgcccccgcgctacagccgccgccatctgtgacgacgctgtcaagaaatgtcaagacggtggtgatgccattgatggcttggctgcacctccggtcgaggtcgctggcgctcaagaagaaggccggccgtgctttcaaaaaggcgtgtcagcgaggcagcaggcgtgatgagcgtgaaggtgtacaagaaacactcccatccttcttcttgc

SEQ ID NO: 1034 - DNA, 661 bp, Zea mays
cttcagaggcgacagcagaacggatgtatgttgccaacatctcaactttccacatctcttattccttaccatcatttcttttttgaattcaatgtcacatactagttacaatctgttgggctcccaataaattctttcgttacatgtgtcagcagcaaacaatcttccttttcccctttcagtaacgagtcctgctgtttaaactatgctctacaattacaggcagaaggccccatcaaggatagccaggctattccacacaaagaatggacagcctgcaaactccaaaccaaaaccaagggagtctgctctgaaaccaccaggtacattagaaacgtggaccactagtaggcagtactacctggtatcaaatccaattgtccagtagctgatcaatgcttttacaatttgcgagcattccatcatctacaggtcgcacgacatctacaggaggaagccaggcgacaggaggatctttagtgaaaccccctaagaggcggtagagaaataaagattccatcatctaggatttgccatgttgatggctgatgctatgcgtctaaagcccactcggagattgtgctgaaagacaacgggtgccatgtaagggtatgtgacgtatgtcactgtaacgggttcacttgtcatcaacatgatgagc

SEQ ID NO: 1035 - DNA, 457 bp, Zea mays
tcagactatgtgaacattgccaagtcactgtctctcgaggtaaatagctgatttgaagtttgattggatttgaaatatcccttgctgtatctaccttgcatacaatacaaatctgcgtcgtcagcgtcaagatcttggctacattgaatgctctatagaccccacctattagcgggacacaccaaactggcaatttgcctgctgtgtgtgatatcgatacattcatacataacaggattcttttcgctgtttgcatgtggtcccaggatatcaagacagctgactggtcggagaacgtggccccgttttggcccgccgtgataaaatcagcgctaacatggaagggcttcacctctctgctgacgaccggtacgcaacctattactctccccccgtcttgttaaggctctgttttactgagtagggagtgcagcaaaaaaaaaaaaaaaaaaaaaaa

SEQ ID NO: 1036 - DNA, 546 bp, Zea mays
cgcactaccaccccgtgtccgcggacacttaccaagacctcgaggctggcttctccggccactcctcctcccctctgaagcccgcggcctcgccgaggcggcccggccgcatgttctgcgacccctgcgacgacggcgacgagctccacggccgccaccactacctcgacatctgcttccgctgccgtaaactcctgtccggcaacagagacatcttcatgtacaggtaaacaacaccaccaccgatctagagactagagtatccgggggggtcccttcccctagaagaagagatctccgtccgtggcatggaggaacggacgaatggttcgctgacggcggtgtggctgtttcttttttttgctatcgcagaggtgacctgccgttctgcagcgaggagtgccggcaggagcagatcgagatcgacgaggcgcgagagcagcggctgaagcagacggggcgggccgagcagcagcggcagcggcagcagaagcagagcccccagaggatccccatctgggcgtggtaggatgagaaaaattttgg

SEQ ID NO: 1037 - DNA, 352 bp, Zea mays
gggcggggagcatctcgcctacgcgccgtcaggagccgctgctgccgtggttgccgctcctgccgctgccgaggtcgaggaggaggccacgaaggaggaggatgaggacatcgccctcttcaacctcttcgactgatcgtgcaaccctacgtggaccgatcgatgccatcctcgtccttgcctgctggcgtttgcttgttgctctgattgtacattgtagtattgtattactgtagtaataaaaccatggtgctcttctcgtctatatccgggatagagcctgcgtttgatgccgatcgaaaggttttggccggatccatcttgctgatcggagattgatctgaggctgttc

SEQ ID NO: 1038 - DNA, 368 bp, Zea mays
  misc_feature (360)..(361): n is a, c, g, or t
ggattggaggaggtcgtcgtcagaggatgccgccgaggccactaaatcggaggagttggtaaacgaaggacacccaaaccaccatgcagactatcgaaccttgcagatcgcgtcttgctcaaccgtcgtcgtcgccggagtcacccgtgcctagcatgcaaccatcggcgaagatggtcgtgcctcatggggcgctgccgccatttgcatgtcgaggacgccgtcgctcacccacctcagggcccaggcgtcgccaccgctcactcgccccgacgatctgtcgccgcttgccctccggatcggggagccgctgccaccgcaactccaaatctgggaaccgtcaccgcaactctggatcgnngaaccgc

SEQ ID NO: 1039 - DNA, 486 bp, Zea mays
taacaataaacacctcacattaggagaccatccaaaaccggaatatcaaatggtaaccttataactccaagggcaataaatagaagcaatagccacgcaggaaacgtcatcatgcatagcactaagaaagatttctgtcctgaaaaaacaaagacgaggacaaaaggaagcaatttcagtccaaatcgtacagttatagctttagcttaaattgtggatttgcaattgcaataacaattagtacatatgatatgtataatagcttggtatggatagaatgctgggggcatcatcaccttcgcaagcgcgcgtctcagtggtgtcgactacccactcggcggcctcgcggaggcggcgctcgggctcgctctccggctgcccgatgggcgtgctagcgacgaggtccatgaatgcagagtttttcgcctccatggatgcggcggcagacgcggcgtcgtcggagacgccgatggcacggcacacctc

SEQ ID NO: 1040 - DNA, 444 bp, Zea mays
gatcaataccttcgatccttggtgttctggtgttaattctgctggtggaagaaggtggaggtggcactgctcgtgtgcagtgaggttctcctgtgctccgttgatttaacagtgcacctatgtggtgctctgtctgttctgattattgtccaccgtggcctggtgcctgggctccctgctgcgcggtgttcgtcttctcgggctggtgccgtggacgtctccctcggctccggcagcggctctagtatctccgtcaacctcccgccgtgcaggcccggacgtgggcggcggaattggttttctgggacagaaccttgtgttcgctgagctggtcttcccacgtagacaatctacgtgctgtgagttattcgttgcctcactttatttactgtttaattttgtgcaatctgctagtatcaaatacttgagtgtgattgcactatt

SEQ ID NO: 1041 - DNA, 282 bp, Zea mays
gcactccgccgacggcgatggccacggccacggctcggcgacggcgggcgggtgctgcgggagcaaggtcagggtccaggaggcttgacgctgatggatggcggcgcccggatccctctctcgctccatcgcggtcgcgactcgtgacccattggagcagggggtttcatgaaattctatgtactacttactcgatctccgttgattttgttctccatcttttttctttctttctgagagagactgctgcttgtacttgcacttgcacaccatgaagatgaa

SEQ ID NO: 1042 - DNA, 357 bp, Zea mays
ggatcgtcaacgtctacatcggcctccgcacctaccacgagaggaccgccaagagcgtgaggctctggacggcgctcctcaccgtcgaggtcgccttcctcgccttcttttacctcatggtagacagatggagctacatgctgaagcaaggccgcgccaccgtcgagcagctaataaggccgaccgatagccgcagaacctacccgaccacccttcggaaggagctgaccgtggtgcaggagtgagtgaatctccgaacagaaaggcgagaggtgctttcagacttgctgaagaagacggtagagtgctgctgatggtcttttgtggcttgtttgctttgagagaggtgtggagttc

SEQ ID NO: 1043 - DNA, 461 bp, Zea mays
tggccacgcttcttggggactcagtatcagctggtctgaagattgaggacaaactgatagtgaacaagcagctcagggtcctggttagcagtggggccatgagtgggaggggagatgtggcctatggaggccgcctcgaagcaataagggacaaaaattacccgattgggcggttgctttccactatcgcgttgtctgttgtggattggcacggggatctggcaattggctgcaacatccagtctcagatccccgctggaagagctagcaacttggttggccacgccaatctaagcaacaaggggactggccaagtcgggattcgtctgaacagctcggaacatcttgagatcgcactcgttgcgctcgtgccgatatttcagaacatcatgaagaagatgctgaataactcctaatctgcctagtccctcctggcgatattacataacatcatgatgaag

SEQ ID NO: 1044 - DNA, 456 bp, Zea mays
  misc_feature (450)..(450): n is a, c, g, or t
tgcaggtggaggcagatctttgttgaagctgttcacccccgttatttaccttctggctggaatattaaccacaggttgtttgcctttcatatatatcttctcttgtgcgctatgcatgctgattagttgcataattgcctgaacttcctggtgcttagaattggccaagctgtagcgaatatcgaagttatagccatgtaccagtgaccttaaaagatctttctatttgtcgtaatgtctttttgtccagatttcctttcatcaccagatatttactgttatctgtatgacctcttgtgtggttcagtggacggcgggattttggtgacttcagtgtctacaagccaccaaggaaagatcctcaatctgcaactgcaagggattaggcttacgcgggtgtcatgctgtcgttggtaccctgaggttcaacttactttccagaattggttncattcc

SEQ ID NO: 1045 - DNA, 303 bp, Zea mays
gatgacctggacatgagctccagctccaggggaagcagcacgtcccctcggaagaagtatgttatcaagatcagtgcgctgcggccgttatcagacgactctggtgctctcctctccccgtgatggcgatctggattctcagctgcagccatgtgtaaattaagggatagtggttctcttcagttacttcgtgagcagaatttttttggtttattgtacgttacaagttacatcatgttcagatttattttgtgtaataaggtgtggttgatgtaatatcttgtttatgattaggtcatggag

SEQ ID NO: 1046 - DNA, 366 bp, Zea mays
catcctcctcctcccgcttctcggccacaacatctccgtctcgctgccgacctgaacaacgactcaacgaggcacactccattgttggccatgcttgatctcctcatcctgctgcagtgctgctgccgtggaagggaggccagtgcgggaacaacccagactgcgagcgccttcgcgccgagctccgccggatgccgccgccaaacggccgagccgtgctgctctttcgcaatcccgtgtggctgctctgcacttcttgatgcatttttgttgacatggtttgcgtttcattcaaacttagaatgcttcttaatttcttttcgttgcattgaaaatatccagcggtttattggtgtttgggctaaa

SEQ ID NO: 1047 - DNA, 1301 bp, Zea mays
  misc_feature (534)..(535): n is a, c, g, or t
  misc_feature (543)..(546): n is a, c, g, or t
  misc_feature (548)..(549): n is a, c, g, or t
  misc_feature (553)..(570): n is a, c, g, or t
  misc_feature (572)..(581): n is a, c, g, or t
  misc_feature (583)..(618): n is a, c, g, or t
  misc_feature (620)..(628): n is a, c, g, or t
  misc_feature (630)..(768): n is a, c, g, or t
  misc_feature (773)..(775): n is a, c, g, or t
  misc_feature (777)..(788): n is a, c, g, or t
  misc_feature (792)..(808): n is a, c, g, or t
  misc_feature (810)..(816): n is a, c, g, or t
  misc_feature (818)..(825): n is a, c, g, or t
  misc_feature (827)..(832): n is a, c, g, or t
  misc_feature (837)..(842): n is a, c, g, or t
  misc_feature (846)..(850): n is a, c, g, or t
  misc_feature (852)..(897): n is a, c, g, or t
  misc_feature (900)..(939): n is a, c, g, or t
  misc_feature (941)..(949): n is a, c, g, or t
  misc_feature (951)..(956): n is a, c, g, or t
  misc_feature (963)..(970): n is a, c, g, or t
  misc_feature (973)..(974): n is a, c, g, or t
  misc_feature (977)..(987): n is a, c, g, or t
  misc_feature (989)..(1013): n is a, c, g, or t
  misc_feature (1015)..(1019): n is a, c, g, or t
  misc_feature (1023)..(1029): n is a, c, g, or t
  misc_feature (1032)..(1061): n is a, c, g, or t
  misc_feature (1063)..(1112): n is a, c, g, or t
  misc_feature (1114)..(1133): n is a, c, g, or t
  misc_feature (1137)..(1149): n is a, c, g, or t
  misc_feature (1151)..(1152): n is a, c, g, or t
  misc_feature (1154)..(1172): n is a, c, g, or t
  misc_feature (1174)..(1177): n is a, c, g, or t
  misc_feature (1179)..(1179): n is a, c, g, or t
  misc_feature (1181)..(1181): n is a, c, g, or t
  misc_feature (1184)..(1205): n is a, c, g, or t
  misc_feature (1207)..(1210): n is a, c, g, or t
  misc_feature (1212)..(1223): n is a, c, g, or t
  misc_feature (1225)..(1225): n is a, c, g, or t
  misc_feature (1229)..(1255): n is a, c, g, or t
  misc_feature (1257)..(1267): n is a, c, g, or t
  misc_feature (1269)..(1285): n is a, c, g, or t
  misc_feature (1288)..(1290): n is a, c, g, or t
  misc_feature (1294)..(1298): n is a, c, g, or t
cgcgccgacgccgtggccgctccttcggctcctctcggtatgtatgcttaccttcgccgtggccctggcggcttcgtcgtcccctgatgaaggtgcggtctgttgtcatcttcctgtgggttttgatttcagcgtctgctgctgccgccgcctcggactcggagcatggtgtggcgaccgcacgggagaatgctgtagcacaggtcagtggttcatcctccccccggatgaagcttcaaattgttgcagttgcagcacagacctgcccttttttttacatagctttctgttacagggtggcgatgtggagtggatccaggactacggcggccccagcgccaatacccggcacgtcccgcacccatgatgatcggcgaccgccgccgccgccgccgcatgagaccagcgggatcgggacagggacagcaggagagcaacagtgtagtcgcagcaactgtagttcgcgcgtgggctactcagcagcaatcactttttgtcttgtaaaccttttttgtttttgttttggtgcttccnntgcatgcnnnnannaaannnnnnnnnnnnnnnnnnannnnnnnnnnannnnnnnnnnnnnnnnnnnnnnnnnnnnnnnnnnnnannnnnnnnnannnnnnnnnnnnnnnnnnnnnnnnnnnnnnnnnnnnnnnnnnnnnnnnnnnnnnnnnnnnnnnnnnnnnnnnnnnnnnnnnnnnnnnnnnnnnnnnnnnnnnnnnnnnnnnnnnnnnnnnnnnnnnnnnnnnnnnnnnnaaaannncnnnnnnnnnnnnaacnnnnnnnnnnnnnnnnncnnnnnnncnnnnnnnncnnnnnncacannnnnnaccnnnnncnnnnnnnnnnnnnnnnnnnnnnnnnnnnnnnnnnnnnnnnnnnnnnccnnnnnnnnnnnnnnnnnnnnnnnnnnnnnnnnnnnnnnnnannnnnnnnnannnnnnaccaccnnnnnnnnccnnacnnnnnnnnnnnannnnnnnnnnnnnnnnnnnnnnnnnannnnncccnnnnnnncannnnnnnnnnnnnnnnnnnnnnnnnnnnnncnnnnnnnnnnnnnnnnnnnnnnnnnnnnnnnnnnnnnnnnnnnnnnnnnnannnnnnnnnnnnnnnnnnnnccannnnnnnnnnnnncnncnnnnnnnnnnnnnnnnnnncnnnnananacnnnnnnnnnnnnnnnnnnnnnncnnnnannnnnnnnnnnncnccannnnnnnnnnnnnnnnnnnnnnnnnnnannnnnnnnnnncnnnnnnnnnnnnnnnnnacnnncacnnnnnccc

SEQ ID NO: 1048 - DNA, 460 bp, Zea mays
cttcggcgctccgcgtcccgctccgccaggcagcaaccctcgtctccctctcccattcgctcctctcccgcgtcgccatcacacgtgctgctcgtggggacgccgcggcggccgcacgcgtacggcgaatcgcttccctgctgtcgtcccgtggtgcgtggggactcggctgggactacctccgccactacgccttctcctcagccaccggatgcggcctctcctgcgcagccgccgcttctcgtctcatcgccgctgccgcggaggcctcgcgcctacgttccgccactgacgctgcgcagtggatgcgcctacactacggcgacatccgcgacgccgccgcgcagctcctgaacgggcttctcctcgccttctccgaagaggtaactgacctattcactcgtggtgcctctgattcacacattgctctgtcgatttgtgatatttgttgcggtttagg

SEQ ID NO: 1049 - DNA, 361 bp, Zea mays
actctcaggatgacatgctgaatgaaaaagtagattcagaagtcatgggaaaaattgcagatgaaaaaaacaagaagaacaagggaaaaggagctgagcttgtggaaggaaccaggaaaagtaccagactggaggcaaatgaagacattaaaataacagaaaaagctatttcaagggcggcggcgaaagatgcttttctaaacaaagaaagaaactccaaaaaagatcttgctggaaagaagctcccgtctcagaaaaatggctaaagagtttttcaaccgacgttttggttgggcgccggtggacaatcgattgtgcaactaatgtttgctggtgatggatgaaagtgtaggacgtctga

SEQ ID NO: 1050 - DNA, 413 bp, Zea mays
agcagcctcgtccccctttcctacctcccttccttctctgacggtctgaccggcttgttgggaatagtcccactcctcctccccctccgactcgtcggacctgtccaagtccacgtcgtcgtcgacgagcgcctggaagaggcgcacgaggaagctcagcgatgagttcgatcgcatcgccgcggagcagcagcaccagctggtcgtggagaagaagcggaaggcgggtgcggccatgccggtgaggaagcaggattctgcacccgccgctggggcgccgacgagggcgtcgccgaagaggaaggccgccgcaccggccgttgcgccctcgtcggtggctggggcaaggaggacctcgccgaggaacaagcactgagcgtaggtcgttgtatgtgctattttgtttattgatg

SEQ ID NO: 1051 - DNA, 385 bp, Zea mays
tcgcctccatccccactcgcccaagctccattgcctccatccccactcgctcacagctctgcatcgccgggacgtgtcggcagtggatccggagccggtgacgcgatctgcagctacgaaggagagaggtaaaaggaagagggacgtctactttgacgcggtgccgcggatgtggtggccgccaatggcttgagcgcgcgggagcgagagagggcgacgagcaggccgtatgcgggagcgccagcggattgagcgagcgacagagggaggagggcctgtgggcctttgcctagcgacatcggcagtccgcctgcagccgcggattctgcctgcggctgcgtctctggctctcgccccgaccgactttttcaagggaggagcggct

SEQ ID NO: 1052 - DNA, 731 bp, Zea mays
  misc_feature (700)..(707): n is a, c, g, or t
gatgagccatccgaggtacggcggcggctacccatatccggggcagcaaggtacgtggcgcgtggcttatactgctcccaagttccagttctagctaggctagctactgcgtcgtaaccctcctcgaccagccctgctagctagctgctgccacacaagctgatgaccagagtattctgcctgtcgttcttgccaaatcaaatcaaaagggtactacaaccagggcccgtacccgtaccaccagggcccgccggtgatggcgccgccgcagtaccagtacgcgcagccgccgccgccgcctcggtcgcctggattcctcgagggctggtacgtacgtacgtagtgcacatgccggccattttggttcgttcctagctactttcacctctgggcgactgggctgcttggtcgtctggctagtttccgagaaggctgggcgccaatataatcatttcagccacgtgtcgcgcctcctgatgatttaatttgatttgatttgatttgcagcctggcggcgctgtgctgctgctgcctcctcgacgagtgctgctgcgacccctccatcgtcttcgtctcctgagtcctgcatgcggtcgagagacacccctgcgccaagaggaggggtgtgcacgccattttcttcagtccatttttccaatttcctcagcgtgcatgccacgatcatgtgtatgtaccaaannnnnnnnatgtgtgatatattgtttgtcctt

SEQ ID NO: 1053 - DNA, 352 bp, Zea mays
cattcaccacctgacattagtagtacaacgaaattgatcctctggagcaactggtgaagtaaatagcacaacaaggcagagcagaacttgctacttagcaaaggagaactaaaaaggggagaaagatacgcggagacgaaaggggcagaaaagcgggctttcacttcacctgggctgttgtcagcgcggaccagcagcctggaggcggaggcggaacgggtgctgggcatggcggtcggcaagaggcgaatgcgggagatgagaagggcaaggtgcatctgctcccgcgccgctgcgctagggttttagcgacgaggtcctgtcctgttcatctttttcctctctccctccc

SEQ ID NO: 1054 - DNA, 362 bp, Zea mays
atactttccactttgacgaagcaaaattgttaattcctcccttccagtatatagctcgctcgctcacactcggagctcgtaacaaagtcatcactcatcatcacatgagcttgcttgtgactgccagctttgcccccagtgttcatcgcccatggaagagcgggcactgttcccggtgtccgatgccagcaccacctgcagcagctctggctgtgtaccggccccaactcccctgtctcgtcatcgcagtatttggacgacaccagcggcggcgccggcagctcgagcagccggaagcggccgcgccgggagctgaagcatccaacgtaccgcggcgtgcgcatgcgtgcgtggggcaagtg

SEQ ID NO: 1055 - DNA, 356 bp, Zea mays
ggtgcatctccggctgcggcgaaccggaccatgggcgcggaccgtgtgggtcaaggtctcgagtcaggttgactcgatagataaagattctttctcttctgactcgagaccaagatcaggttgattcgagagacaaagatttttttctcctctgactcgagacaaagattctttctcctcgtccagatagtgatgtctggacgatgaaagggacagtttggtggatccatgaagtttgctaaaaaaaagtagagttatgtcgagagttatcacgagttctcgtataccgttagcctgttcgagatctcggcgaaaaagtgcattaggtgggataaagtgtgttgggtagcttgctc

SEQ ID NO: 1056 - DNA, 275 bp, Zea mays
ctagctagcctagcagagctagtagctagctgggtcgtggatcgtacacacgtgcgatcgagagtactacacgcgtgcgtacgtacccatcgatcactccatccaggcaccgcgtgcattgctgtcagctagcaatggcgccatacgcgcgcgcggtcctacgcgtgcagcacatgcagagcagcggcgcctagtagctagctccgtcgtcaccatatactcgtatgatgcatgcatgcgtcggtcgggttcgggttggccctccgatccgatct

SEQ ID NO: 1057 - DNA, 343 bp, Zea mays
gccgcggcggccgagatgccgtgcatgtgccgcctcttcgccgacccggagcttctcgccaccttcaacgtcaccagggagcagatgttcaagctccccgcccgctgcggcctgcccgtcggctgccgtaccggggcctcccacgagcctggttagtccttctctagcctagccgtagccgaccgccgttgcgtttacccacccccgagcccccatcagatgacacctgacactatgcaatgaatgcatgcagtcgtggaagcgccgccgccgcccgccccggcgcagcagcaccatcatggtgcctcgtcgaggggtgtccagttcagtagcatctggagcc

SEQ ID NO: 1058 - DNA, 643 bp, Zea mays
ggaggaggccgaggtggcgagcgtgccgccgccgcaggccgcggagaaggaggcgaggaagggggacgcgcagtccctgccgcggcagcctttggcggagagcaagaacatgagccgcgagtacggcgggcagtggctgagcagcaccacgcggcacgtccgcatctacgctgcgtacatcgacccggtgaccaacgcgttcgaccagacgcagatggacaagctgacgctcatgctcgacccccaggacgagttcgcctggaccgacgaggcctgccagatggtcttcaacgagttccaggacctcgtcgatcactacgaggtaacctctgtagttgctcccacagtcccactccaacagctccgatagtagataaaaaaaatttgaattgaatctcttgttgtctgaaattcgtacggtcatttccccccttttcatctactttagagccactcctgccaaaaaaataaaacatacggtcttggcaaaagaagtgatcggtaagaggatagctgagctcgtttctgctttgaaacagggggctgagctgtcggagtacacacttcggttgatcgggtcagaccttgagcactacatccgcaaactgctgtacgacggggtgatcaagtacaacatgaggtc

SEQ ID NO: 1059 - DNA, 626 bp, Zea mays
  misc_feature (607)..(610): n is a, c, g, or t
catttatatgctgctgcaaccactagaccggtaagcgctaatcgttttcattcttagaggatgctgtctaattatttatgttgtcatttgtgccatgttgtcttttcgtgtcccttttaggataacagagtgagtgttacctctgtactaggaggaacatctgataacaccggttcaagtatggctcgccgtctaggtaccgtttctgtttgcagttgcagtggctaattgtgctgcattcacggttagcttttagtaacagaaaggttgcaccctacatgtcccagtgctgaagactggcctgaacatagtcctggcatgcaacatcccaaaggacagccccatacttgaggtacttacaggtgggctgcatagttgcataacgatcttgttgacatatctgacactcactgtggtttcatgatctcaggctgctgcggagaggaagctggttgagaagctgaaaggtttgggctacattaaaaccccagctgtgggggctaacacttcctcggcacaatgatccgtggtgtgatctagtgagctttcggtcgacgtgtagcttcatcactacatgcagcagagagcggttgtgatttttcgcggnnnntgactgtgctacctgt

SEQ ID NO: 1060 - DNA, 535 bp, Zea mays
  misc_feature (501)..(502): n is a, c, g, or t
ggcttcaacctggctaagacgggaaattcaggcccttactcgggtaagccgttgttatctattagcactacagctattccataggttacaagaatcatgagtgcctttagctactggggtaggcgacctagcttttgttaaggatatatagcaacgttgagttttttgcaggacgagaacgttgaggtcatagtccaccacattcacggtgtcatcggatccttcatgaagaggctcgaaaaggagcacacgtcgtcaaggtggacgacttcaccggagaaaaggagggaagagttcaggagattggtttccgatgctgctaggccgttcctcctcggccgaacggagcgattcgtcgccgaggtggagctcttcctggcctcggatctcaacatggaagcctacaacaaactgcgcgtccagaggtttagggagtccagctctcatctaacgagagagcaagatgcactgcctcgtgatcggtcgcttgaggagcactanntgtatttcctgtgtaacgacacggactgtgatg

SEQ ID NO: 1061 - DNA, 272 bp, Zea mays
  misc_feature (67)..(67): n is a, c, g, or t
  misc_feature (69)..(69): n is a, c, g, or t
ctgcttgctcatcagctcgcgtataaacatgtgtctcttcccacgcggacgtagagctagctagctngntagatgtgtgtgcgtagaatagcgccagtagatcccggccaaccttaagaggaggggagacacaaacggctctggcttttttcggaagggtgtctggaactcttccggttgccgacagagagggaaggggacatatggggaggaagctgggcggcctggacagggtcctgcactgcttgtcgctctccctgctgtgaccctgc

SEQ ID NO: 1062 - DNA, 742 bp, Zea mays
  misc_feature (592)..(596): n is a, c, g, or t
  misc_feature (737)..(737): n is a, c, g, or t
aatccataataagtcaaaatccatctcaatcccacccaataccctccaatccacatggaacgaaaataaccgaacaagcccttaaatggggtttctgcttgtattcatagtttatgcattcggtatgcaggttggagacagggcattggtgtctatcgccgagaactgtaaatcgctcagagagttaacgctccagttctgtgagaggtagataataacgcatgatgcgatgtgtcttatctaacttggtatcccaatctgtatcgccctctttggtctttgctttgaaccgtgaatcttttcaatttcttattttttttcttctcagggtatccgatgcagggctatctgcaatcgcggaaaactgccctctgcataggctaaacttgtgcgggtgccacctaatcaccgataccgggctgacggcagttgccagaggatgccctgatctagtcttcctggatatgagcgtccttcgggtatgtggtttggtttctccatgaccctgcattccttacgcgaaaactgtccgaaattcgagtgaacagaaagagtcctcactgtttcactttgagtacattctctatcctgnnnnnggataggataaactttttgttttgtcatcttgcttcgacatactatactacacatgcatgcagatcgtaggtgacatagcgcttgcggagataggcgacggctgtccgaagctgagagagatcgcgctctcccactgcccngaggt

SEQ ID NO: 1063 - DNA, 410 bp, Zea mays
cgcagtgccggagcgtcgtcgtggtaggcgccgccgccggccagggtgtgcataaggcgctcgccatgttagattgctcgctgtagtcgtcgatcgagcctcttcgttccgttaggctgatcactgcacatatatacatcttcttctttcatggacgttgtttgttactactagtatagtagtatactatgccatttctttgttttctgctcatcgtcttcgtgtataccgttccattgttacctttttttgggttaggttaacccagttccttccgcccggggaagaagacacgtcagattctccggttctctgtaagctgtgtaattctaggtttctaccgtacgtatggagttttaggtattattttcttaggctaggatagttttgaaagaaacaataatagagag

SEQ ID NO: 1064 - DNA, 402 bp, Zea mays
gagacgaggacgcgggacctgtcggcggccactttgcgctcaactacgggggcggcgggcagtatcgcatctcagatttcgctttccgcggcggcgaaggagacggaggcgacgtcctcgtgggccagcgccagggacccctgtcctcccacgacgaacccattctcgaaaccctaggccgctcattcgactccgacggaggtctcagccaattctacccccacctctttcctgcatcgcaactcgtcgaggacacctccggggaggaggaggaggaggaggagatgatttcccgaaatgctctgggcggcgtagggtcggaattcgagcggggggcggtcgatgaggagactgccgacgacgacgaggacgggatcgtgctcatgctgaacgggtttaccc

SEQ ID NO: 1065 - DNA, 453 bp, Zea mays
atcgattcgtaaaaccaattgtttaagcgaaatagtttatgaatgaatacaggaagccaagcggtaacataaacttccatttcaaatgctaaaccagaggtggtattcggtattcattgagtcaccaatcatccagtgatggtatatcctaaattgatatatatggaaggtaatcgttcttggcatatgatgttcaccattttttaggtcattggttttcttttacaccatggttttcaggtcattggtacattttattacaagaaaatcgtgaagactgaagaacaaaatctatgtattggtccatccttggaaccttcctcactcaaatacttggagctaactggtagctagttcagacttcagatcagggaaaatggagtagggaaacaagaaactgcaacataatttttttgtggcctgattcccacgaagtacattagcaaaggacac

SEQ ID NO: 1066 - DNA, 411 bp, Zea mays
cagcagtgaggaaggcgccgaatatcctgagcttaactccggaaagggttcataaaaagttggattttctaatgggtgttgttgggttgcagatggcagtcattgtgtatcggccagtgctgctattgcatagtgtggagcgtcggttgttgccgcggtattacttgatgaaatttctcaagaacaggggattgatgagttctagtttaagcttcctaactattgcatcgatgggcaatgataatcttctggataaacttgtgcaccctcacgagatgagtgtcccaggtcttgctgctgcttatgcttctagctgcgctggaaaacaccagtgggagctccttgacgacatgacaaagggaaagagaaagagaaagtgctaagacatgttctggtaactagtgctgtgaa

SEQ ID NO: 1067 - DNA, 382 bp, Zea mays
cgtgcgtgtaccctaaactcttccccctcttcctcctccccctcgcctccgtccccatcccgattgcatggtccatttggttgcacggaacggcgtctcctccatcggtccgaccaccgcgcgggcggcaacaccgacttttgcatcggtttccccagatcctggatgacaagcttagccccaagtgtttggatgtgctgctgctgccatcaactgccgtgatgtatttctttagctcgttcaggagtgtgtggggtgctaataactgatgttatatttctgtagcgcggccagaaacagtacaacaggcgctcgtatattaggcctgtgggagctgtctggccaggcaaatttgtcaggtcttgatctaaataggccctca

SEQ ID NO: 1068 - DNA, 537 bp, Zea mays
gtcattttcgtagttgcagctcggaggagatgatggatgctataaacttggattaacttgttggatctgactacgcaggttcaagctaaggacaacaggttcacacttcttgcacgagctgggaggcaggttaggtttcttctggtgaccgcaatgatttgttttgttttcagaggagtttcattgtactgctgtcgggccttggctggttcggttccgattcctactaaatagaattatatggattgtaattccttcttattacttggcaggtccaggaagtgtatttgaccacttccctagaccaggagggcataaagaaagccgtgcaaagagtgctggggcgtgttccttgaacccgacacgcagcgtgtagaaaccgattttctaactaaagcattacaaggaatcaacggtacgagcgaacagcctgaaacatttgccactgtcagtctgtcacaacatccggctagatttttctctgttggatactacaacaaccaaaaatctgtaaatatttgcagtcctacacgagta

SEQ ID NO: 1069 - DNA, 801 bp, Zea mays
tagtcttggatactacatttttctactgatctatggttgtccaaacttattaccatttcatagaagtgcatctgatttttttttaaaaaaaaaattgaggttacatttaatttgtgtccttttgttactgattaaagctcattgttgtagaggcactggaccttctccaagatccaatcatattgctacactgtatgatgatagggtccttttaatttttggaggccactcaaaatctaagacacttaatgacttgtattctttggatttcgatacagtaagtttgtgggcatccttgtttcagtatacctcagtacattttgcatttagcaggctactcattagtgttttcttcctgacagatggtttggtcaagagtgaagacccatggtcctcacccatcacctcgagctggttgcagcggaactctctgtggaactaagtggtacatagctggcggcgcaagcaagaaaaaacgtaagtctcaagctctctctcaatttggaagatgagttggtgatttatttcttaatgaagaatacatgtattgctaatgatgaccatctagcttcttttgcaatttctaacaagaaatcaaattctcaggacatgctgaaacttgggtttttgatgttctacaatgtaaatggtctgtttgtgtagtgccccctagttcatcgattactacaaaaaaagtaagtgtttttttttctttctgactctcatatttagttttgatagtatctcgtactcgctactttccattctacaccactttcatctaattagccagaaaactaa

SEQ ID NO: 1070 - DNA, 381 bp, Zea mays
cttcacatgagccccctgaaagggaaattggcttaatcatttcctataatcgattttggtgtttgacgtccatcacaaaccacgtggactaactagtttgcctagttgtcatttatcttaggtgcacaaagttcaacataaactgacaaagaaatggagttggggaactcaacaaagtttggagtaaagacaagcattggtgctaccagtggcgcaccggacattgtccggtgcccaggccaaggcacccatgaactggccgctctcgagtttttcctagagtcactccgctataattcaccggactgtccggtgtgcaccagacatgaacggtgagccaacggagcaacggtcaactgcgcccaacggtcgactgcgatg

SEQ ID NO: 1071 - DNA, 280 bp, Zea mays
  misc_feature (238)..(243): n is a, c, g, or t
  misc_feature (267)..(270): n is a, c, g, or t
ttttgagcttcccccaaacgattagatgacaatgagagaatcaccaacctctcagcacttgtattatagtcctccacctctacttctgaactaggatcaccaaccaagtaaggaacgaagcacagcagcgagctcaaacgatgaatcgctctgtaattttgtaatccgtcatgccaagaagctggaaaaaaaaggaagcttactccttcacggtctagaagccggctttgcggccccnnnnnncgactcctgcggcaggggaggggnnnngggagtggaa

SEQ ID NO: 1072 - DNA, 557 bp, Zea mays
cgttggcacagtcacgtcaatcgatgaacatcattcagaaacattacccagggctgatagcagccgcgatccttttcgaccctccaaagatctttgaatccttttggaaggtacggtgttccatagtgcaattctgtttctaagtttaacagcaggtttactagttctggcatcggttgtcaagcatcctgaactttaagccatggactttgtctgaaccagtacaagcttggtcctgtagaaattgtgacatgccatttcattaactgcagtgtcaatgtataatgcttaaacctccttttttttagatgctaagttacttcatcgagccggagctggaaaagaaggtgaaattcgtgtacactgacaatcctgagagccagaggataatggccgacatgtttgacatggagaagctggagtccgcatttggtggccgcagcgcgtctggcatcgacgttgccaagtattccgagagaatgcgaacaggagatcagattaggggtcttcgctaacggcaaatggaatactgctatctcacagttcgtcaagaaact

SEQ ID NO: 1073 - DNA, 482 bp, Zea mays
catttctggtgggaaggctagtagtaaaagacagatccgcagtagggatgctttgccgactgaattggagttccacacgtccgtgtctgtgaaatatttactattatcagctttcctggctttcaaggagcccagctacgcttgatgcagctttgttcgattcaactggagggtcagatagccataggcgtaagagaaagtatgccacctaatctcatctcctgacttgccaacagtctaattatcttattagaatattagatgcttacatcgttgttccttgatgtaggagttctcaggtgttgacgaatatgaaggacaccatggccgaagagatgcttttgaaaggccctggcacatttcctcttgagaggctcttggctatattttagtgtatcacgtcagtgtcataagaagatctcggtgatgttgaatgtcctgatagtatgatgaatgaaagtcgaataactggtttgatgtca

SEQ ID NO: 1074 - DNA, 413 bp, Zea mays
aagagcaggagccgctattcccctctcctcaaagtcgtttcgtggctgctgtctccgacgacgccgatgacgccgagcggcggcggcgaaccacgatcgtgcccgtgaagttggagcccggtggccccggccggcggcaaacgaacgcgaaaaggctggtggtcgttttcgcgtctctgcgggcgtgttcttgggctccgaggattaacgacgggaaggtggctgcaggccgtgctcccggcaataaggcggatctgttctattatcgacccattcccatggggcggaggtgccgggttcagcatctggaggagtctccttacgttgcaagtagtgacctgtcgtcgctgctcaaccttgaacagatgtgagaggtgcatggtccgggaatagccatgcacaaacttcaatat

SEQ ID NO: 1075 - DNA, 397 bp, Zea mays
tgtgggtcttgtcggcaatttggatttgcatcacaagattgcggtcccaatgttcttcttggcaatggactcgactcaaaattttgactctgatgctctggctggaacagtgttcaggccacagttgccagctaatgcgacgttctcgtctatttatacagctcaagcacctgctgttttccctgtgaaagttatgaatgagattgatttcataaaggtgattcggctaatgtccataggagacccacttctgatggagttggtttaaaggtgtaatgtgtagttgaagtgcaagcttatccttgtggccatgaggacagagtagaaaaggcatagttttgtgttttctggtgtttttgtaatttcatttattttgttcattctgtagctgtttatt

SEQ ID NO: 1076 - DNA, 341 bp, Zea mays
gatgcaccgaaaaaccggtggtaccacacatgccggacggcgagaagacgaccgaggcaacggccaaggatgccggcggcggcagccagccgaaaccaccgtctcgccgcggtagcgcccgcttcgagcgcctcctctctggactgggcgctggtccgctcgtggacgtcgagcccgacaaggttaaggacgagatccggcgatgggccaagaaggtggcggctctggtgcgccagctcagcttcggcgcctgggcggagaagagcgacggcggctcgtcggagaaccacggcgcaggcgatgatggatacgagagctgggcacctagactgcagataact

SEQ ID NO: 1077 - DNA, 287 bp, Zea mays
ctcaacatgtggctaaaaatcagctgcatcagaaatattaagcaaatcagacatgcgggcctatcaacttatttctggtataaaaaactgagatccttaaaaaagaataaaatattttacttttgttgcagcctgctggactggaccccgttgtgttcttccgatgatcaatcagtcaatcacaaattcaaaccatacaaatcaagtatgtttttattttatattacggtgaaatgatactagaatttcactgacatgttacacaatttttcttagctcaatatcca

SEQ ID NO: 1078 - DNA, 774 bp, Zea mays
  misc_feature (44)..(45): n is a, c, g, or t
gagcggttgacacgagtatttacccagaaaattcatgatcttannggaacgcatacagatgtccctgctcctgacatggggaccaatgcacaagtaggcctaacattgcttttgttatttttttttgtatgctcagctatcttgtttttcattggtaccttttatgcaattgtgacagaccatggcatggatgctggatgagtactcgaaatttcatggtcactccccagcagtcgtcactgggaagccaatagtaagtgaaaaaatgtggcagcaagttaaattggtgccaataaacttttttacaaagtataatataacagaaaaaatgtacacaatagttattatcatttttactcttttttgtttgttgttgtaggatcttggcggatcactgggcagggatgcagcaacagggcgaggcgtaatgtatgctaccgaggccctactcgctgaatatggaaaatgcatttctggatcaacttttgtgatccaagtgagtgatagtttattcacatatgtccatcgaatgtacttttataagatgataaaaggataaccacatgttccctatagcaggttacctactgaaatattagttctttttttaaaaactctatatttgttatatttgctatcgtgtcagtatgcaatatatatggtttaatatgtaaaccttgcagggttttggcaatgttggttcatgggctgctcgacttattcacgagaaaggtggtaagattattgcaattggggatgtgacaggttcaatta

SEQ ID NO: 1079 - DNA, 396 bp, Zea mays
ctaagttttttccctcaaccgcaggaggtggggggcaattgcagttaccaaactatttcacgtttccaagccctcatgcaacggatccaaggttatgtgtctgacatggagagtaaatacctggataaggaaaagacttgcagggacactcaacatgaggtggagtgcattaagaatatggtgatggaaaaggatcaacaaattgaagctactgtcaatgctatacgacaggaacttttagaaaggagtgttgtaatgcgaacattggaagcagacaaggatcaattgagccgcagtgttcaacaatacgataagttactcaagaagtctttagctaaatttcaggagtatatgaatatggtaacacgtggggaaggtgttgactcgtatttggag

SEQ ID NO: 1080 - DNA, 384 bp, Zea mays
cctacgccatgtcgtcggagacgtcgcacgacaggcagcggttcgcggcgaggggcgacatcgagaacaatcgcctcttctcgacgccgcgcatggacaagtacctggagcaggccaagaagttcgacgaggacccggcggcgccgctgccttcggcggacaaggacgaggaagaggaggtcgccgccaacccgctcgcgccattggtcggccccatcaccttctacatccgggccgccgtcgaggcgctgcaggccatcgagaagctcatcaacaagggagccaattaatgcgatgtaatgaacgggcacgcagtcagatccagtcctgttttgtttacatggccatggccatccatcgtcatcccttcttctctctgctata

SEQ ID NO: 1081 - DNA, 612 bp, Zea mays
  misc_feature (406)..(406): n is a, c, g, or t
  misc_feature (465)..(466): n is a, c, g, or t
  misc_feature (521)..(521): n is a, c, g, or t
  misc_feature (562)..(564): n is a, c, g, or t
  misc_feature (591)..(592): n is a, c, g, or t
acagcttgagctattctgccttcttggaagctcgccaatgggagtctgttcagagacaggagcggctccgcaggaggatcgcatacggtcgttcccagtgaaggatcgtctccctgaggccgaacttggtcttcccagatacgaccacaatgtgttttgtgtatatacaggtacggcccttttgtgtggcaaacactgccacagcagcgaaaggaacgctgatccaagttgctgcgtggagatgtattcctagacagctaacctgcttttgctgtatggagctgccttgaggagacaggagtacattagctgtagcatgtagtaacctcaccttttgggaacagtactttgtgtggggttactgtcaaataccgtaaactggaggtgccagtaaccccacacaacnaagtactgttcccaaaaggtgaggttactacatgctacagctaatgtactctgtctccnnaggcaactccatacagcaaaagcaagttagctgtctaggaatacgtctccgcagnacttggatcacgttcctttcgctgcctgtggcagtgtttgnnnacaaaagggccgtacctgtatatgacnnaaacacattgtggtcatatc

SEQ ID NO: 1082 - DNA, 392 bp, Zea mays
tgcggacgctgaagatgaaaaggaagacgaagaggcagagacacacgaggcggcggccgtcgagatagcagaggagagcaataccaatgttggtgtcgacgagcctgagggttcggagatattggctgaagaaaacgaacacacctcaccggccctgactgcagttgctggcgccgcctccgacgttgtggacgcgaggaagttgatgcagatggtggcgacgctgtgcgagcagagcgcgcagcagtgcgcgttgatcgaagtgctggccgagcgtgtggacatgctggagcgtaccgtgcggcggatgcaagacgccgacagcgccggcggcggccagccaagaagctgagcacggagggcaactgaaggagcaacagcaagctttacag

SEQ ID NO: 1083 - DNA, 445 bp, Zea mays
ctggggcacgcccatggtgctgccttatccttcgcatcagctgttctggggcgtccctttgccctcacggccaaccgctcagccgtgccctgcaacgccaccgccgggatggagcgtacctacgccgccgccgtcttacccagcgccattctgtggcgcgccagtaatgctgccgccactgccacggcatgtggcctggcgatcaccacctcccctcctgctgaaacggccaccaccgcatttgcaggggaagccgctgcccgcgctgcttccaagtccaacaccaccacctcccacgctgcagcactatccaccgcacttcggcgggcagcatccacctcctgatccaccggtcatgcagctgcagcagtgcagcggccgctgtcgcattgacagggccagtaggcagtagccacctcctgcgcttcttcagattgaggaattt

SEQ ID NO: 1084 - DNA, 773 bp, Zea mays
ataccttataaacttctctcaggtattctcccagtttcatacaagctatgtaatttgatttctgccttgattcagccttccaactccagctgcaaattgaaaagcgtccagccaatgatatgtgtagcctttcaactccagccgataacttaagaagtcattgccctaaaatgctgatatagaactagcagtttggccatatttgtctgacaatggagaatcgctttgttctgttactctgtgaaaacagtttgacacttggtcgctaaggtccgctaaatctttgttgattgtttcactgttatctgctacggtagtttagaggatttccatttcctccaaatctaaccttgctacaagtatgatctgctaataggctttttaccgccctttggtcactgtatacttttcaatgcaggtggatgtaattagaacaaagttcgaggataacatcaaagatctctatattttgcattcgaaatcttcaaaatatacggagcttggcctttcccgtttctgggggtatctgaactacaatgagtatcattctacgaaagtcagcaaagatatggacaacttctatttttgataggacattgcaagactgaagtaaggtttgcctttatatttgggcaatagctcactggccaccgggactagcttaccttttgaggtacacactgctgagtggtgagagttcttgtagatatacgctggtttgatcaaattggcccttgtattggtttttggcgaacttaagagaactatgtcag

SEQ ID NO: 1085 - DNA, 594 bp, Zea mays
tgtaaggagactcattgtgaaccaagttctgccaccttcaacatcggactgtaaattctgttctataaaaagaaaggtacaaatgatatggcaccgacagtttaaattttcagttaatacctggttcttgtaaaaaccactagcctgcagctgcaggaaaagttatgtatctcattttcttcacacaggatcaaacgcgtgcattggatatgatacggactgacccagagttaaaaggtttgaacattatccaagcacctcttgtggacatggagattagaggtgttccggctctcaattttttgggtgatatactgtggaagtaacttcagttatgggaaacaggatcgcttataagggtgcttaattggccaatatcactgttagcctgctgcacaattgcactgctctgcaactagcaatctgtgggctcttctggttgtttccagctaacaattgcacaataagcttaagttgtttccagctacaatacagcacaacacattctccatggtgcgttaaatctgagtagaaagcaccaaattggagggttttgctgcactcctgcactagcatttgatgacctgttactct

SEQ ID NO: 1086 - DNA, 685 bp, Zea mays
gctctgtacagaagagtgaaccaaatcgaagccctgcggtgctactccaagcctgaaggctcaatgtttatgatggttagtcagagatacacaaaaattcagtatttgaaactttgttacttcccaacataaaggtgttggtattcacaaaaccctgcaggttgagatcaacacttcaattctacatggcgtcgccaacgacatggactttgctcgtgagttgatcaaagaagaatgtgtcctggttctacctggtacagctcactcactccatttgttgcgatattattttatccaacctttaacaggtgcattggtttctctggctgctgagaactgaatgttagtaataggttgacttgacattccagtacaagattcttcatgctggcatgattttaatctactctaaaattgatctgtagtaacagatccaatatcctttttgtttcttgttattttacaggttctgtcattgggttgaagaactgggttaggatatttttcggagcacctgttagtttaatactagaagcttgcgacaggattgagatgttctgccgaaggaggacgctcaagcaaaacaactgaagagctgaaaatgttttgaaaccaggaagtagggtttttgttagcccagtaacatatatatacagcttcgatttattttccaatgcacattctg

SEQ ID NO: 1087 - DNA, 475 bp, Zea mays
ctgttgctcgccgtcctcgccagccaccgccagcctgcggcggccgtcgtcacgctgtcgacgtcgtcgcggtggatcgtggacccggccgggcaccgggtgaagctggcctgcgtcaactggccgtcgcacctggagtccgtggtgaccgaggggctcggcaggcagcccgtgggcgccatctccgggatgatcgtctccatggggttcaactgcgtccgcctcacgtaccccatcgcgctggtgaccaacgcctctctgtcggtgctcaccgtgcgccagtccctcctggccaacggcctcgccgagacggtcggcggcgtcgaggtcaacaaccccagcttccttgacctcacgctcatcgagtcgctcaaggcaatgcgtgcacgctagctctaaaccagccatctcctaccttcctgagagaaggagctagtcctgttcgtttcgataatcttcaagcaataatgcctgc

SEQ ID NO: 1088 - DNA, 301 bp, Zea mays
  misc_feature (298)..(298): n is a, c, g, or t
tttgcttggacacactgatatcgctgatgttggactcaccctccaatcagatggtatggtttacttttttacctaaatatatcttccaaagtcttgtatatgcggcatttgattttttttaccaaattaagatgagtatacaggtgctgagtgtaggaccacctttttgaaaataatctaagtaaatatcgctaatatgattggaatatctttgtctttgggtgttactgttgttcagtagattggttgattttctttcaaaacattgtttgcatgggccaagacttacgaaaatagncgg

SEQ ID NO: 1089 - DNA, 650 bp, Zea mays
  misc_feature (341)..(341): n is a, c, g, or t
  misc_feature (639)..(644): n is a, c, g, or t
tcttcaaggaattctacacgaaaagccatttttgtctaaacacgactagttattactagtagtatatccgttcttcaaggaattctacacgaaaaaggtagtagcaccgttccttacatacagaaccacaagaagaaaccaccatcgcactcatttcgcgtcacgtcacgtcacgtcacgtgtagcattctccggcggcacccagtgctcgatgaggcgaagcatatgaggaagatggaggatttctaaactctccgccagagggcgatcagagatgcagcgaccatggctatccacgcccttctgtccagcatcgccgacgaagctgctgccccggatgncctgcaccgcacaaacagaatttaccactcgcacgaaccatggatcaccacaagcgaggaggcatacgcatcgcatgcaagggagaaagatttgcagtggacaaagaacttgcacgatctggtggtttcacttactcagacgccaagaacttgcatgatccaaaacctgccaagaaaacgaagagcatcacatcacagcactggacaatgctgccggtgaccaaaaccagcagtgaatgacaggatgggggatggaaacggtccgtacttgggtcccgcttgacgagggctccagcgnnnnnnaagtgc

SEQ ID NO: 1090 - DNA, 155 bp, Zea mays
cccaattgaatatatgccaactttgatttccgcatggaaaataatgtacgctttcgccctccatcatgtctactgttctagaatgcttcgattaggtttattataagatgcacatggtccaattctctagtcatttctgttcgttatttgtcttg

SEQ ID NO: 1091 - DNA, 991 bp, Zea mays
  misc_feature (981)..(987): n is a, c, g, or t
gtcctggaccgagagtcaaaacaatctcttcgagcgtgcgctggcagtatatgacaaggacacaccagaccgctggcacaacgttgcgcgggcagtcggctgcggcaagacagccgaggacgtgaagaggcactacaagtacctgaagacggacgtgaagcacatcgaaaccgaagaaggcggccgaggatcccagtccagcagccctgctggtgctggtgctggtggcagtggaagcagcagcagcagttcttggggcagggacaacggtgacaagaggtagtagagtgtaatgcattgctctctctagcatctatctctgctcgatctataagccatggcattacatcgtagtacatcctcttactgtgctgtctagcacgctagcctttggtacgtgcagtataactgttgcttctgttttcttgatgtattcgttactcacttactcttcgttccattgtccacctggactatctttctagatccctctaatcttcagcatgccttttttctagcttgttccttctgttccccccttcactcgccttttaaactgtgtgcatgcatgggcttgactattgactatcattgtcatatgctttcacatataaaacccccaccatataaaaccctattaattaccttaagaccttattcggttgtactagatcaaaagggattaaggacgagtaaatatatttttattcaattttaactagcaagagatttaatccccttcaatctattcctaataaccgaacaaagctctagaggcgttgtgcttatgacatgttataggtggggggctctttaattttaactagtggtttcttctgttgtgttgcatgagagtgcatataccgaaactagctttcacatctttgcaatattcggccaagggatagcagtgacccgtcgttgtggttccttgtttcaggatgacgaggcaccccaaccagccgcagtgaagtggatgtnnnnnnnagag

SEQ ID NO: 1092 - DNA, 397 bp, Zea mays
ttagtccctaacatgtttggttctagggattaaaattagtaagaatatactaaatgactcataagaagactagtgcaattgaactaaatgagaggtaaatgtggaattaatatggtttaatcccttttagccacatcttgagggactagggactaaaatagtttagtccctgttttaatcctaccgtttgacaatttaggactaaatatgactaaaatggagagattaatctttagtccctcaaaccaaacgggacctaaattgctcgcgccccgctagcaaattaggaagcaaatatattttttccttcctttctttagatgcgaaggatgacattatggtgtgcttagccagttagcctacatcaaagagatgtctctcgtcaagaacagttagc

SEQ ID NO: 1093 - DNA, 780 bp, Zea mays
tttcctttaggaatttggtacctataacaaagaggtgtccagtgaactttgatgcacattaatgatttttgtatctacttgattttgagtcacgcactcacgcacctgcacaaacgcatgccagttctgtccaacacaggcaggatttgggctgaacatatatgctgaatcaccgatcgctttggctacgtactctgcgctttcaggtgcgtttggtgcggatcacagaaatggtccatgacgcatactattctcgactatatctcgcaaaggtaactgcactcccaagtaaattatgccgcaaaaacaatccttttagcttatattggtctgaaaaaagaaagcatggcaacatgacaccaggttgggaatgaccaagacactatcagtttcgacctcaagccatcggatgctatcaacattgctttccgctgcaaggtatgcatttgcttcttgcattttccagtacagaggacaatatttgtgtgtcgaccggaccacacctattggctatttctattgctgatactgaaggcataacttgtatcttcttggcctagtcaccatgtaaattatatatatttcatatcatcatatgactataaactaaaccattcaattggagaatcaaagcaacggatataaccccgtttggacgtagatattgtagcacagaattagtaattggaatcagctttcctaaattctgttgtttggttgcatgtgaaattgagatttagaatcagagctcaattccctggaattgtactataactagaa

SEQ ID NO: 1094 - DNA, 544 bp, Zea mays
caggcggcggcggccggcctcacggtgtgccgcacctgggccttcaacgacggcggctggagggcgcttcagaagtcgccgtctgtctacgaccaggatgtcttcaaggtagtaattaattataagataatatatatactatacatgcatggttgtggagcctgcgtggccacgatcgaagcctactacgattttcgcgcgaaaaatcgcagcatttatttgaaaccggccggccttaagtgagatgcaatgcaaggatacatgcttgcttagcttattaatggagatttgatttgtttatgcatggacgcacgtacacgacgaagctaggcgctggatttcgtggtgagcgaggcgaggaagtacaggatcaggcttatactgtcactgatcaacaactgggacagctacggcggcaaggcgcagtacgtcaaatgggccggggacgacgccgccgccgacggcggccgcctcaacatcaccgcctccgatgacgatgacttcttttccgaccaaaccgtgaaggtctacttcaagaaccacg

SEQ ID NO: 1095 - DNA, 344 bp, Zea mays
atgtttaaccttcaatacagtgcttatttatatccaacacaccgcccaatcggcaactacttattagcatcatacaatggtgatatcaccccccatgtttgccgccaaccgacccaaaaatcctctgcatagctaaacaaggaaaaatggtgctgttcgtcccatgtctaaacaaaggggactgaggtttatgatccatccgagacaacagatgaaaaaatgatttgttccgggaacaaaggccatcaaagattgtacatcggctacatgggacgatctcaatcttcttcctcacgaatcagcgcaaaggagaatggggcgaacttgtaaccatcaccttcata

SEQ ID NO: 1096 - DNA, 421 bp, Zea mays
atttgcctgatttagacacaatatgtcaatgatggtaataatttgtatggtaaatacaatgtttaccatggtgaataaaatcagttcagatggttagtgttgttgtcaagcacatgttccttgaatatcaacgttactagtcagtacatgtcaaccataagtttgatgctgacaatagggtcacggctcgtgggaaatggcaagggggcactttttttcgttttacatgttccctttcatctctttttgtgtcaggacaacataaaacatatagcaaatttctggtccatacaatattcgctgttatttagtgcaaagcttgttacagcataatgttatcttgctgacaatctaaactgaatggtccaagattctcaaactgcattaattttttcagagctggtgactggtgagtttaaca

SEQ ID NO: 1097 - DNA, 398 bp, Zea mays
  misc_feature (374)..(389): n is a, c, g, or t
tatctgcaagcaatagcatcaagatcgctgaactgcatgaaggctgtatgcaaaccatgatgaacacaccacgcccagctgcgcgaatcaaccaatgcggacataggtgggcaacatgggcccggcggcgctcatgccagctgccaacaggccgtccccggcggcctcctgctccgtgaggaagaggtcgtcggtggtcctgagcgcggcgtgcgcgctgaccagcgcacccccgatcatgacggagcccaccacgttccagccgacgctggtgaagagcatggcgatgacggtgaccccgcagagcgcggcgagcacggagccgtcgtcgaactccatccccaggaccctgagcggctgcccgccctgcgcgnnnnnnnnnnnnnnnnggaagaacc

SEQ ID NO: 1098 - DNA, 473 bp, Zea mays
cccgagaatgcgaggccgccacggagaccaggtccaattctagaaagaaaacaatgtcgttatacctccaactccaaccagtacgtcatgctacaccactctctgttggttcgtatcgtgggtttgtgcaacgcggaggagacgggcggacatccagtcggacacgtacgtgctgatggaacccggcatggacgaggcgttcgtgtccagagaggagctagagcctagaggagagcctcacaagaactggcccgtggacaccctatccctggacctcgccaggttcggcatggtcgacgaggccgtctcgtacctcgtcaggtccgtgtgtgtgctcgagatcgatggagacgttgggtccgtggagtggtaccaggtccagttggactagaacggaagggcaccaccaggcgtggagcctgcggcttaatttgactcaacacggggaaacttaccaggtccagttggactag

SEQ ID NO: 1099 - DNA, 1138 bp, Zea mays
ttatgaagcagaaggggatgccacattctgtaaaagggattattctcatgcattggatctctatactatggtaattttttctgtcacacatctcaatagacgtgagaggaacttctgtttgctgacaaaaagctcactttctgacgtccactgtagcagatcgtcctgatcaatcaataaagtagtgttaagttaccttaacatatggtcgttaccttttatttcattttaatgagcataacatccatataagttccaagaaagcaaaactggtcgtatatccttcagcatggggtcatcaccaactgttttgccttcttgtccttctttgttaaggattaacatgatctttggtttagtaaacttaaatcattaaatggatgcaggcaatggaaattgatcctgataattcaaccttgtatgcaaagaggagcctttgctttctgtacacaggctatgaaggaaaggctttggaggatgctactacctacagagatatgcaaccagctcttgctctggtcaaggtggggagtgatacaaatagcataatctctgtcatgttccatggttatttattcgctctgttgtctttaggagtattgcatgacatgcgaagcactcttgcctggcttgaactcggattttttaagcaaaccaactgacgaagcgttcgggtaacctacacttgattgcttctattctttgattgaatatttatttgctaaaatatattgttcaaatacggatatggaaagaaagtttgtcatatattagtaccctaataatatatgattggccaatgttgaaaatctttatttttcaattatgttaggagaaatagctaatcaggaagttaacacttaaggctttgttcggttattcccattacacatggattgaatgagattgtaaaaaattaagtagtttgacttgcttgtgatttaaatccacccaatcccacttaatccatatggattgagagctaaccgaattaccgaacaagccaataaagagtttgtctgcgtgcttaacttgtgctctaagtttccaccatatttgcagggaaggacaatccgtgaagaaaggttattagtgtacagggaagaaagaaggttgttactgcacaggaaaaacagag

SEQ ID NO: 1100 - DNA, 396 bp, Zea mays
  misc_feature (386)..(387): n is a, c, g, or t
gagcatcggaaccctgacctaaagctatttagcggcgtcgctcctctgcggggcgacacgtgcggaaccagcgccgccgccgcaagagttggcctggcccgcctcgctctttacaacatcgccttcgcctgagcacgcggccggaggcccgcgtcggtgcgaggatggcggcggcgaggtctctcagcttttctcgcccgttctcttaagcgtacttgcctcgtgcctgcgccagctaggacggttcccttccctggagaagctgacatcgtcgtcgctgtcgctggcggggaggttgtctggccggacgggggccccgcggcggcgccggcctcgatctggtgcgctatggccggatccgtggtgtgttgtggtgtgggtggagnntcatttgtg

SEQ ID NO: 1101 - DNA, 414 bp, Zea mays
gctgccgccgcagtcgagcgagaaggcgagcggagaccatcaacgagatgaccagcaggatggcaaggcgcaggccgaccacaggcacagggagatggtcgctcgcgaggccgcgcgcaggatcgaggcggcgcgggcgagggtggcggaggccaaggccaaggcggagcgggagaggaagtgcgagcactggaaggagcgcgccgtggaggagggcctcaggttggcggaggcggtcaataacaagaaggaggtgatcgccacggccgtcgccgccttcacacttggcgtcttcgtctccagtaggctcttctccaggacttaatcaacccatgcgtaatcatggagcagacaatttcacgtatgtgtgagcatgagaacatgagcagcatcgccaggttatattgattcgta

SEQ ID NO: 1102 - DNA, 641 bp, Zea mays
gtgtggcacaatgtcccagctagtagtcctttcaggttgctgattaacgtaggagacttcgtggaggtaccctacagttccatagtactacttagggggtgtttggttctgtggactaaagtttagcccgggtcatatcaagcgtttgactttcaaataggagtatgaaatatagacccaaccaactgtactagattcgtctcactttttaattttcggctgagaaattagttttataatccgactacatttaataccccgaacggaggttcaaacattcgatgtgatagaggctaaattttagcaggggcaaaccaaacacccccttatacactgtgacatctgtcatgaattgcatatttcagcaggctgtcggtttgacgaccttgacggacgcagataattagcaacggggtcttgaggagcccggtgcacaggggcggtgagcaacgcggagaaggagaggatctcgttggccatgttccacggcctggatcccgacgaagagattgagccggcgcccgctgctcttttaagcgagaaccagccggcgcggtacaggacactgaaggccaaggagtacctgctggccgggttctatgaacattttttttgtagattcatcgagtctgtgaagatcc

SEQ ID NO: 1103 - DNA, 641 bp, Zea mays
  misc_feature (168)..(177): n is a, c, g, or t
  misc_feature (181)..(182): n is a, c, g, or t
  misc_feature (184)..(185): n is a, c, g, or t
  misc_feature (188)..(194): n is a, c, g, or t
  misc_feature (196)..(201): n is a, c, g, or t
  misc_feature (204)..(205): n is a, c, g, or t
  misc_feature (207)..(230): n is a, c, g, or t
  misc_feature (233)..(233): n is a, c, g, or t
  misc_feature (235)..(237): n is a, c, g, or t
  misc_feature (239)..(257): n is a, c, g, or t
  misc_feature (260)..(265): n is a, c, g, or t
  misc_feature (267)..(276): n is a, c, g, or t
  misc_feature (278)..(287): n is a, c, g, or t
  misc_feature (289)..(292): n is a, c, g, or t
  misc_feature (294)..(304): n is a, c, g, or t
  misc_feature (308)..(310): n is a, c, g, or t
  misc_feature (313)..(320): n is a, c, g, or t
  misc_feature (322)..(325): n is a, c, g, or t
  misc_feature (338)..(340): n is a, c, g, or t
  misc_feature (379)..(381): n is a, c, g, or t
  misc_feature (440)..(440): n is a, c, g, or t
  misc_feature (447)..(447): n is a, c, g, or t
  misc_feature (455)..(456): n is a, c, g, or t
  misc_feature (460)..(460): n is a, c, g, or t
  misc_feature (566)..(567): n is a, c, g, or t
  misc_feature (574)..(574): n is a, c, g, or t
  misc_feature (587)..(589): n is a, c, g, or t
  misc_feature (593)..(593): n is a, c, g, or t
  misc_feature (612)..(615): n is a, c, g, or t
gtgtggcacaatgtcccagctagtagtcctttcaggttgctgattaacgtaggagacttcgtggaggtaccctacagttccatagtactacttagggggtgtttggttctgtggactaaagtttagcccgggtcatatcaagcgtttgactttcaaataggagtatgnnnnnnnnnnccanncnnctnnnnnnnannnnnntcnntnnnnnnnnnnnnnnnnnnnnnnnngtntnnnannnnnnnnnnnnnnnnnnnccnnnnnngnnnnnnnnnnannnnnnnnnntnnnngnnnnnnnnnnncagnnncannnnnnnnannnncttatacactgtnnnatctgtcatgaattgcatatttcagcaggctgtcggttnnncgaccttgacggacgcagataattagcaacggggtcttgaggagcccggtgcacagggncggtgancaacgcgnngaangagaggatctcgttggccatgttccacggcctggatcccgacgaagagattgagccggcgcccgctgctcttttaagcgagaaccagccggcgcggtacaggacanngaaggcnaaggagtacctgnnngccnggttctatgaacatttttnnnntagattcatcgagtctgtgaagatcc

SEQ ID NO: 1104 - DNA, 220 bp, Zea mays
ttgtggtagatatcaacgaaaggaagaagaagaagaagaagagggggctttcggtttcccggcgtggggttcgtgtgtgtccgatccgatcattttgaggatcggatttgctgctagtcggtggacaagaacagattgttcttggctccttgctgcaaaattgccatatggtgatggcgattggagaataagaactgggcttgtttgtatatgcatctga

SEQ ID NO: 1105 - DNA, 358 bp, Zea mays
acaactaacacattgctaaggataaagcacgcgaaccatgcttgatgcctcgatgcaagatgacagatgcttcgagctatgtttcgttttgagtttttattttcccgtggttcatgctatttcattgtttgccatgcagggacctggataagagcttgcagaaggccttgcacaggtaccttgaggtcagggggttcaaacattcactacatgattggctgtacgaatacatgatgagaaaggatgagaaggagtatgttgtttggctgaagagcatgaaggagttcatcggcggaaattgattgtttgcgctttaagttttatctgcattgtgagaacgagacctgtactcatcatg

SEQ ID NO: 1106 - DNA, 792 bp, Zea mays
caagtcactgctcctcctcctatgatcgttccagcgcttcaatttgttcctgcaaactgttctagctacttgctgcaacgccgtcttgcaattacagagctgctctgtccgttactccgttctttgtttcgaggttgaccgtccagtttcgtgtcctccattcagttcacaaccacttgtacccggacgctcagccagggctgtatcctcctcctccgccggcgccgccgccggcgatggcgaacccgccgcaggggggctacggctacggctaccagtaccagggctaccttggcgaatcggcgaaccctcctcctccttattactacactggcagctggcccgagcagcccccagctccgtccgacggcgccccctttcgctaccgctacctgcaggaccaggacgatgccgactgcatcaccttcctcagaggatggtacgtacgttccactttttttttcctcggaggatcgcgttttgataggctctgaaacaccccagatgcatgccgtgtagactgatatatgatgttcaggtttcccgtgtgttggagtgctgaatgaaaacttgttcgagtttttgcctgagtcagtcagtcggtcggtcgtctggcaaataaaacaagaaactactacaaactgactgacatgtctgcttgcgcgcgttgcagtcttgctggtctgtgctgctgctgcttactggagcgatgctgcatctaaggaggatggcgtgcagtgctgctgcctggactagcacgcatgtatgcagcagtgtggtggtgacataata

SEQ ID NO: 1107 - DNA, 433 bp, Zea mays
ggccggggggcgttggccgaggccggcgacctccctgtaccatgcgcggagcatccagagcgcgtagaggatgacggccatgccggcgagccccacgacggagttggccgccttgagcgccgtctgcacgcagctccgcaccatccgccccgccatgccgatgccgatgccgatgccgccgtggctgaccggagcaagacctgcggcgccgatagctcagcacctcttcctccctctcggctctctcggctgggtcgccggtccggtccggctcacctttatgttccgcgaacgaagcgggcggtcgcaggaaggaggatgcagcaggctgcgcgtgcgggagaagcggagaccggaccgggtaggtagctacagcctacagctagctttctccgcggctgggtctggtttgacgtggtgtaggatcttgtag

SEQ ID NO: 1108 - DNA, 411 bp, Zea mays
cgcgccattgccaaaccgtgctacagcttgcagtatacaagagcctatctccatgactgtgattacgagactatatacagaaccgaattgaacgccatggcaacaacagttttcctgtctaatgttgttgtaaatcgcgactgctacctatccttcctgctgagcctatatatgtttctattgctaaaaaaacgaacgttattgtataatatgatcgatgtggagacatcatcctctatggcgtaaagtgcaatatactatctcaagggggccaaggccgaggtttgtaatttgtatatggaggaggattcaggggttgcagcactgcaatggactctatgaccatgagaaagatggctaaatgagactgtatcactctgcaccgatcagattagagacgcaaacacatca

SEQ ID NO: 1109 - DNA, 382 bp, Zea mays
gcgatttcgggggcggctgcaactggcgcagcgcttcacttcgttgctgcgaatctcaagcagcgactgcggcgggaggtcgcggccgtgggcgacgtgtggcggcgcctggcggctggtcagagtttggtgctttaaactcgcgcggcgtcagtaatcctccaatgccaagcatgacgatgttgggggcacggtatgtttggccttttctcatttggttgtttaagtagctcaaaatttagggtttcatgaggattaaccgattaagtcactgctccaaacaggtgtcccctgtatttcggggatcactaggctatattttttttttcattaagctatgtttattttattcctaaacaaagaagtagatgatcatttggat

SEQ ID NO: 1110 - DNA, 825 bp, Zea mays
  misc_feature (815)..(820): n is a, c, g, or t
tactgcagcttttgtagtcaaatcgaactcaagcagttttgctttgatctcgctgccttacaaaaatctgcaccttgatttgcttatgcagcatatttatttttgttagtttttatattcagtagagtaagcccactagatctcattggcaagataagaagcttttatagggaaggtatcatgtaattcagtagcaagcatgtttgtaatgcaaatgccctcccataagaacttctctagtttcattctttgcctcagtgacactcttttatgcagatccgtgagtgcatcctgtggctcagtatagtgttcgtcacaatactgtgcacaccacaactaacagttatcaggtggtctccgaacccaccggtgtcagccgacgtcttgcatcagtggaaaggattctgtgctctaatcgcgaacgcttactatgtcaaaggaatggcatggtaagagcagagcagcttctgccagcgcccagcagcgttgctcttcttctatctcagaatctcatacatgttcctaaaactgacgctgcaggttgccagtgaaaaccttgcagctggaacagatggctgtcacaggaagttcagagaaaccatcagtagttgctagtcgcatgcagttagttttcagcacattagaggtttatagcggcaccgtcaatatgtacgcgctaaataagaaagatgatatgctcgttagtgattattttgtttgtttactctgcaggtagtcagcccacagtggccaagagtgtgattagatgaaagcaataccatcaaacaaaggtctgcagttttattctgaccaannnnnntgcat

SEQ ID NO: 1111 - DNA, 361 bp, Zea mays
  misc_feature (154)..(159): n is a, c, g, or t
agatagatgtaagactggaatgagaagaaggatgacaattaggagaattgaactgatccaactaagagacctaggatagaactagtttgatctatctaaaacattttttttctatacttacatataagagatactaaaaattgagggggggccnnnnnnccccccccctcaatttttagtatctcttatatgtaagtatagaaaaaaaatgttttagatagatcaaactagttctatcctaggtctcttagttggatcagttcaattctcctaattgtcatccttcttctcattccagtcttacatctatctatctgatcccattctttccaacatcacttgaaccaatctactctgatgt

SEQ ID NO: 1112 - DNA, 347 bp, Zea mays
agagtagattggttcaagtgatgttggaaagaatgggatcagatagatagatgtaagactggaatgagaagaaggatgacaattaggagaattgaactgatccaactaagagacctaggatagaactagtttgatctatctaaaacattttttttctatacttacatataagagatactaaaaattgagggggggccacggccccctttgccccccacgtggatccgccactgttgccgaggaagaagactgacgaggcgaagtcactgattagagtgttggtggcccttggctttgattgtgatcaaatagaggcaaatggttgaggtttggagatgctggtttgt

SEQ ID NO: 1113 - DNA, 338 bp, Zea mays
ttcagcgccgcttccttttctccgtcgtgctctcctccgcctccggtcaccattaacctagccgccactctcctcggtgcggcggagcccgcctgcccggatcccggacaccggggcgacctcaagtgttccacatgcatcatgggacacgacgctcaccgctcgctatcgctggtgagaagcatgcccttactcctcccacctctgtcctctgtctctcacatcctcactcacctcaccggtaggcggactacggacgactggagctggatttctgtggagaagtggattgctgactgctgtggagaatttcggactttgaagcctgaagtgtgaag

SEQ ID NO: 1114 - DNA, 550 bp, Zea mays
gtcaaagtcttttatagcagatgatgatggtattttctcacgctgaaataataagatgaaggcatctcattttatttccttattttgtgaatgttgctctttttcagaagaagaagaagaagatgttcatttagtccctaatagtgctgatgatgctcctcggaacaccaattccacacaatcaacagttggatcatcagctccttccatttctagtcgtccagttgggcgtgttatgggtataatcaagcgaaattggaattcgtgagtttctatgtgttatgagttagatttcttatgtgtactatcctgatcttgtcattatatgataaggttctggtgttctgcaggtactgtggatccttgcagccgatgcccatgcctgctggtagtgggggtgtcgctcatgctttatttgtttcaaaagatcgaagagttcctaagattcgaattcaaaccaggcagcttgagaatcttgtgaacaaaagaattgttgtcgcggttgattcatgggatgttttgtctcgatatccatcaggacactatgtac

SEQ ID NO: 1115 - DNA, 1220 bp, Zea mays
  misc_feature (58)..(58): n is a, c, g, or t
  misc_feature (61)..(61): n is a, c, g, or t
  misc_feature (1156)..(1163): n is a, c, g, or t
gagcggagcggggagggcgaggaggagcagcaatggaggcgctgctggagctcgagangangcagagggtgctgtccctcatgagttcacgcggcctctcccacaccgactccagctgcggcggcgctgccgctgaccgcttcctcgcccaattcctcctcttcatggtacggtttttgggggtcgcccctcttcctccgtatgaccgtatatacgaattcaatcggatccttaccagtgcgccgaagcaggcaaaatggatttttcccctttgtttttatatgacacggactgtgtctagcatagcatagtgctccctccgccgcccgtccctgccttcgtccttcgtggtggtttttggttaggccatggatttaaggcgcgtatatgctgttcgtttagcattttcatgggtttattcgacgaatacggtttcgattgtgcatttacgcacgcgtagctcgctgaagtgttccgattgatttgatgagttgttggattttgtattgacctgctgttgattggtgacgtgtgctcgctgctctcctctcgtagttttaatccagttagctaaatgcctggccgaaggagcttacaccactagagtaggcatggtcaactggagactggaccagattgatttgtcacattggtcatgaccagacttcaataatgcaaccttgccttaatgatcagattcatcacactagtttgctttgctgttctcgttgctcctctgaattgggtatctcctgctgaaacatcaagtattcccatgctttttgaaatgggacagaaagaagcaccgagaactacttccaaaattatgatcacaaaatcttttgtgtaggtgcaaccgtttgattctcttaccctggagaataagttccttttgatctctgagctattaagaaaggtaatctaagtgacaccgtctaacttttagttcatatttgtctatgtgttttctatgaagaaattatagttgagacttcttttattaggctactcctaatactttggaagaagtgcagcatctcacccatctggaaggtagtggtaatagttgtgaagtaatgatgatcttacattaaccttatgagtttatccggaaattttgttgttgattgggtctggaactctgataagacatagnnnnnnnncaaacgcagctaataaagatatatttctggaggttcactccagccaataagaagtaa

SEQ ID NO: 1116 - DNA, 793 bp, Zea mays
tggccgatcaggtacatgttttacttgttctaggggacaccagaaatactagggattgttttgggagcaagggcattggaagggggttgaggattttagccctctcaaacctctctaattcccttgatcccaaacacgccctagaagaaaatccttcatcttgtgttctgatgtgccaaatcacaagtttcacaccagaaatactagaagaaagtccttcaccttgtgttcagatgtgccaaatcacatgtttcacatccctctctccaaagggcttgcacttaacgtggtgggttttttggcagtacatcacgtacaagcatattaaggacagattcggtgaccgcctatggcttgatgttatttccaaatgcgatcttttgggaaagaaagagcccataagttttcacgatgctgatgaagatgtagcacggtacagaagattggggccagaaggcgccctccaagtatctgtgcagaccgaaatcggcgtcaaacaggttagctattctcgtgctagcctgatactgagcagcgactgcttgttgagtctacttattgcttatcatagcgacttacaggcccttaagaatctaggctaatatgcttctgtctctccagcttaaggaaagagtgcatgagctgctgacctctcagatggctcggatcaaatctagcaaggcggagcatgaaacacatgaagtagcgactagtgttgtttactgaagtttgacaataataaggattcgaatatcatgctgggtgtccgcgtaaacattcaatgtcgatgatg

SEQ ID NO: 1117 - DNA, 503 bp, Zea mays
cacataaaaagataagagctgttgacgagtgtgtgtgtgataatagcatccactttaggcttagtttggatactctaataatgagtgagattggagtagattgacatgtattgagagagtatttgatctatttgggatttatatcctcagatttatatcctctccgatcccttcaaaacactctaatcacaatgttctcccaagtgaacactgacagctccatttgccaatcctatcaagcaacagtaaccccgaaacacacagctgtgcagcaatagagagagcacgaaattatatattgggtgcgattctagtaccaaaaacaaaaggagttcgcgtcttcgcgatgctgtggaaacagtggatgtagacatgtagtagagaggaaaaaggcacggcacggtaggagcgcgagaaattccaagcactgtactgtaccgtagctagctactgcctacagcagccggcagcaaagtgctgcccagtacggacagaaagtgcca

SEQ ID NO: 1118 - DNA, 517 bp, Zea mays
  misc_feature (392)..(393): n is a, c, g, or t
  misc_feature (396)..(397): n is a, c, g, or t
  misc_feature (402)..(402): n is a, c, g, or t
  misc_feature (404)..(404): n is a, c, g, or t
  misc_feature (407)..(414): n is a, c, g, or t
  misc_feature (417)..(417): n is a, c, g, or t
  misc_feature (422)..(422): n is a, c, g, or t
  misc_feature (424)..(428): n is a, c, g, or t
  misc_feature (433)..(453): n is a, c, g, or t
  misc_feature (464)..(467): n is a, c, g, or t
  misc_feature (476)..(481): n is a, c, g, or t
  misc_feature (486)..(486): n is a, c, g, or t
  misc_feature (488)..(494): n is a, c, g, or t
  misc_feature (499)..(513): n is a, c, g, or t
tcgccgtcgcggcggccagactccattgacccaaaggctgtggccgctgtctcttggtccagcgaaggaggcgcctgcgccctcccgccgccgctgtcgtcgaccggcttgagtgcgcgctcagggccgtcaggcagttgcgtattcgccaggcagagagttaacctggacctttccctgtccatatgtggatcatagctagcttaatcacccgtgctgaattttgtacattcaatgttccatgatgcattgcatgctgtcgatgtgattccgtttggatatcaatggcggcgtgcatgccagcgccacagcctgcggtgattgcctgtctagagtctagaacagtgtgttccaatgaagatctgaagaatggcagttcacatgttcaggannagnnaaaantnttnnnnnnnntgntgatnannnnntgcannnnnnnnnnnnnnnnnnnnngctcctcgctnnnntacttcccnnnnnnaccancnnnnnnntacannnnnnnnnnnnnnngtgt

SEQ ID NO: 1119 - DNA, 604 bp, Zea mays
ggcgaaatccttcctttattatacagcttttatttacctgtcggacacttgcactgatcagcgaaatgctgttccattcatggaattgccatatataaacctgatgaaaccattcgtcttcctgaaaacaaagtacgctttcttccatttcaggagtatttgtggagctatcatacgactcgacacaggtcaaggtacaggtactgtccagctcagtggtcactgacggctacagagtgatggtcactgacaagcagcgcgcctacctcttcctgaagccgtttgcgtgcagagacaagccatgcggatcggagcctcggccccccgccggctcgttcatcagcgatgttctcggtcccgaccgccggctcaacgtcagcggcatcgtcgtgacggccaccggcacgcggcagctcggcgcgcttctccgcactttgcggtcgcttcaggcttctctcggcgacgctgggttggcggagcgcgtcaaggtctcgccggagctctcgatgtcttctctgcgggtcgtgggcaaggatcgcgctcgtgcgaccaagaagcggcggtggggcaaggtcctggagttcgtcaggaggacacgctcgtt

SEQ ID NO: 1120 - DNA, 395 bp, Zea mays
tcgatcgacctggtccactccagtccagaccagaaatggaggtacagatggcagcacaaggccctaaatcgatgggacgacgacgcagcagcacgccgtgtgactctcagcacggcggcggtgccgacaccaagcccgtccccggctacctcaggccgtcggccggctcctgccaccacgtctgcaagtacggcggcacgcacaccttcgaggaccacaacaggccccagcctaggccgcctcggaagcagcagcagccggcggcggagagccacagccacaacagggtgctcgtcaaggtgcggtcggtgttccggaggccttccaaggcggccgccgacaagtccagtggggtcgagagcgtggagtggaaggacattgtggcctatgataca

SEQ ID NO: 1121 - DNA, 552 bp, Zea mays
cattcaccgcctcgtggaagaagggaggacgagctggatgaggaggaagaatatgaggaagatgttgaagaagaagaagcgcctctgtcggatgaagaaatggaggtatgatttcttggcctagattcagcttcttccgaagctaacatatcaaagaatggaacaatacttcatgtctttacatcagacaagaaggttcacggaaatcagttcagaggagggggcattggtgtagtttttttttcttcttctaaataatcaaaatgggacttgggatgcaggcaccgaaacgtaagagagaatcagggggtggtgggcaaaggcgcgaggagctggtgtctgaggaggaggacgacgaggaccacgacgattctccgccaaggaagcagccggctgtttcgcatcgtagaaaggctgtcgtgtttgatgacagcgacgaggactaaaatttgtaaaacgttggtacatgtgtatgacgacctgacatgatacgcttgctttttctccccatttgtttaagagaatgattagttatttttcgtcatgctggtg

SEQ ID NO: 1122 - DNA, 567 bp, Zea mays
ttgacattcaccgcctcgtggaagaagggaggacgagctggatgaggaggaagaatatgaggaagatgttgaagaagaagaagaagcgcctctgtcggatgaagaaatggaggtatgatttcttggcctagattcagcttcttccgaagctaacatatcaaagaatggaacaatacttcatgtctttacatcagacaagaaggttcacggaaatcagttcagaggagggggcattggtgtagtttttttttcttcttctaaataatcaaaatgggacttgtgatgcaggcaccgaaacgtaagagagaatcagggggtggtgggcaaaggcgcgaggagctggtgtctgaggaggaggacgacgaggaccacgacgattctccgccaaggaagcagccggctgtttcgcatcgtagaaaggctgtcgtgtttgatgacagcgacgaggactaaaatttgtaaaacgttggtacatgtgtatgacgaccggacatgatacgcttgcttttttttccccatttgtttaagagaatgattagttatttttcgtcatgctggtgtaatatg

SEQ ID NO: 1123 - DNA, 435 bp, Zea mays
gttcttcagttcacacagacagatgtgcactgcactagaggactaggcctaggggaaaagccccaacaacacctatagttccaacaaaaatccgaagcaactagtagtatcagagatcccttgacaaaactaatctggccagagccaagcaggaaccgccacagattcacgattctgagtcttctccgtcttcctcagaacgctgcggcgggacgtggtggacgaagtcctccttggagaggcaggactccgggacaacggtgccgacgctcctcccgaacgcctggcggcagtaggacgacgcctcgctcccgtccacctgggtcaggttcacgttgacgagcgacaggcgcctgcacggccgggcgtcgctgcacgagaacgtgaccgcgcgctccgacgccgacgtgcccgtgatgtcgatgtagttgatct

SEQ ID NO: 1124 - DNA, 1014 bp, Zea mays
  misc_feature (229)..(234): n is a, c, g, or t
  misc_feature (283)..(284): n is a, c, g, or t
tgtagtgatggcgccatggccatggtctgcttagtttcctcgccctatccaacacgaaagctgccgccgaagcacggtcggtcacgtcgttcctgctgacatggtcttcttgagtttggggacaaagaaacaagaagaattagactagaaggttcagactttagcctctcctacaccggtggtcatggaaacagatggtttgactacctgacagttagctgccctagcnnnnnngaaagaactgttctccaaatttgttcccagttgaactgaaaagaggcgnnttgtaacagcaaatcttcccaaagtactaactatatttagttttaatatagtcaagccaagaggatgcatgataccccagccgttgtatccttaatatatgtagggctattttgacggctagctgcgaagaagcttgtatcagtgagtttagttgtgtgcactgaactgaaactgctaatagattgcttgctgcatgtcccataaagttctggcgagcattgcatggatatagaataatctgtggggctagaatgtgtgtgtgttttggcctttgaggggcgagcaagtaggattgggcactttttttttgtttttaatattcagttttggtttccaatatttgtctgtatcggtactcagttgcagtttcagttttagatggaaaccgaaccaaacactggttcaaacccaaacacgaagcattagataagaatgcggcaattagcaactgaaaaggacatataatcagttgatttgtcgtgctttgccagtgtaaaaactgtttggtgtttagttcagagtacatattttttacttgtaattgtctagacgtatttctaacaaaaacctattatatttctagattatccctacatcggtttgacttggagaagacgagcttccaccatcttgggaccctataccctctcctttaggtacttgttaaatcctaaatgttcttattacatcattttctgcttctgttggtgtttatttctttttcgttag

SEQ ID NO: 1125 - DNA, 409 bp, Zea mays
cgatcggtccccttcaggctccaggcttcggagcttgctttacttcaggtgagattacttcatcagcctgtctctagaagaacccagcgaaccgcccgcccacgatgcggctgctgcagcactcgttcgtggcccagccgccatcgcagcagccgctgaccgcctgcccgccgtcatgatcgatcgattgactgattaattcctccccatcacggtccaactagggcggtggcggctggattcatctctctgctcaactttggatgcttggttgcctgattggttggatggccgtgagatgtgggacctagggacgttcttccttcctagccattttgggaaattcaggtctccgccacatcaatcatcagcgcatcatccattgttgtctccaggaattataagttat

SEQ ID NO: 1126 - DNA, 326 bp, Zea mays
aaaaaaaaaaggaagatgctcacgtgcgctacataacagatgcttgtcgtgcgacatactgcagtaaagacttcaagccttctgctacagttaggttaagttccaaaggaagagctagatcaaaacctactaatgaggggtaagaggtctatttacttttaccacttccgttgcagtgaaatactgaaacgggatgaaatcaattcttttgttctgggaaattcgctcgtacttgttaactcctatcgctttggatcttagagactagggtgatcattgctaacatcggattatatcttaagcaattggtggagccatgggagatt

SEQ ID NO: 1127 - DNA, 341 bp, Zea mays
tcgccgcgccggagagccctggcggcatggatccaccgtccccacggcgcccggtttggatccttcactaacgtcaacttgtgagtcctctggaagctctgtgtgcgcccgcacagttagttgccatggcgccgtggatctgtcgtcgctcatggcggctgccttgcatccttccccggccatcgttccccacagttcgccgtcggtgatgaacccccagcacctttcatctctttgtcctcttcaggttgtttgatgctgctccttttgtatgccaccaatgcttcgaagactattatatgtagtatgctggtttgaagactatatgtagtatgctgtgc

SEQ ID NO: 1128 - DNA, 767 bp, Zea mays
  misc_feature (761)..(761): n is a, c, g, or t
catcaccaagatctgaaccttcattctctatcaataccggattccaggtaacaaacagatctctgaacttcttatcttttttctcagctttgcggattttcttcatgtctgaccgggagagcttagtatcttgcacttgaactgcttctgcattcctaccagagaagcagggctcttcttttgaggaagaggtcctgatatcctgctgcttgatagcaggcaagtccttgggtttttgaagaacagtaggccgggtagcttctggtaggcgaacaacagatccggtttccttatgtaataccttcggaaacggaggatcaactttctgcgacaccatggaagctggatggtgaactctctgtgacatcatcttaacaggtggaggatcaaatcttctcataactctagcaggcgaagggtccacacttcctgaagacttcagaggtaggcccgatcttccaactggcaccttaacagctgactggggatcaacaggatgtgtgaccttagctgcaggctgggggacaagtctctgcatggtctttgccggggattctgtaatcaaacatttttgtactgcttgggagtcaccattgaccctccgctgaccagaggtagatctcacattcatcttatgatggattgaattttgcttgcccgacagggatgaacctgatcccatttgttggaccaatggttgctcaagaacccttggtttctccagaacagctgattggggatcttgactacttttaatcttnaagcga

SEQ ID NO: 1129 - DNA, 829 bp, Zea mays
  misc_feature (352)..(352): n is a, c, g, or t
  misc_feature (354)..(399): n is a, c, g, or t
  misc_feature (727)..(728): n is a, c, g, or t
  misc_feature (745)..(749): n is a, c, g, or t
  misc_feature (763)..(767): n is a, c, g, or t
  misc_feature (769)..(774): n is a, c, g, or t
  misc_feature (795)..(801): n is a, c, g, or t
  misc_feature (811)..(822): n is a, c, g, or t
tggcgtcgtcgacgtgcccatcagcagcacgctgttcgcccgcttcccgttcgccgtctactccgtcgacagcgtgctgctgcccccgcagctattccacacggcttcttctgcgccggcaccaggacagtctgcagaggcgccggtggtgcctggaaaggcggcaccagggcacaaggggggcgtcccaaagagcggcgacgatgtggcagcgcagccgtccgctgcggtggatggggcacaagacaccagtgtcgccgcggatggtagagggagcgcggcgtggatgacgccggtggttgttttgggtggcatggccctactgctttgcgcgtgagcagtgtgtgcttcntnnnnnnnnnnnnnnnnnnnnnnnnnnnnnnnnnnnnnnnnnnnnnnttctggaggtgcctactgatcagagagcattcgtatctgatgtcatattctaattaaacttagttttcacaatctgtgttccaaagggattctcactttctcagatgaactgtgcaggtccgatctgcatatgtgaagaacgagttcgagtgggacaatttgaagaaattatccttcaaggtacgttgaattatcattaatcttctgctccatctactatatgggtctattacttgctaataataaatttcgacagactaaacttcttaaagtgtctcagttatgacccgcagtattccataaattttttggtcagtaaaattgtgtnnaatattaccaccaaaannnnnatcgtagtcagtannnnntnnnnnnaaagcaacactatatatttannnnnnnaattttctannnnnnnnnnnnttccact

SEQ ID NO: 1130 - DNA, 843 bp, Zea mays
gcttgaggttggccttgtcgccttctggacgagactggctgttcctttttgttcaacagcacttcgatagttcgatatcctgagtgatcgccaaagggactcgaaacggttatcagattttgattcctttttttattcttttgtttggatcatcgataaaaaaaaagagttacaatagggaagcgtacttggagctgaaggagttcatcagccgcacctccctgaacgacgccgagattttctgcgaaaagctcatgcgcgagtctccaaggctcaagggactaggcaagtctagttcttttttaaccacacactgttttactttcttgatcctttgatgaaacagtgtatgaaattactgaggcatgtgtggtttcgtctcttggaaacaaacagccttgaggattctggaggtgcctactgatcagagagcattcgtatctgatgtcatattctaattaaacttagttttcacaatctgtgttccaaagggattctcactttctcagatgaattgatgcgactgcaggtccgatctgcatatgtgaagaacgagttcgagtgggacaatttgaaggaattatccttcaaggtacgttgaatttttattaatcttctgctccatctactatatgggtctattacttgctaataataaatttcgacagactaaacttcttaaagtgtctcagttatgacccgcagtattccataaattttttggtcagtaaaattgtgtcaaatattaccaccaaaagatagatcgtagtcagtaagaatttcagaaaaagcaacagtactatatatttagcgttgtaattttctatgctcttttgtctccac

SEQ ID NO: 1131 - DNA, 569 bp, Zea mays
  misc_feature (56)..(60): n is a, c, g, or t
  misc_feature (555)..(562): n is a, c, g, or t
tagctttcgctctctccttctgcgtcccctcctcccactctccctgcgtgcatgtnnnnntgtgctcacttgtcaactgctggcaggctagaccttctgatttgattttggatgatttcgtgagattgcacaatcatttagcgaaagtatgactaagaagtgcctttcaaaatgcctaaagaattgcttgttggcatggtgttcaacagttggagtaacttacgcctgaccgcctgagagctgctatgcaggtaaaaagagatgatctcgcaacctgcttctgcttgagttcagattttgatgtttttttaatcctgaaatttgagcttctgctaaactccagtaactagctattttttcttcatggactacagctacaggtgccttcagctcagctccggggcgaagccaggaattacatgtagggaggccggccgaaagagccatcttgtaaaaaatgatcgcggttcaactggtttggttactcgcacttagcgtctgtctgagttaatacttgacaaaaaaaaacaagcacagctcaactggttaggtttnnnnnnnnggggggg

SEQ ID NO: 1132 - DNA, 398 bp, Zea mays
gtcagacacctacctgtcaggcatgaactgaaaaaggtgcaaaagaattgtcacttaacttcaggtaccgttagtgtctcatccagaaattggtccagcggccattagcgcgccactgcaggatatgcagagaaacaatggtggcaccggagcaccatctgcaatgccgacacagcgtgtatggtgccagacattgcatgcatcgcatgccaccatgcgctccccatcgtcgtcctgtgcaccacaaacacactgcacctcccacgcatctgcacctccctggcaccgcagcccagtctccatgtcagctccgtggccgtgcacaccaatggtgtcaccagactctgctccaccaagcatcaccggatcccatttatccccagtaatgccatccagtg

SEQ ID NO: 1133 - DNA, 385 bp, Zea mays
tccagtaccagctgtagccagcattcatgcatgccagaacgtagtactgcggccatcgcccccatcgtcaccatgatgatttttttctggtaaatctgcggtcagcagaaggttgggtaaggcgaatggtctcttacccaattcgcccagctggcgaatcttaatattctaaaaagttttgggtttccatgcaaaataggcaggccacgtttaccagcaagcctccctcgtcggatcgagggaaaaagaaatacgggacgttcgatttacaacttttacctatactaggacaatgctcatgcgttgcaatgaaaacatataatattacataacttatgaacaaatgtgtattatactgttatgagatagaagatggtgtccttga

SEQ ID NO: 1134 - DNA, 655 bp, Zea mays
  misc_feature (63)..(64): n is a, c, g, or t
  misc_feature (66)..(68): n is a, c, g, or t
ctacggcacgtcgacgggattcgcacgctccgggggcaaggcgctggtctcgaggtcagtccnntnnncaggatggcaaatttactcttgtttcatgtatctgtgaactgattgggctactgcggttgttgctgcgacaaatgcttgattggttgcagtggattgacaaggaaggcaagacgcccctgatgcttgcctgtatgcgcccggatctgttcgacgtggccaaggtgctgatcgagttgggagctaatgtgaatgcctacaggcctggtattcttctcttgattcttattaccaatctgttactttgatagtttggtcctatttatgaagctgagttgattttcgtaaagtaaagcagtgccaaaagggtagatttcagtcaactaagacaaggtttatgtccacattcactctaacataggatcgagttttatttgttctgtcaaatcatatcatatcaatgtaattctgtatcggtacacatctttcaaactctgcattcaaatgaatgaaaccatttgatgtgatccatccaagttgctgacagtgatatgtaccatccctggactcatgcttaattgaagaggaggctgtgctcgttattatgttttgatcaccacctttatccattaccagggtcacactgtgg

SEQ ID NO: 1135 - DNA, 616 bp, Zea mays
  misc_feature (54)..(55): n is a, c, g, or t
  misc_feature (93)..(95): n is a, c, g, or t
  misc_feature (513)..(582): n is a, c, g, or t
  misc_feature (585)..(589): n is a, c, g, or t
  misc_feature (591)..(601): n is a, c, g, or t
  misc_feature (603)..(604): n is a, c, g, or t
  misc_feature (606)..(611): n is a, c, g, or t
gcgtgcgccgccggtgcaacaggctggtccgaaaggtcgaatcgttcgttgttnngatcatcttggagcacagggcgcggcgcgcaaatggannngtcgtgggcgatgagtgcatgggtgacttcgtcgacgtccttcttggcctcgagggagaggagaagctgtcagatgcggacatgatcgctgttctttgggtaataacacagatcgagtttaacttttttttttcgtttaacttgccgcgtaaaatgcatgtcattccttctccaatcttaaacgttgcgtcgttcatggaaaaaatggtcgcattgaatttgcggtcgttttgatcaggagatgatcttcagaggcgccgacaccgtggcgatcttgatggagtgggtcatggcgaggatggcgctgcacccggacatccaggcgaaggcccaggcggagctggacggcgtcgtgggcatcgggcgcggcgtggcggacgccgacgtcgccagcctaccctacatccagtgcatcagnnnnnnnnnnnnnnnnnnnnnnnnnnnnnnnnnnnnnnnnnnnnnnnnnnnnnnnnnnnnnnnnnnnnnnttnnnnntnnnnnnnnnnngnntnnnnnnttttt

SEQ ID NO: 1136 - DNA, 519 bp, Zea mays
gggtgtttgcactttcttcagcatggactttatgcaccatctgttgtacttagcaccagaacattcatgagtggtaagatttggattggtaggacatcaatgcctgctgggcgagctggagagtcagcttctcatggactaactgaaaacttgcagtttctggggccaagctgctcggctcctggggcgtggacctccccatcaggccgctgcacacgctccacctctactggcgcgtgaagcccggccaggagcagactgtctcgacgagcgccgggttcccgaccttctccagctacggcgacccgcccgtgtacggcgcgccgtcgctggagctcccggggctcatcaagatcagctgcattagatcttagagtacactgttttacacaatttggagttgttactactatcaagctttagactttagactttggagtacactgtttttacactgtattaagctttagccttttatgctacagtgtgtaaaaaagcaagctttagacagttaggcta

SEQ ID NO: 1137 - DNA, 424 bp, Zea mays
ccgccctagtcccaaacacaccgaagagaagtgagtttgctccctcattccttcccccatttcccgagttgtgtagttccaaagtttctaaagcggtttccaatcttcaggcaacgcatattcgccgaatctgtcttgaggagactagaggagaaatgaagagacatcaaacactacaagcgcatttggttagtggtttaccgttcagctaccttgtaattcggttggctccccgaaaaaaaaaagtccgggacacgtcaagtgcccagctcagttttgttgtaaatttgttagaaatttgacagaattggtagtgtgaacttaccaagaaaggaagaatagccgcatgtgttgtggctgttcattctatgattggttaggaattgacacttgaaacacggtactctattcagaggctgtgtcc

SEQ ID NO: 1138 - DNA, 313 bp, Zea mays
ttcttccttgagaaggcctccgcggaggcgttcatggagcgagtcgagtcggtagtgggcgaggtattcaacatcgtcaggcagtggcaaactcagcagcagaagcaggtccaggagttccaggcactacacgacacacacttggctccagatgagcattcatagtatttcgtcttccatgtcaattaaccaataaactctttaataattgacgtctcgatgatgtgttatcatccatgtttaacttaaatgtgttctagttctgaaataccaaagtttataaaacaaaagatatgcaacaaggaatcaacat

SEQ ID NO: 1139 - DNA, 865 bp, Zea mays
aagtcccccttttcctcttttaagatcttggtttcaattcatccttatgagacctgtccgtcattgtcataatttttatttactttgtggagtcacacacttggtttgcaaaactcttaataatatttctttgttcaagttccactgtagactatcaaagctatacagcttcgtatccagttttgcacttggcataccattgttggaccaaatcttaacatagacaacatgcttccactttacatttctgatttctacgttgtgaattgtgtgtcaaactgtcaactattctattcctttattttttacagccaccacacaaaatgtagatcaccagttggaaactgatccaggcagcatgcaagtacaaagcccagtgcacttcaaggtaagttgcctattaattcattatttgtattgtctagcatggctaaaaaaacccattttccatagttttgtgatcataaattgagttctcttcattcttgtagtctggtgcaatgccatctccggagctagtagctgcaaatacagaaaaagctgacagccttcttgaacccaatgtagacattggcatggtatgggatcttacgctccttacactatggggtttttaggaacacaggttttgtggaaatcaaaattcctagaacagattttaacctaactaactgaaaaactttgtttggaaactctcatgtaatgaaaaccacttttccatacaaaagcccagttatgcactttgtgaaaaatgattacaaccggttttcatgaaaagcaggtttctgaaaaccatgcgtgctggtgtcattttgatggttcatgttcactttgctaattaagattgggatgatctggattaaag

SEQ ID NO: 1140 - DNA, 865 bp, Zea mays; identical to SEQ ID NO: 1139

SEQ ID NO: 1141 - DNA, 375 bp, Zea mays
  misc_feature (366)..(369): n is a, c, g, or t
gatgagcatagatgaaaacggattcatgctggagttaagggcttatcttcagaaagaggtcgccttgcacaccgataaatggtctgaagagcagattcggctcctggtttctgaggggagagcgctgaagaagctggttgaagcttgttgtgaaattccggttgtcgctgagcctgagaaggcgccggtcgcgaaggatgccagcacgaagaagaggaagatgccagatgggatctgtgaagggatggcgatgctgcagaacggtctcaaggtcatgcgaggcgcctttggtgaaggggactttgctgatctgaaggataggtttgctgcacacttgtctcgcctcgaggatgcagtttcccagannnntagttt

SEQ ID NO: 1142 - DNA, 359 bp, Zea mays
cactcactttccctggccgtgcccaaggtcggcgaccagcttccccttccctgttcttgccgtggccgagccaccacttccccagccgtagccctctccccctccattgtttcagcgcctgaaacaaacccctggccgccatccacacttgtgctcgaccctccccgtgcggcgtctaccgatctgcgcagcattgctggttcgcagcagggagccccctcctcgctgtcctctgtggtgcccgccgactgttcatcaaaatgcgcagcaagccgcgcgctgcagtagccccggatcccctccgcatccgcgtgcttcaccggatctgcgtagccccaacatcgacgccgttcaccccg

SEQ ID NO: 1143 - DNA, 998 bp, Zea mays
  misc_feature (949)..(952): n is a, c, g, or t
  misc_feature (988)..(994): n is a, c, g, or t
ggaaatcggcgatcaaggaagaggagaagcgactcacctttgggagggtggccagtgtgccgaggaagaagagggttttagttttagtaggcgaggaggggcagagggcagtggggcgggttgagcgcggaggaagcctccgcgcacacggcacacgtatgcgacgagatccaaagttaaaaggtcatgccgtacctccctccaacttcataaatttctactcaaagcggacgctctaaactttagcacttaaaaatttaaacataaatgttaaaatgtcctaaaattgaagtgcattcaatagtaacttagctcttgaaaatgcgttaaaatttagcacactactaaactttatcacatgggattcaaacatggcctcgtaagagcatatataaccatatttaacacgaggtcttttaaatagtctcgattgtattgttaaacttgctctaaaacttttagtatccgtggaagatttttaaaatccgaacggcgttcggcggagaagcccacggaccgatcgatggaaacagccgcgcgcgtgtctaatcgaatccatcaatcactgtatctcaacagacgctgcctgccgctagcctcacctttttactatttgtttgtttgtttacacttatagatgctcctctctcgttcttctggttttttttacagtggtatcgctgtgtgtggaaataaatcatgattcaaacgtttctttcgtttaagcaaacgaggcaacggcgactgatcactgatccgccactcaaagcaagttactttcttcccccgttgattttgttaattcctctgcactcaaagcaagttactgctgttttctgtctttcttcccctttttatcaaatatttgttcaggactcctttaaaaatacaggaattttagagaaattcctgtattttaaagcaagctaatgcaggagcctgatatcannnnctttggtgggctgctgtgcagaggaagagggggagnnnnnnnggct

SEQ ID NO: 1144 - DNA, 607 bp, Zea mays
  misc_feature (600)..(604): n is a, c, g, or t
cggacgaggagttcaagaccgtgcagtccgccatcgacgcggtgcccgccggcaacgccgagtgggtcatcgtccacctccgctctggcctgcacaggcatgcattttcctgcctcgatcgctgttgtattaattaatttccctccctctctctctctctctctctcttcacgactttgttactatatttctattgtgatttccaacgtaccatcactcgcaatgcatgcatggttgatgatgcaggggcaaagttgtgataccggagaacaagcccttcatcttcgtgaggggcaacggcaaaggccggacctccatctcccacgagtccgcctcttccgacaacgccgagtccgccgcgttcaccgtgaactcggacaacgtcatcgtcttcggcgtcagcttcagggtccgtccgtgcacttgacttgaccgtaccccgggccctccctagctccgtttgtacttgtacgtccgtctaactagaacgccaaacttgacgacagaacagcgcccgcgtcggcctggtgaacgacccggagatccgttccgtggcggcgatggtggccggcgacaaggtggccttctaccactgcgcgnnnnnaca

SEQ ID NO: 1145 - DNA, 538 bp, Zea mays
  misc_feature (525)..(529): n is a, c, g, or t
agctgggaatggggatgggaccggtcgccattgccgatggcatgggaggccttgtcgttctcgccatgacctgttcgttgccgagatcgatcaggattcgattagcctggttgctggttgtttttcgttcagagtcgcacgggtactttcgacaattccgtgctctgggggctggggcagtgttgctgctgatatagaccaactccagcaactctccccatcccactccgcatccgcattttgcacggtctgaggcactattgcgctctccagcaggttccgcatccctctccgcaaaatagacgccgtgtccctgcactccccatttccacactttctctctcctctccgcagctctctgcgtgcgcgcgcgcctgctggcgggccccaggtgtcatagactgcatgcggagtgggatgaggagtgttgctgcaaacggagacggatacggagaggagagagaatctgttggccgcgcgttttagggatacggagagggagtctgctggagttggtcttagtannnnntcaaagcaa

SEQ ID NO: 1146 - DNA, 616 bp, Zea mays
aagctcttgaaaactgctcgtcccctccacttcaaaatctactactcaaggatggaaagctgtcatctctgtacacaacccaaggtaatttgctgtgtgtgtgtgggacatctttcttctgttttactgggagacagatccgtttgtcactgaacagtcgtgtccttgcttcctgtagttgttgtttgctgtggtccaccttaacacctttccagacagctggtcattgctacatttcagaaagcacatgtttgtctggactctgggcatatgcatgatatagcaataggcatacttgttgataagctacgctagtggtgttgtcttcctaatggggggtgcatcttgcattgctaggcatcaaatattgcctctgccagtttggactgcatgcattcggttagcatcactgtgttcctgattgtggatattctacacaagtcagatctcattcttttttggctctgaattgtaggtgtggcggttgctgagctacagttctgccatcctgaggttgtcccaacgtcaaagaacttctggaagccactatgtgcatctctgcagaatctgctgaggtgcagcatcgacatccgaatcaacctatctcctatctccg

SEQ ID NO: 1147 - DNA, 461 bp, Zea mays
  misc_feature (444)..(447): n is a, c, g, or t
gggaagggcgccggcggcaagaccgacctgcgtcccgaccgtaagcagttcaaaaggcaccacaaggaggatgcagcagctgagcagggggatggcaacggagagccgggttctgacctagaggataatattagtaatacatgtcttgaaattgctaatggaactgaagcaaatgctaaaaagagtgataaacagttaaagaaggaagcaagaaaacaaaggtattcagacattttattctactctgcgacctttgttgacatatgcatcaaactttacatccttatctggttttcaacagggaactagaaatcagtgctatggaggaaagggctttgcaggaagatataccacaaactccagatgattttgagaagttggttaggagctccccaaatagtagttttatctggataaagtatatggcaactttgttagatcttnnnnatgttaagaaagca

SEQ ID NO: 1148 - DNA, 501 bp, Zea mays
  misc_feature (490)..(494): n is a, c, g, or t
aacgtcatgcagtgcaggtatgagcttgatttactaattgacttatgaatgatgccacatggtttgtatctgagtattgatgcattttgttacatttctggatactaattaaactgtactgttacagggtagaagctcatggtacaaaatacttattgtgctatagaattttgtcatgaacgtatacacgagtatttttttttctgttatagatctctgtactttgagtgaacctaaatataactggaggtattcatgggtttggttctcacaggaattcattttgagatgtttcgttgaaaaatcagttatgaatatatatactgtagtttgttagaaggacaggcctgatgcagtggtgacaagccttttcactgagccaaaggtcttggggttgatgcagcctctctgcaaaaatgcaggggtaaagcttgcctcggttatttcttccccagagcccactcatgtgggagccgccagcactggattnnnnntttttac

SEQ ID NO: 1149 - DNA, 369 bp, Zea mays
catgagcaggactgcggcctcctccactcccatcaggaccctccgtttcttcaccacttggagcctgctgcttttggtgttgtctctgacagcgactgcacttgttgccggacagtgatcctcttgatgctgctgctgctgctgctgctgtggcggcggcggccgctggttttgttgtggtttcttggcgctatcgagacctagctcttgcctccgcttcttcctgtaccggatcccacacgcgttgcagagcgactgcacccaaaccaaattaacaagattgctcatccaaaacgctggtttttctaagttggtttctggttgattgcttgctctgttgatcctaatactggataggaacaaacagct

SEQ ID NO: 1150 - DNA, 313 bp, Zea mays
acgcacgatctgaaagcgtgaggtcaccggcgagcacgaattcaagagagaacaaaaaaatcgtcgccgcgctgagaagagaaagaaatcacgccatacgcatggccatggtcgtcgtcggggcttcagggccactcaagcttgcagcagttgcttctgggggcctaaccacggcgcgccctgcgtagcagggttgggaagacggactgggatcgctcctgggcagctgttgcggtgccggtagggcagttgcgtgtttgcggctgctcctgtgcgctggagggtgtgagctgcaatcgccgtcgctgctcta

SEQ ID NO: 1151 - DNA, 706 bp, Zea mays
  misc_feature (692)..(696): n is a, c, g, or t
tccttcctgcacgcacgcagagtggcaaggcaagggttgagttcgcatatgtatgggagtaaactgaccaatgtaattctagcttaaggcttgttcggttatttgcaatctatatggattggagagaattgacattgtattgggagagattttgaattattagggattttaaaccaacccaatcccccaatttaggtcttgttcggttatttctatcccatgtgttttggatgagattggaaaagaaatgatttagttttttgatttgcttaagatttaaactcactcaatctcactaatctgcatagattgagagcaaaacgaacgaggtcttatatggattaggatggaaacgaacacggagtggatttgtacgatatggatggacgtacttacgcgtcaacaaagaacccggcatcggagaggcatttcacaggaacctcagggggaaaccgtgcgcgaaaatcgtcgcagtgcagcagcgtggccagaccaccagcggaacaacctgtgagcaaggcctgcaataacgaaggcgcgcgatgcatggagccttattagcatgtaaattaaatgagaccacgtgtgtaaatgaagaacagcagcaaaatggaatatatgtagatatagcttgtggagagatcatgcaatattctaagggggtgtttggtttctagggactaatgtttagnnnnnatattttatt

SEQ ID NO: 1152 - DNA, 388 bp, Zea mays
aacagcatggagttctccactgttgacctcccacctgatcacgaaaagaggaatgtcatcattgtggagtcatggggaagcaatgttgcaatgtttagtatgattgatgaaggcgcatctgtggattattacacctcttcgcaaaatgacagcgagaagtcccatgagtggcatatgatgattagcatccctttgcctgcagactatattattggcccctgctttaagggtccagctgaagggtatattttcctagaaggcattcgaatagatcatgaggcgggacattcagggttattctcacttgagattaaatctttcaaaattgagagggtctgtatgtcaccctatcgcttttttggccgtccatattttggtttcccacctt

SEQ ID NO: 1153 - DNA, 355 bp, Zea mays
ggtgtcaattttacgtttacacatgtaggtctagtttggatactttgggattagagtgttttggagggattggagagggtgtaaatccctaatagatcaaatactctctcaatacatctcaatccattccaatcccactcattactagagtacctaaactaagccgtagtagtttcaatgtagttttggcataaatagcacagctttcttgtttgcggtgatcccgttcccgtggttagtataaaagtgttttcgttctttcttcaaaaggtgaaattcaagtttacatttatattaccttgaagaagcatgtacatacacttcagtacctgtaatggtagtattgcaatgatgc

SEQ ID NO: 1154 - DNA, 357 bp, Zea mays
tcgctctggaagctcctgggccaggccgtcgtgtcccgcctcctctgcccgctccacgttctcgcactcctcacccctaggtgcgtgcgccagcgctcgtcccccgcccccaccccaccgccggagggggtgggggcgtgctgaaattggtgcccgtctgtgtgctctccgctcacttctctgtgggggtgtgaatttctcatctcgcggtggttttgtcacacagggtgctgccgcagcggcgagcgcagcctgaggcgtaccgcctgtacctggaactcctcaagtgtcatgtcacgtcgtccttactgtcgatggaggctgggcctaatcgtgacaagtaaggtcttgtgctac

SEQ ID NO: 1155 - DNA, 357 bp, Zea mays
tgttatgtgcgcaactttagcccgtaccagttgcccgatgttgagtcgatgctctcaacactgactccgtccttgatgagagtggttcgcaactccttcgcaccttcggcaccataccatcgccgatgaggacatcacatatgttagattcattgtgcatgttgatgtgcatcgatgtcaattcaatgctcgtagctccgccaccatgggtgtgcaccaatgccactgatgttgttgccaaccatcattgaaaggatctagatgcccaagggagggggtgaattagacttctctaaaatttcttgcaaaaaattaaacatataatgagctcacttcagctcttgtgactaggaagtg

SEQ ID NO: 1156 - DNA, 532 bp, Zea mays
tggatcactgacccgatgcacgggaacaccatcaagactccttgcggacgaaagactcggccatttgactccattctggttcttcttctttcttcttctgtcgacgtcgtactcctcaaaccaatatgaatgtgatacaccatgcatgcatgcatgtatatatatttacacaggccgaggtacgggccttcttcgacgtgcacgaccaagagggaagccagcctggaggtgtccaccttgagatgaccggtcagaacgtgaccgaatgcacgggcgggtcaagcaacgtcaccttcgacaacctgagagaccgctaccacacgcaatgcgaccccaggctgaacgcgtcccagtccctggagctcgccttcatactcgccgagaagctgaggaagcggaggatgcgccggtcgtcggtggcgtctgggctcggcggcagcatcttgcccttgccgccctttggcttttgatgtcttgcacgctggctgtgtgcatgcagggtgcagtgcaggggtgtggtaggagaatctta

SEQ ID NO: 1157 - DNA, 375 bp, Zea mays
tgccacctatatgcctgggtaaaaaaaaccttggccactagtatagtatcaagtgttgagatgccgcaaaaaccatatcctgtgaagttggtcgctgcaaaatagcccatgaatggagccaatgaacaattttgaagacaacctgctaaggagataagttatgttttttttatcaaataccaaactatttctgcaaaagccataacgaccagtaagtagtagccgcccctaccagaactagttgatttttttttcttttccaataccccaaaaccaagatccgaactatttcttagtccctcatcactgtcttccccatcatgaattgcatctttctcaatgaccaaactagactaatcaactccatcagcacaa

SEQ ID NO: 1158 - DNA, 712 bp, Zea mays
  misc_feature (698)..(703): n is a, c, g, or t
taaaagcaagcattaataataatagatgtattacttgctatttgaaagatgaccaagtcaaatggagcagcaacagatgaatccagcagcttcatgcactaattaccaataaaagaagggctccgtgctctcgctcttggaccagacatcgtaatagatgtgcagattgtggccataccgatgcctcgggtcaatctgccagcatagacacgggcgcaaaagcagcagcagcattagtaaacaactaatgatctcactggatctacaagaaccacttgtttatataggactactatgtcctaggttattatgtagcatgtggcttacagcttcgagccagtgctgccgcgccagcttctgcgccttgccgttcttggacagccccttgccaagctaaacaaaagcaagcgaacaaaacaaagctcacatgtcagccgctgcgatttcgatgtgattcgtaaattcgttcggcagttcaaacgcatctctagcagcattttcgatgaaaggacagctgtaaagctagcgacggcgatcgaggttgctaccttggccaccctagtcctggcgcgcgcccagcgcgacgccgccgtctcgggcttgccgccgttgaagaaggagacggagctgtgcttgagggacgcgaagtccagcgccttccaccacagctcctcgatgaccacggcgcagtcggcgannnnnngccgcgtgc

SEQ ID NO: 1159 - DNA, 356 bp, Zea mays
tctcacttcaagtcaaccatgcatgctcaagttcaaaagcgtacacatgcacttcatcgagacttttctccagagcgtctctcttctgtccggctactcatcggaatctcaggttattatactgaagatgaggggtatcacccaaggtctggaaccaacaactgcggtgaggataatcctggagcaaagagcagagtttggtcgcggcgtaggcattccagagatatatgctgcatcactaaagctcgagggcgaacttcctctcgtcagaagattgctctggaactggaggtggaccttttttgtctggagcagcacggggttgtttgtttttgaattgctgtttgggcttgtgt

SEQ ID NO: 1160 - DNA, 771 bp, Zea mays
atctgcattctatgttgttacagattatttcttgtggttttgtacaccttaacaagcatgtaccaggcatgagctgcagatcttgcttagaatggaaatgatcaaatctgaactcgggtctgccatagaggaaggttcaaaacagaaaatgataaaagacatctgctcgcttctgcaatttattgacatcaatctccaaggggattcttttcagtctgacggtattcttgagtatgctgaaaagaccataaagtcgaggtatgacttagtttctatgctttcagttcctctcattgttgtttagtgtactttcttttgttaacgttagtattaaattccatgtgaatagtagctgtaagcgtgtaaggttaaacttggtacctatgccaggagatgcaacttcatgttgttgcaatttaaatctggcttttgttttttttaaaaaaacagtgtagtatcagggcaagcattacacacttttgttacacaaattcatgctctatactgctttctttgccaggatcaagttttatgatttaggggaaaatggtatctgtacatgtcttctgcaactgcaagtagctaggtagccagagataccaataaaaactgactggctgagcaatgtttgcagttcagattgtgttacatgtgagtatgtgacttggataaattgctcccacttcccaaatgcttttcaggtacatcaactccatggaggatgtgatcaagaagatctacagggagatggagtttgatttatttgatgac

SEQ ID NO: 1161 - DNA, 379 bp, Zea mays
ggcggcggagcgagcgagacggccgtcggcgccggggaggagaacgcgagcgcttccaggatccccacccgcaggttcttcgtggcgctgcacgtgggcgccggcttccacgctccggcgaacgagaaggcgtaccgcagggccatgaagcgcgcctgcctagccgctgcggccgttctccgcgaggtccgttcaggcggtcactgagcgtttaccattttatggcccactatctccctccttgtcatggcttggtaagttggtatggcgtggcacctggattttagccgctgatcggaattgtcgagtgcgtagggtacaattgggatcgggagattggggcacactgtccatttgcgtcagtgagacgtggtgcatt

SEQ ID NO: 1162 - DNA, 357 bp, Zea mays
gctgcggttctttgtgaagggggaggtggcattcgtgatggcgcacatgaggcggtggaagcgcacggacaagaagttcttcggcagggcgagaaagctgttcgacgttgaggtggttcacgaggatccaccgctcgagggctggcggcacgggccggtggtttaccggttcaccgccaagaagcagcacggcaagaagtgaagaaactaccttaaggtaaaggctgcttgcttgcctatctgcatgtgttcatgttgcagcgctgctgctgctactgtttgtcctcgtttgttgagtgctagattccaatgttggaaacagaaagtagttccttggaacaatgtgcaactctggac

SEQ ID NO: 1163 - DNA, 433 bp, Zea mays
cgctagagtaaccaagaacaagacaccaagatccaagccggcaggcgagagatctgctcgtactcatggctcccggccccgatgcacgctgcagctagcgcgcgccttgtttggttcgatcgagacgagacggccgtgcagatcggcttacctgatgccactgcgccgcatccatgcatgcaaggatcccaataattccgctcctcgccagagcgactctgtctcccgtgccgcgcgcgcgcgcttgccagacgagctcgggacgacggcgcgacgaggggggaggacgaggacacgacgacgacgacgacgaggaggaggaggaggaggaggagcctactggagccggatggggacgggcggcggcggaggcggagcggaggaatgtcccgtggatggcctgagtagtggaattgctcccggctccttccct

SEQ ID NO: 1164 - DNA, 380 bp, Zea mays
atgtggtaccttgggatgcattcacacccaaaggttaacaagagatgtcacacaattttgagtgtctatgtgaaacatcaaaggacattgtgtggtaccaagagatgatgctttagcaaagtcactgacaccattattgttgaagaacacacatatgatcgatccatccacatgaatctatgtgtgatgcccctgcttagagcaccaattaattgttgatgttttaacctctagctagtaacagatgacatgcataatcaataagagaggtagcacacatgatacatatattatattagtttaggcaaggagtgtccaaactctagtgtataataatgttcttattgtttttgtgttgtatgctcatgtcagttgtgagt

SEQ ID NO: 1165 - DNA, 321 bp, Zea mays
ctgtctcggcggcaggcgtgcagggtgcacggaaaaaggtggtcctcgcgggttggtcggcctcggccgggctggctggctctgcagctcgccttgccgccactactctctgcgtcctcgtgaagaactgctgcttctgctgctacatctcatcagcttttacttctctatatctcctgtaaatcttagcttacttttcgggtggggttacggccggcgatttcgctatagattttttttgttttgttttgtaacttttgttcagcggagattattatttgggtgattcttgcagtaaaactggacgggtggttccgtata

SEQ ID NO: 1166 - DNA, 578 bp, Zea mays
actgagccatattactcgtattcgcggatcatgatgaccaagttctacatattcgcaaactttttcgatgacctttacgacaactatggcaccacagaggagagcgatgtcttcaccgcagccatggaaaggttggttacatttatttgaaattattacacagctagcatcatctcgggggtgaacaaaatatttaccatttccttgattaaaaaaatacataatgacgacaggtgggatgaacagatcgctcatcaactttcagcaggcttgaaggtactcttggtcagcatattgaatgctacaaacaagatcgaggaggagttaaaacttcaggggaacatgcacgctgaactggtcaagaaaatggtaaacaaaattctgctagctccaagagatcacagtacatactaagagatcattaccatccttacatatattttcacattttataggtgattgacactgccaaatcctaccacgctgaggtaaaatggcgcgatgaacactttgtgccaaccactgttgaggagcacctccaaatttctatccccagtagtgtttgcatggagatgaca

SEQ ID NO: 1167 - DNA, 471 bp, Zea mays
  misc_feature (465)..(466): n is a, c, g, or t
ctccggctctggctccagcgaggatggtgagcgaaccggccccgtgccttcccccgctcgtcgcgcgccgcccatccgcatcgacgtcgccatgggctccttctccgcatgtcgccgccacgagatctgcccgcgcgtctccttcggcagccgatgcccgacggccgtccgacctccgacgcatcgtcgccggtccggtcctcttcgccccctctccgctgcgtggcgccacccgtcgtcacctccgcccccttcaccgacctctcctgggtcctccacacactgctcgtcaccatcgtcatgcgcgaggcgctcaaggtaacaccatcctctccgtccgtccagcatctccctccttgcagatctccctgtttccccttccctaattccatttagtcccgccattatctgatccgtacacaagatgatgttaggtagttgaatttgatggcaaaatcgactgcnngctag

SEQ ID NO: 1168 - DNA, 389 bp, Zea mays
tctgcctgcccagattcatctcctccaggccacccctccctaggttctcttcccctggatctctccgccacccttctcgcttgtgcagtggtccattgagccagcaccacatgcgaggagctgggaaggaggatagaactggtaagtacctgttcattctcctctctattcatgtctattcatggcagaatcaagctggcaaggagttgggaaggaggacaaaactgagaatgatttccatctaaccattggttgattatcttgtatttgctagaatgttttgtcggttgatggttgctgcatcatgtattcgatggactaattttattttgaacttctctagccgatggtaactgctatttgaatttaaactgtgctaccaatcatgt

SEQ ID NO: 1169 - DNA, 498 bp, Zea mays
agacgatcgatcttaagctgtgtgtgtgtatcgtcaagtgaaaatcaggctaacatcctgcttctcgcggacattgtttgtgttgcattgcaggtatacattcggttcaggcagactaccacgagcagaaggtgaccgtgtgggggatctgcgaccgcgacgacgtgctcgctgccgtccggaagaagcgccgagccgcgcggttctgggatgatgatggcggcgaactgggtccacgcgagcgtgcgccgacgcccggccgagaagctcccaagcagtacctggcagccttcgccgcgtacaggtggaggaagtcgtggaagaagcttttcccgctgatccgcctctgaaattgaatctcaccgtgtgtgtgcttaagcttattggcttctagcttctccacaagtgagcagtgtgtgtgcctgcttcttgaggacgtctcaggaaccggaaaaaggggttggaacatggaacttaagttctaacagtagcccgtgc

SEQ ID NO: 1170 - DNA, 489 bp, Zea mays
cgcgcagcagccgtcggcaccccctgtggctgaggtcgcccaagacgctgcggacgcggacgagcaggccatttgggaaatgatgctcgcggaggccttcaaggccagcccgcgcaccgaagagctgagcgatccggacgtgctaagaagcctcgtcgcgccggtggaggcggagctggagaccgaggaccacgccgagcacacgctgacacagcagagatacgagcaggccgtcgccgctgagcccaacaatccgctcatcctcgccaacttcgcgcagttcctctacctcgtgcagaacgaccacgaccggtaggtcccctccgtccacgcccacacgctgttcgacgaattgccaacgcagccgcagctattcaccaataaaccctcgtctcttcgcagggcggagcactacttcgagagagccgtgcgcgctgagccggcggactcggaggcgctgagccggtacgctactttcctatggaaggc

SEQ ID NO: 1171 - DNA, 609 bp, Zea mays
cgcggctaaaacccgccgagccggaccaaatcgccgccaccatcggagatggcgtcgcaggggcaacggtcctactgtcggcattgatgcagccgtcgcggcagctcgagtttctcctccgtagcttcgagcgcgcctctaagatgcgcctctctcctctcgaactcgattcctactcaggtatgcaccccgttcatcctcgcgttggattcaattcaatgaaatcgagtttcgcatgcaagttggtggaacactacctgaaggcctcttctgtttgtactcactgcagagggctgcatggtgcagctcgcggagggagcagcccaggacgtcgagagcttcggtgatcatgtaaaaggggtgttcggctcttcgtggaaggaagagctctgtgagggaaatcacatcgatggtgagatcgccgtgggcagcccaacacttctggttatcagctcatctgctttgcgatctttagacctactgaggtagaatctgttgttccaaagtgcaagaacatgttttcagttttgcactgcatattcttttagataatgaagcaactggttgtaggggtttgaagatgtttactaaagaatgccgaccagtaaa

SEQ ID NO: 1172 - DNA, 332 bp, Zea mays
agtaaacagattttagtaacaaatagagaatgttcatcaactttttggttgtattatgttccctaacagcggtgttatggtgaaacagagttttctgcacgttgggaaagctggaagagtcttttctactcagttttctgctaacagtggtgttcatgttacgtttgcagatatggacctcggtggttatgttttctccacgttgggaaagtcttattaactataggtatgatgcattagtatgtcatgtgtgaactgtgtcctttgctaagccgattcagtagttgaattccccaaatctgaaaatttcctcacaaagacattaaagagca

SEQ ID NO: 1173 - DNA, 538 bp, Zea mays
gcgtagattctaacaggatgtagcgcatacaagtgatttgaatgtaatttaattccataatgtgcaggtatgtatcttgaacatcattaactgtgcattcctcactttaaggtgcatatttgtgtagaacagtagaatttaagttttgccaaccaaaatctctgggcaattagttctgcttttgtgtatctttttccatagtataattaatttattcttccatacctttcaaggaattaatggcaatcttatgaaaccggacaggactttatggaatcccttccgaactaaccagcctcatgcaaatgtcgtggttcaagctaaatccaaatcaatcaccttcagcggagataaagagcttcctgcaatggaaatgacgtacggaacacaggccaacagtttaccctgtcatctcatgtaatgagagtgtacaaaatactgtctaaattgaaagcacattccatagaagattacattgtttcctacatattgtgaacttacagctaggagttgagattgtagaagcccacagatgtgt

SEQ ID NO: 1174 - DNA, 817 bp, Zea mays
  misc_feature (681)..(682): n is a, c, g, or t
cggctaccgcgacggctccgagctgcggttcgacgccacggtgtcgggcacgctgggcgagggccgcctcacggaggtggaagggatcaagaccaaggtgctcgtctgggccagggtcaccgccgtcaaggccgacgccgccaaggtccacttcaccgctgggatcaagaggtcgcgcagccgggacgcctacgaggtcgtcaggggcggcatcaccgtcgacgagttctagcttagttttgctttcgcggctcacatggatggacgggcttcctcttgctcgctgcacgctgagatggacaagattgttgctttcagttgcaagaataaattctacacccattagctatgtgcaggggcggagccaggattacgatataaggggggccaatcaactaatcaatattatatgataaaaaatattatataatgttataaagtttaagcactcgctatggaataagaattctaaatctttataaattattttggtccatgagtccattttctagctaattgatatattgaactaaagttatgacgtaagacaataccaaaaaataaagacgataaaatgatgaatatccgactaatgagattcaacttttatataatggatctagtattcatgagacaactaacaaatgtatgagagaattcaaaaatccaactagccttaannatccatgaaaattcgtcaacctatgcaggtacatgttaaaatttgttgtgtacacaccaactatcagatgacaactttagttgaaatttgtagatttattatctacgagatctaatggagtatgtatataagttg

SEQ ID NO: 1175 - DNA, 1211 bp, Zea mays
  misc_feature (1145)..(1145): n is a, c, g, or t
  misc_feature (1178)..(1181): n is a, c, g, or t
  misc_feature (1206)..(1206): n is a, c, g, or t
tctgctcccgtcgtcgctcgctcaggtatgcacagcgtcggaccctcctcctttcactattaccttataggttcctgatttgagttaccaacagtgggtacagacgtatagtaggtttctaattcgacgaactccaccttgagcaaatcacactaaccctagcttctcgggtacaataggttttgcacttggattacttgaacaaatcagacaagaagtggctagatagaatacaactggaatgattctatgtacgggtatgattctacatttattgccttttctacaaatcgagttaaatagtatttagaatagcaacaatgtaattcattttatttttcattttcattttatttttttattttcagctttgacgatgatctttcattgcttgctatctgtacagatgcatgcaaagggttagaaaatgcaataaagcttgttttccctcaggttgaccaaagagaatgatttaggcatctcatgcataattttgtgaaaatgtttggaggtgacatatcctctaagatgtaccctacacctagggcatataggccagaagtttcatagtactttttcaatcaagttgtagaagccccccaagatgtaaagaaatggctagatacttaccacaagctgaaatggaggaggagtcagtttaaccctgccatcaagtgtgattatgtcaccaacaatctagctgaagtattcaacaactggattaaagattggaaggaccttcctgttgtggagcttgcagacaagtgtagtggcaagctcttacctgctattacctgataatggtgttgtgggaaaacggaggaaaattgggggaaagcttactgacaagatcttacctgctattttgcagcagttgaaagcaaggactagaggcctaggacatctatcagtgacaaaggcagttgaggacagcacaaacattcacaataggcatgtggtgaagtcatatttgcattagtgtacataccttgagtggcagcacaccgacaaaccttgcccacatgcattggccttgattacagcaggaggattttgtgcatgaatactactcagtccaaaggttcaaaaaagtatacaagagaataattaaaccactaccagataggtcgcaaactctcaatgancgcaagtggaacaaccctatgtggttggtgcannnncttgacaagagaggaagaggaaggntaaaa

SEQ ID NO: 1176 - DNA, 350 bp, Zea mays
gctaagggagggaggagcaggggacagccggtcccgcggtcaccatggcgcggtgcagggaggccgagtggaggacggcgttgcagccaatggggatgacggtcgggcgaatcggcggcacggatgtcagagcatggagctcgcggcggcgcacccatggaggacgagcgggaggaaggcgaggagcggcctggcgactggctagggttctcggccggtccaggacgacggcaagctccatgggcagggagagacgagggcgaccaccagggcgcggtgcttggggatggaggccgagcgcgtggaagggggaggcagccggcgtttgaagacgtggtgatatgttgatg

SEQ ID NO: 1177 - DNA, 400 bp, Zea mays
  misc_feature (347)..(349): n is a, c, g, or t
agctctggcttgccgtcctccgcccgtactccacgctactggatctctagcttgctcgtacgggatctctacgggatctttgtactccacgctactggcttgaggtattcaaactttgcgacactacagagattaaagtggcagtatctctgttttatctttccggaagcctgcatgcggtcaatcaagtcagttcttgcaaatcaaactttgcgacacttcaggcactcctcaagcatttctatgttgttgcaaatgaaaaccagcataagtagtcaaatgatatgttgcttctgttctgtgatttacaccattttaaatgaaacttctggacctgttgggttaannntgttctgtgatttacaccattttaaatgaaacttctggacctgttgggtta

SEQ ID NO: 1178 - DNA, 846 bp, Zea mays
gagaagaactcgcagcccaagtcctcgtggtagttatggaggccatggcaagcgccccacaactaatcttatggtgacgaatcttggtccggattgtaggtaagattctctctgctcctcctggatcagaagtagaatggattttatttggtgctgctgtcaatagttattgaagtggtcaagataaaatatgtactaatattggaattcatcaaagggaatacaatcaacaggcttcttaggattgagtttttaattttgcttgacttctagtatctttttttcttgcaaataaaaaagcatgttgatcttgtttagttttgaaattagtcccctggaatgtagctcatgtacgaacagatagaatttataaatatatgtacagttctatctagctattctgagggatttgtaatgcattgtgctttgtaagttatgtcttaatgaagcatacccctcccttccctgatttactgtgtttttcgttgaaaagttcttttcattttccaagtttatgatgtgcttcatattgcatataacgatgagaatggatattcattgacactacacaactgtaactttgctgttatcacaactgcaggagttatcaccttcgtgaaccattttggtttattttgtaggattccgactctcatcaagtgactcctcccctcacgatgactttgcggacagatgtctcaattatagtggtggagctacgaacaacaatccgatgtcctgatcgagagcgatggagctaatgtttgaacttgtgtgtttgaacttgtgaactaaaaatgtgaactatggatgtgaacttatgtgaatttgtgaacttatgtattg

SEQ ID NO: 1179 - DNA, 517 bp, Zea mays
tgcgagccaccgatttttcttttcatgaaaggaacaggtgtgttttcagatgcaaacatggccgtgctcccccatcagcaaatgcatataatctgtagaatgcaaatcagtctctattcctgtatttttatttagtgacacggtcatgcttaagtagactgtacaattttttttttcacttgcagcatggtgtggtgctggtgctgaccattacgagcctttgatcgccactgtcctccagcatgttactccagacaaggcagctgtcatcctttgagaatgactgcagttttttctacctcccttagcttttagtcagcggtggagttgagacaattttgttattggagctagagtgctgaattgaggagcgacatcaatatgcccaagagattagagagacggccaacctgagtatcttgctctgttgcggggttttgcctgcttatgaagctgtgtatggtgattttgttgttgtatgtttatgagtaggctctgactagcgaggatattctga

SEQ ID NO: 1180 - DNA, 344 bp, Zea mays
  misc_feature (334)..(336): n is a, c, g, or t
ctcacgtccgcctcgctatgacgcatgtcgttgtctttgatctcagtacctctttcgatacgcacctggccgtgctttgcctcctcgtggtcagcaccatttgggccatgagggcggtagatctcgacactgcttcacatgtctcttttagaggtttctgtcgtggatggttttcgccctctcgtcgtgttcgtgatcatcgtcgatcgtcgttgttttgagagaaattaccggaaggtatggagtaggaagcgaagctgcacaacacccgtatgatgttcgacgacaagcccgagccaggatttatctgcattcttacgagtattgagtcacnnntgatgcta

SEQ ID NO: 1181 - DNA, 751 bp, Zea mays
ttattcttttagcttatgatttgaggaatatatttttttatctggaatccctttactagtgttattgtattttaggaggataacaacaatgtgatgccggagctccaatcgacgagtgtaaggttttgatgctcctgccccaccagatattatctgcatatgcaagcttgtacattgtcacaagtaacttatattctaattgcatttgttgcaaaaccaaggtttcaattactgggctgctattgtgcctgcctggtgaacattgttaggagctctcctaacattgcattggttatagtaaattctatctgcatagatttttggttagatgctcatgacatgctagataggaaatcttgggaggcaggatgtgaatcaatgaaacattctggttgcatctgtacagtactgtcttaatcagcgaccatttaagagaaccacattttggactgagatttttttttttatctgcaggggcttgctgaacggcaaaatgctcgggggtaatatacatctggaacgtcctcttcttgacaacctagttattgaatagacacgtagcagcatgtatgtcaaaataattttgatagctagcagttaaccttgcactgcatgttgggacatggcccatgggtattatacttcacatgaatgatgaagcagcagtgagcggataatgcagcatggttttggattctgccgactgttgcgcatggatgttggcgttgcgcatcattttttgctccgtcag

SEQ ID NO: 1182 - DNA, 403 bp, Zea mays
tggctgcctgcagatttgagcattcgccatcgcaatcccttgcactctcaagacctgtctgcaagcacagccccaaagtcaaacagctgaactcgtcagcaattactgatttttgcagagaatgcttgcataactttgttaaagaagctgtcagtttggcattgtctggcgggcagatggatcaaactggtaccccctgttagattgtagacaaatttgggattctttcttgtcttatcattgtgaatatctcaaagcacaaactagggacaagttgtacaatttatggcatgttaatgcctgtcctgtagtgtagttgccaggtctaatcagtactgtaacaactaacaaaatattctctttaatatgccacgaccatgcctgaagtattggagcctaacat

SEQ ID NO: 1183 - DNA, 403 bp, Zea mays; identical to SEQ ID NO: 1182

SEQ ID NO: 1184 - DNA, 555 bp, Zea mays
ggaggccgttgtggatcaccaaggcgttggaaaaccctgtagtggtaagaatcgatcagattgacattcatccttgaccgtaccattaggctggttcgttccagataataatcctgcagaaaagaaacccaaacttaattgctgcacaagcacaacatcgatcatcatctaatcaaagactcttgttatcgcgtcagacagtccaggaaatgtcaatgcagtcgacgagcaacctgaccatcagatgggcgttgagagggaagcctaagaacccgttgttcgcgagcgtcggaggagacgtcatcgtccgcgtcgagtcacggttcgtcctgaaccagataagcgggcaggtgctggagcaggccgagtcctgggacctctccgcctcgtccctccctgcccaggcctacttctggctgtcccgaagggtctactccgccgtggagtccgggaaggacgcgatcgaagccgccaagagcgcggcgtcgtctgggctgacgaccaagggagaccagaatctcgaggcctatccggatccttctgctgatcctacaa

SEQ ID NO: 1185 - DNA, 360 bp, Zea mays
ctcgccgcggaccttctctccttaaccgtacggcacacctctccgacgacgttcctccgctgcggccgtagggttgcgcgtgcggagctcgtcggagtcgtcgtctcgcgtgaccgcagggagaagttcctccgcttcctggtcgacgacggcactgggtgtgtgccgtgcatcctgtggctgaaccaccagtacttgaatgctaggacgtcctctgggccatcgtcagaccatgatcctactgcagagatggcgctgaaaatgtcagaggaggtgcgtctaggcaccctcttgagggtgcgagggaagatcgcctcgtatcgtggtgcgatccagattactgttagagatgtggttccg

SEQ ID NO: 1186 - DNA, 345 bp, Zea mays
tcagtcagttgcagcagtaggacagtgcaaggcaggtctttggttcttggatccaaatgtaattagctggtggtttaggtgattttgttggactgtaggatcgggcgctcgaggaagcggcagggactccgcgttttgttcttttgccgatgttccaaggtctcgtctcacgtgtacatggacatggcacggatcgagcggtggaagaagcctttttttttaaaaaaaaaagtactagtttgtaactggatgcgggatgtgaaatttttgggcaaccaggccggcctgctgtaatgcaaatcttttgcttttgtttcaacaggaaagtgcaaagctgctattgaa

SEQ ID NO: 1187 - DNA, 387 bp, Zea mays
  misc_feature (376)..(384): n is a, c, g, or t
attttccttcatgatcctgtgagcttcactgtcgcacttcatccagagtacttcacattcaagaagggtgtggtgagagtagagatccagggcatttgcactggcaacactttgatggatcaaggattgaaaaagtatgtttttctctgagtaactcataaaagattgacccgtctgatgttttttagtttcagcattcttacatacacattgatatgacataaatctcaccaaattactttataactcttggagtaagcaaaccaaggcaaaagttaccccacatgatctatatgtttcagcagatttcacacttgtttcttcttgttcctcctatgctgcaggtggaattcagagaacccatggtcagggtatnnnnnnnnntca

SEQ ID NO: 1188 - DNA, 484 bp, Zea mays
  misc_feature (260)..(261): n is a, c, g, or t
  misc_feature (397)..(413): n is a, c, g, or t
  misc_feature (419)..(441): n is a, c, g, or t
ggccgccgccgccaccaccatcaccaccacgaccaccatcaccaccggcaccaccaccaccacgggcactcgcacggccatgaccaccacccccacagtcaccaccacgcgcaccagaggagaaagatcgagcccagccaccaccacgtcctacacaggcagcagcccgggacagcggcagaaggccaccggcacaagcacgacccggcgctcggcgtgcagcacagggaggccgggcacttggggcacaagcgtcggcnnggcaaagcggtggtcgcggaggacgccctggacctggagttcagggaacgaaggccatacgaggtcaggcatgccgggcacctgcaccgcgaccaccaccaccaccaccactcctgggaagtgtaggaatagttcnnnnnnnnnnnnnnnnntgcatnnnnnnnnnnnnnnnnnnnnnnncgaccatttaagagaaccacattttggactgagattttttttt

SEQ ID NO: 1189 - DNA, 590 bp, Zea mays
  misc_feature (585)..(586): n is a, c, g, or t
aacccttctccttctgcttgtataaagctacctatagcgcagaagaggctgatcggctgagctcatcgcacaaaagatatataagaaccaccaattggtaaccacaagcaagcaatatatagagagtcaaccttgcagcggcgatgaaggttcgcgtttaatttttcttcatccctccatcgaatcctcttcctctatggacttctcactgttttttctgcatctcatcgtcagatagtgcttaaggtggcgatcacctgcaagaagtgcaaaacctgcgtccttgggatcacctcgaaagttaatggtaagccatggccaatctttatttctgtgttgccattcaagggtgttcgatgtctggctgatcgacatgctagctgtgtgatgaattctgaatgataacggtgcctatactacagggatcaagtccctgacatacgacgacgagaagagcactcttacggtggtcggagacgtggacgtggtggtcatcgtggacgcgctgcgcaaggcgaagcatccggcggaggtggtgtcggtgaccgacgagaagaaggaggccgaggagaagaagaagaaggnngagg

SEQ ID NO: 1190 - DNA, 590 bp, Zea mays
  misc_feature (112)..(112): n is a, c, g, or t
  misc_feature (122)..(122): n is a, c, g, or t
  misc_feature (131)..(131): n is a, c, g, or t
  misc_feature (139)..(144): n is a, c, g, or t
  misc_feature (163)..(165): n is a, c, g, or t
  misc_feature (167)..(170): n is a, c, g, or t
  misc_feature (179)..(181): n is a, c, g, or t
  misc_feature (186)..(206): n is a, c, g, or t
  misc_feature (243)..(245): n is a, c, g, or t
  misc_feature (256)..(257): n is a, c, g, or t
  misc_feature (264)..(274): n is a, c, g, or t
  misc_feature (276)..(284): n is a, c, g, or t
  misc_feature (287)..(310): n is a, c, g, or t
  misc_feature (312)..(370): n is a, c, g, or t
  misc_feature (414)..(416): n is a, c, g, or t
  misc_feature (505)..(505): n is a, c, g, or t
  misc_feature (585)..(586): n is a, c, g, or t
aacccttctccttctgcttgtataaagctacctatagcgcagaagaggctgatcggctgagctcatcgcacaaaagatatataagaaccaccaattggtaaccacaagcaancaatatatanagagtcaancttgcagnnnnnntgaaggttcgcgtttaatnnntnnnnatccctccnnngaatnnnnnnnnnnnnnnnnnnnnncactgttttttctgcatctcatcgtcagatagtgctnnnggtggcgatcnnctgcaannnnnnnnnnncnnnnnnnnntgnnnnnnnnnnnnnnnnnnnnnnnnannnnnnnnnnnnnnnnnnnnnnnnnnnnnnnnnnnnnnnnnnnnnnnnnnnnnnnnnnngacatgctagctgtgtgatgaattctgaatgataacggtgcctnnnctacagggatcaagtccctgacatacgacgacgagaagagcactcttacggtggtcggagacgtggacgtggtggtcatcgtggacgcnctgcgcaaggcgaagcatccggcggaggtggtgtcggtgaccgacgagaagaaggaggccgaggagaagaagaagaaggnngagg

SEQ ID NO: 1191 - DNA, 230 bp, Zea mays
gtctctccggcgacggagccaacaagtccagcagcgtcaaggtagatcgagtgtcatgagctggctgctcatctgaatgtgcgcctgtacatactccatagcagcacctgtgctggaattttttttttcgcgatactcggagaaatatatagtatagacggagcaagaggggattgtttttgttttcatgtgtcttatattgtctggttctgttgccgtctgtgcggttc

SEQ ID NO: 1192 - DNA, 620 bp, Zea mays
catgccgcgttagaatatatactattataatgtgttatctaaaatatgaggtgatcttctttctatattggcattgtcatggcatcatctattgactacaattatttatattacaaaactagttgaaagtgttgtgagtctaatgcttttattagatgtacatagatatgactctgatgttttctagatatgacactacttttactctaatgttttagtagatctactatttctctattatatatagataggactctatgttgtacctgtgtatatatactggtcttagggcctcatttgtaaatgcttttcaggacgcccattcagttggcacattgacgttgtgtgcatgcaccacaattgcaacattgacgatggagctcaataccaccacacgtgatgtcatggacgaagttgtcgtccaagcacatgatgattattctttcctcgctcatcgatcgatttttgtatattgtgtttttcttggtggttccctcattgcttggaagattaagaagcagttagcagtttccctgtttgagtacagaggttgagttgtgtgctattcctcttgctacggtagaggtgacttgggtatggtggttgcttgttgattttgg

SEQ ID NO: 1193 - DNA, 311 bp, Zea mays
catgtgcaagctcaggtgcaccaaggagtgggtggggtgctacctgctggtgatcctggtcatcgtcctcctcgtcggcgtcctcttcggcctcggcgtcttcaggcacggctacgacaggatcacggagatcggccgcaaccacacctgcttcgactgcaacacaacaggtaccaactgaccgagccaccggccgtgccctgctcctgcctgcctcggtcgggatcggtgccagcgtgcgtgttgatttgtacgtgtgtgtggtagctcctccgtggaccgtacgtgtgtgcaaactcctgtcgcttggt

SEQ ID NO: 1194 - DNA, 321 bp, Zea mays
ggagtgatgtattggctaacagaagataaaggaacaagctgtggcatggcagttgtatcgtttgatctcagggaagaaatgtttgccttgattcatcttccagcattggaggtgaaagagacagcctcttgtgccaccatcaaagttgcttactatatgactgagatagatgacaaagtgtgcgtagtgactatgccataccaaagccatgcaccgaggtggcgccgaaacaacgcagagctttcaggcaggactgacatttgggctcttgaaagtgacaagtggttcctgaaatatagcatccagtcaccatctctatct

SEQ ID NO: 1195 - DNA, 512 bp, Zea mays
acgggacgccgtgacgcaccccttccatggtcgagttccatccacagtgcgagatgaagcatgccaccgcagggtgcgagagcacgcgctgctggggagcccacccgacgacgagccccgtgtctccgacgcggcacctgaacctgtccagccagccttggtcgacgccgttggcaaagttcggccggaccacccacagaaacgggcgtcccgtgagcgccaatccgtcggcgagctcctggagccttgcggtgtcgaagactgtaaagctcccgaaggccacgtacacaactgatccgggggcctgtgcgtcgagccaggcgaggcaggccctgtcttcgggccagagctggctggctgaggtccaccttggcgcctcaaggggcccgacggccagcgccgccgtggggaggagggccagcacctcggactcgatagcatggaacgtgttagtggcagtgaaaccagccgattgtgtatctgcgctgtaatttaagcaagcatgagagtag

SEQ ID NO: 1196 - DNA, 155 bp, Zea mays
gggtgtcgctatcactgccgacggaatcacttctccattgccgctcagcaccggtgacccgatcccgggcgttcgagtgtgggtgcggggcattctgggggaaaatctaggtgtgtgagtccttagggcgatagaaatttctcaccatcgttgaa

SEQ ID NO: 1197 - DNA, 542 bp, Zea mays
cgccgccgtcgctgggtcgagggagaaggcagatcgcggcagcggattcggcggaggacggagctacaactgatgatggatctctcggagaaggcgtgatcagagatacgattcgcagcgccaggtttgtgtgtacgtactacttgccgatgccgatgcaaaagcagcacgtagcgcatctgttgagcgcgtgttcttcttagagcttagtaatagcttaattatccttgtttttccccctgttgtacaaaacaaaacttgcaggcttttttagatggttgatagagttttgttacataaatgtaatgttagcttcatagcttgtgtgaggtcatgtaaagttccttttgtataatacgtacatcttgcgaagtgaaagcttgttacgtttacattgaagagaacgacatgtgaagacttgtttcacaggggaaaaacataaatcagggtggcggcgaccctctctgccaagtcacagcattttgttctcttgtgttttgtttgtttccatgctgatcccgatcaatgttgttctgttaaca

SEQ ID NO: 1198 - DNA, 324 bp, Zea mays
ccccgacgagacggtcagccgcctcctctcccaaggtccgggcacggcttgcgctgtcctctccccactcccacgattccgtgcctgttttgctgttcgttgcagggcgcgttgctaggatttagacgggtctgctctcgtcgatccgggcgattcgtcgacgtgaaggttgtagtctgagcgctcggcccggttagtgggaatcagacgcacctgtgttgtttctttgcccccctgggcccctcgagttcatactagttttagttatctttaagtcggtatatcagatagttgtgaaagatggagtccaagtagtattagacg

SEQ ID NO: 1199 - DNA, 1251 bp, Zea mays
ctggctgtttggcatttcgcccattcatttctacagagttctggtgcctttgaagtttattgcaacgggcaactggtaggttcctgtgaacacctagttttgctgcaatgttgttctcaagtacttttacttttgtttgcaacattatatttttttcgaaatcatttcatttcttgccgaatgttttctgggcactgaagctccctgagttatctgatttacttcattgagctattcgtatttcctctttgatagaagctagtaacattttggaaccctaggtaaactagtttcttttcctggatctctgaactgaaatgtggaggtcaggtcacgtcacgtttatgcatacaattctccatgtggtggtagaattatcaattgttggtcgcgaagctttggaaaaagagcaagttattctagaacagtatgagagagcagggtttgttatgtttgcttgtatggcatctgtgcttttctttctcttggtggagtcaaagtactaatatgtccaaattcataattactgaagtgcgtattagttgtacttatgctgcatagtattgtaccaatagccaaacaatgagactgaaagtggtactgtaaatgcaacaaaccaagtaggggaaattgttgagttggtaatagtagacaactatgcagggcaggccgttccaaaatgacaagtggtcggtgtttgtaaaaatagcctgggatctaggtctttccttcatatggaactgcaagcttcaagacatcttgttttcttatatatgcagtccatatggatcattcattcaaatggtaaatatgatgagcaatcatagttctttgaagtgaaactatagttttactctttttcatatacattgtttgaaccattcctgcatttcccttttccgtaactgaatttcttatgcagccgacctggatgtgccttgcttatgctagcaattttctccacttttcaggttttctccaaactgtctgagcagaggtttcctagtgaacttgagctacaggagctcattggcagtaggataccggattctcagattgtagaaaatctggaaaaagatctggtcctagaaaaagatctggtcttagatgatgttgatgccgatgatgccatgagagactagcttcgcctgtttgtttgttactaaatagacagaacttgagagtttcacaacttaattgtcaaaaacatattgccttataatttacactttattttcctcacttatgtac

SEQ ID NO: 1200 - DNA, 436 bp, Zea mays
cgtgaacccaccgttcttggcgttgcaaggttcaggagtttggtatgatcaggggatatctgggagcttttggggagcacagcaggaacggaatttcggaggttgtcaaatgccatggcagcagctaagggccccaaggcagcagcagcaccaacaggcgcagcagcagtttgggaattggaactacgggatgcaggggcgtggcttaagacacgaaagactaagtaatacgaggagcattggcaatgtgaggtatctggatagaaggcaggctaactgtgatgggggtgatcggtacaaagagaatgattgtgagaagggtcgtcatcaggagggcatcttggacaaggaaagggagcaggagaagcactggaatcagagggatagacatggtggcgacaatcagatggatagaagagtacgtgcaaggtcaaga

SEQ ID NO: 1201 - DNA, 206 bp, Zea mays
  misc_feature (61)..(62): n is a, c, g, or t
tcgccgtcacctgctcccatatgccccgtcatctgctcacggagcgtcgccgtctggtctnnggcgccgtcatctgctcccgcagggacttggtctgtcggcggacgcacctcccaggtctgcttcctcgtcttgtgtcgcgatggacccaacgaatcagagctcctcaggtgcagggcggcaccgctctatcgctgctgcgaagg

SEQ ID NO: 1202 - DNA, 646 bp, Zea mays
aattcactcgaggaaacctcagctctatagaactcgcatatctgaagagttccggggctctaaccgcatagttctcgtaacgtcagatgtttctactcgtggggtgaactatccagatgtcacccttgtgattcaggtgaaattcgattcatgatgatgatgtagttgaagtttacggcagtatgtacggtttatttgcctaagaagctggagaattgatgtctaactcttgaaaatgcagttgcatggcatgattaaatttgcttcagtactgacacagatgtttctcggattaggttggtgttcctcccgatagagagcattacatccatcggcttggaaggactgcaagggaaggtaaatctggcaagggaattcttttgcttgcgccatgggaacaatacttcttggacgagataggcgatctcccgattgacaagtatccagcaccagacattgaccaggagatgaagcaaaaggtcttcttctcttttaggacagttggctgtttaattgcgctgtagtgtgtgtcatacatttgtttattcgtgtttttgcaacgcaggttgacgattcaatagagatggttgacatgagcatcaaagaagcagcataccatgcgtggctgggttactacaactccatc

SEQ ID NO: 1203 - DNA, 646 bp, Zea mays
  misc_feature (108)..(110): n is a, c, g, or t
  misc_feature (284)..(284): n is a, c, g, or t
  misc_feature (378)..(378): n is a, c, g, or t
  misc_feature (456)..(456): n is a, c, g, or t
aattcactcgaggaaacctcagctctatagaactcgcatatctgaagagttccggggctctaaccgcatagttctcgtaacgtcagatgtttctactcgtggggtgannnatccagatgtcacccttgtgattcaggtgaaattcgattcatgatgatgatgtagttgaagtttacggcagtatgtacggtttatttgcctaagaagctggagaattgatgtctaactcttgaaaatgcagttgcatggcatgattaaatttgcttcagtactgacacagatgnttctcggattaggttggtgttcctcccgatagagagcattacatccatcggcttggaaggactgcaagggaaggtaaatctggcaagggaattnttttgcttgcgccatgggaacaatacttcttggacgagataggcgatctcccgattgacaagtatccagcaccagacnttgaccaggagatgaagcaaaaggtcttcttctcttttaggacagttggctgtttaattgcgctgtagtgtgtgtcatacatttgtttattcgtgtttttgcaacgcaggttgacgattcaatagagatggttgacatgagcatcaaagaagcagcataccatgcgtggctgggttactacaactccatc

SEQ ID NO: 1204 - DNA, 545 bp, Zea mays
caatgaagttgttgaaaattcagtatgtctatttccgcaaaattttattgtctatgaaaataacctggattgcgttgtatgcctaccaaatcatttcatgatatgtttttattctcaaatgtctgcaggaagaggagagtgcgcaacaagttggacgtaaaagagcagctcctaggggtagaggtagaggtagaggcggaggttccactgcaaagagggggcgaaaaacagatattgcttccatgcaaaatatgatgagcaaagatgatgatgattcagaagatgaaccgccaaagaaaactcctcgggtcagaatttcacctgagtgttctcagttcacatattgtagccaaattttgtgatgcgctacacctgaaagcaaacatattgtgtaaaatgagttgactcagtaagattttcttttttggtctttcgcaggtcaccaggaactatggcgctgtcaggaggagatgaccctttaaggagttcttgctcatgagagttataggctaggtgttttgtcttgtaaagttggaagagccgac

SEQ ID NO: 1205 - DNA, 497 bp, Zea mays
aagggataccaaagtaatggtaatttcggtcttggagatgcacttaagcttcggtaaaataggtaacagatgtttgttttctctagttgatcttgatattttgtttctggataacattggtatctgattgattattgctattgcagttagtttgttctatttactgtttgtattgttttacaggagcagatgtttcccgttatagcaaacgtagcattcagcaactaagaaatttggaccaaacaacagctccaaaagcttgtaccatgccagtacactggtcaccaagatggcaagattcaatgacgccctatcaaaatccggggtcgctgaagcaatctaggaagtgtgaacttttgccggaacgcatcaacctcacagaatgaacaatagggtcctcatgctcaacatgtcatattctgatatccctcctttctagtttacatgtagtggcagtgaaaccagccgactgtgtatctgcgctgtaatttaagcaa

SEQ ID NO: 1206 - DNA, 525 bp, Zea mays
tcagcgtctgggggagcccactccgcacctccggtctcctcccaagagcactctcggcgcggcacctcaccctcctctccggcgagatcaccgaggtaagtaacagccaagaaccagccccccttcctcgccgtaactaagcaccaccagctcggtgaactcccccagcgtgtgtctcttttgcgtgcagtggtccgacggaaaggtgtggccgacggtgcgggcgagcaacgggagctcctgggcccaccggaggcagagcgcggcggcggtgcggctggaaccggagacgtgggtagtcgagtaccagaggagcgcgcttttcgagggcacacggctgctaccggccgccgcggagctgatcgcgtccaggtgctcgacgatggcgcggcgagcgcggcgcaggatgcagggtaggcggcgacttttcggtggtgcacaggcgaatccaacctgaatcgggctcgccggaggtcaaattgctctcttgccgaagaacaaaatgctctctaggatggcttatat

SEQ ID NO: 1207 - DNA, 395 bp, Zea mays
gcatgaagtgccccgagaacctcagacgctggataagttctccaactcgttggtatatgatgactgcagcgcccatccctcattcagtgaaagctattacagcactgtagatcccagcatgtccttcgacacacaagatcttggagctgcactgaaaggcttcattgcaaccatatcgaagcctaaggcggcatatagaggatggagaacattgtcttatgtgctaggatggattttctataccaagagaattgttgcaaggagaaagaaacatgggaaataagtgaacacaagtctttgtgtagttaaatgcgaatataagcttagagaacgagagattatgtacattagtttgtttcttgtcacagctggtaagctctgctggtttcttcagc

SEQ ID NO: 1208 - DNA, 357 bp, Zea mays
acgcaattgtgcggcattggccaatgtggtgccgttgaaccttatgtattatcgtgccccccatcaccatgttattactagcccccttcggcatttcagctcagcattcagcagttttgcatgttcaactgaggtcagcggccagccggtggtagctgctactaatagataagctaaaacccaaagctggggccaccgaccggcgcgcgtgcagctgttcgatcagttgtagtgtgtgtatttctccgctttgtttcctttcagtttcaggtcatgtcggtcagtgttgtgcattcattgtaggttcatttgtatctattttcagattgtatctactcttgtatctattttcagatt

SEQ ID NO: 1209 - DNA, 499 bp, Zea mays
ccatcctggcatccttttaagatggttgaggttaacggagaaaataaggtacttgctcagttctgtccagctatggtgttatctttaatgcttatagaacctctattagtatttgtttggaaaaaaaaatcatatccaccctcattcgttgcaggaaattctggatgacgatgacacaaaactgaagttcctgtggatcgagtacggcgatgatgtgtgcaatgcggtgaagaccgcactgatggagattaacgagtataaccccagcgggaggtatgttgtgccggagctctggaacttcaggaaaggccggaaggcgacggtgaaggaggtgctcaagtacctgttcagtcagatggacacgacgacgaagcgcaggaggggctgaggaggtgcctgatgccgagtagtgccttctatgttgttgcatcagtcgtgtgctgctcgatccccaagtggcagtctggcataggagatgcccctcttgtgtagtgaaatc

SEQ ID NO: 1210 - DNA, 649 bp, Zea mays
gccaatgaaagatcaccccttagcagtaagaacattctgttgcaaactaatgcttatattagccatcagtttatcagccttttactactttgcatgtagttggagtgttcgaaatctgatgctcaagggcagcttggcagaactttggaggatgcacagaacataactgaattatcaaatcaggagaacctgttacccacggtgtctcctggctttatatcaacgtctaatgggaaaggtatgaacttcagaaactctacccatggtcaaaatgggcatagtttgctacataactgaggcatacatgaaagtagaagattgatgattggatttctgtgtgcaggtactaacatacatgatactcaatttgaggaagagccgacaggtatgaacaacagccttattgaacctaatggaaatgatgacatgtgcacagaccatgctgctaccaaattagctaaaagcaaccatgttatggaaacagctaccctacctattgatgggagttcacagtgcatcattgacatttctccattgaggagctgctctgctttggagagatctttgccttcaccaccgcaggcttcgttcgtcaagaggtcacctgtgtggcatgtagttgacgcaaaacatgtgtttaaggagttac

SEQ ID NO: 1211 - DNA, 220 bp, Zea mays
gggctctctccccacgctcgccatcaggcttgtcaccatggtagcgtcggtggtgggactggtggctgacttgctgagtggcgggtgctctcgtggttcggcccggtggtggcagatccggtgacgccggatccggtagtcctcgatccgatccttcgttgtggacgccagcgtggattagcacggaaaagtctcctttgctccactgacaatgagcttt

SEQ ID NO: 1212 - DNA, 449 bp, Zea mays
agcgccttccgccttcctggcaaggcaacggatcagacgccgatgtcgaagtggatcatcatctgtggccgtcaaaagatggccctcttccaatattccttaaggtgttagttgtgctacctcactcctgttttttttcttttaggctgacgtgtgcaatgacttgctgaactccaaaacccagtttgagaacgtggagtacagggtgaagatgaccttgaagaaccccctcacagcggcgagagtggcgtttgcgtcccagacgagggcagaccagggcagcagctgcaagcacatcctcaagggcatcgctgggagtgtggaccctggcgagatcctggcgctgatgggtccatctggcagcggcaagaccaccttgctcaagatcctggggggcaggcttggtggcggcgtcaagggccacataacctacaacgacactccctaca

SEQ ID NO: 1213 - DNA, 486 bp, Zea mays
gaccatgcgattccgctccagctatattattatgtaccctttcctttccgtgtatgatttgggtactgatctggcttggtaacgtgcagaagaaagaagcgaagaggctggcgcttgccagggtggacgagaacgtttgccgatcgatcccacgcaaaggggcagggcagcagcggaacctgaatctgcaacaacactaacccagggaagaagctggctctgaagtgtgtgcgtgtgcgtccatctagcacagtagcatcatgcacctgtggtgaaaccatggtttctcctcctttcccgtcggctaggcatctaacttatgtgtgaactgtttttgtgtgtgtttgcgtgttcgcttggagacgaggcctactaaaccgattcggctgtgttttatcaggtccaatcgtaggtcccagtcccagtacccagcattgttttggcctgtgtgtgaggcctgcttgtgtgtcggttgacttgtcttat

SEQ ID NO: 1214 - DNA, 310 bp, Zea mays
  misc_feature (297)..(303): n is a, c, g, or t
tggcactctattttcccttgggaaatgaagtaatttccgttggtaaaataaaaatccttggaaaaaatagggttgccaaactagccatttatcgtatttaaaatatcgaacttggtagtgtatatatattatatctggaagtgctagattagcatcaccctcttggataatgttagcatttagcagggttacacacgatgtactagtgtatgtattctcattctagagatgctgtagagtctcctgcttatccgggtatagacgttacagtttcacatctgttgtgccgagatggtnnnnnnnatagtaa

SEQ ID NO: 1215 - DNA, 605 bp, Zea mays
gccgctctcaatggcctctgccgccttggcgaggccatcaaggagtgcgaggaggcgctccagattgatccgtactacggccacacgcaccaccgcctcgcatccctacatataaggtgaatggattgcttgggtcttgggctagccggcacaaagattccatctcagatctcaagcaacttccagactgcaggtatgtgatcgccgggggagggaacgctgccggttacgtcgccaggacgttcgtcgagcacgacatggctgatggccgcctctgcgtcgtctccaaggaggtatcgttgcttgctctatttcaatagatgctctttttttataacacgatagatgctctttgcgtgttactttgtagaaatgatcatgtgtttttttatttagtcgaatttcatacttttcttcggcagattgcacccgccaagcgtgaagggctacccctatctcatctagaaattctggatgctgttgttatcccgtaagtttagtcacctaatcattggggttgatagctacttctgtgtgtgtattttagaaatctgttttttgctgaagtttctattgcctacgtcgtaaggtcccctgagacttct

SEQ ID NO: 1216 - DNA, 564 bp, Zea mays
tggtcggcggatgggtcttgttcctcacgcgcagctgctggtactccttgtacaggaaccccctgtacagcggcgcctcgccgatcttggccgtgaactccggcagcggttcgacccacctatctccgtgcgggttgaagaagaaggagaaggagtgcctgtgcgcgggcttcctcaccacccggtgcgtcgcgctcttcagactgttgttgctcagcacctacattaatttcgaacaagggagatttttactacgtcgtcgtgacgtcgtctaagggttcatgttggttgcatcaacaactcgtcgattctcagttgtcgtgtgctgcctgtatggcgtcgccgatgttgacgatgatgctgccgtcgaggggctccgccgggacccagtggccgtccttgaggacctcgaggcccccgacatcgtcctgcaagatgagagtgatgcagctggcatcctcgtgctcgctgaagccgatgctcgtgctctcctccgccgccgccgggaagtagcgcctcaccgtcatgaggtcgaagctgcggtcatcgttgtagttcttgagg

SEQ ID NO: 1217 - DNA, 357 bp, Zea mays
  misc_feature (60)..(60): n is a, c, g, or t
acctggagaagttgcttcagaagatggatgagtacatccgagccgataatgattttcacnagagaaggtaagaggcttataggttttctgagatgactaggggcttcgaaggaagaatccaccctaggcatgtcagatcaatccacagctctagtaagagtgaggacagaggaagccaatttcaaaggccacaacacagctcacagtctttagggcaacaacaaagctcctttaggccaccagctccaaggggcagaggcggcaggggcttcggaggaagatatggggatcaacccaggaaaatctattgcttattctgtggtgaagacaagggccacactacaagaacgtgccaaa

SEQ ID NO: 1218 - DNA, 447 bp, Zea mays
ttgtgctttggaatgcctgaagtctatcgtgtcctttttgaggcatttggaatggatccagatgatgagagctgtcagccaaaattgcgtcgtcaactagaggatgttgattatgtttcagtggagttcgaaaagaggcagctcacttggcaggatgttgctgcctacagggtaacggttcttactattgttttccctatatcttcgctttttgctcctatcttaccttgtcacatcttatgcagccgccaccggatgctctttttgctcatcctaggcttttccgagcttgtgtgccaccaggcatgcatcggttcagaggaaatatttgggattttgacagtagacccaaggtcatgactaccctaggatatcccttgcccatgaatgacagaattccagaaatcacagaagcaaggaatatagagcttggacttggtcttcagc

SEQ ID NO: 1219 - DNA, 893 bp, Zea mays
  misc_feature (59)..(59): n is a, c, g, or t
  misc_feature (61)..(63): n is a, c, g, or t
  misc_feature (767)..(768): n is a, c, g, or t
  misc_feature (772)..(773): n is a, c, g, or t
  misc_feature (775)..(779): n is a, c, g, or t
  misc_feature (781)..(782): n is a, c, g, or t
  misc_feature (787)..(787): n is a, c, g, or t
  misc_feature (790)..(793): n is a, c, g, or t
  misc_feature (795)..(797): n is a, c, g, or t
  misc_feature (800)..(801): n is a, c, g, or t
  misc_feature (806)..(810): n is a, c, g, or t
  misc_feature (822)..(823): n is a, c, g, or t
  misc_feature (825)..(827): n is a, c, g, or t
  misc_feature (836)..(836): n is a, c, g, or t
  misc_feature (838)..(841): n is a, c, g, or t
  misc_feature (850)..(851): n is a, c, g, or t
  misc_feature (853)..(863): n is a, c, g, or t
gttcttgcttattttgctaactcttaattcatatatgagtgggctgtgggttcattgancnnngttatcctttagtctctttttttcattaattgaagtatgtatacaatctaaacttcatggttgcagcaaaaatggagaccaagagaaggattttcgaggaatgtattgtgcactgttaactgcaaggtggttcttttccgtgccatgcttttcattattatgccattttgttttctagtcttcatagtgatgcctctggcgaaagggcctctagcctagtggtgaagggctttcgagtaacacctccaagtcctgggttcgatcctcctcgggacgaattttcaggattggttaaaaaatccactcatcgtgctccatctgctctcgggttacgatgttctatgcgccaccctccggttgggccgttacagagtggacggttgactccggcctattagtgatagggggtagggttcggggattttctggtccgggaccattatttcggttcctacttaatataataccgggacgacggtctttccctcctcggctgaattttatagtgatgcctctgttatgcatttaatccttgcatttttatggttctgcgtgcagagtttacaaaaagagcacacataaactgcaaattgttagtgtcctcaaactgaggtttttttgttgctggtattcttacatcttcccattttgattttattgcagcacacatgttgtctctgctgcgattctgaaagtgcgcatcnnacanntnnnnnannttgtnctnnnngnnnctnntaacnnnnncaaaaaaaaggnngnnntgacttganannnncactctatnncnnnnnnnnnnntgattctacatgaccccctccttaaaaaaa

SEQ ID NO: 1220 - DNA, 704 bp, Zea mays
  misc_feature (669)..(674): n is a, c, g, or t
tgggtgggtggtggaatagcgtcgtcttcgctggaacccacctgcctgctcttgctccgctcgcgcagtcgcgctggaggtgcgtgattctttttcgccgccacgtcctcagttcatgctgtgttgttcgcctgcgaccgtgaatccgtgattgccacgcacatttcattcgtctgcatttatttctatcttggggataaaagaatgtcgggagctcggaactctccgtgttatttgaatgccaagacaaatgcttagcaccagcgaactcgtggccttgacctgaagaaaaatcgtttttttctctcactcgtagtattaaatatttactatcattatttcttaagtttgcagctaaagctactgattggttcgtactgaccagccaagccaaagagggattctttggaggcaaccagaggtgtttggtttggtcaagctcccttcttttgtcttgcccatggaatgcttgctgtgaactgcttgtattcatgcttgagagaatttcagtgtagcatcttgtggtcttgtcctctctgattggaagagaaaacgtgctgtcttgtggcttgctatgtctgtctcggagaaggtggtgccatcatcatcagtttcttcgtcgtcagatttagatccgttgctgaagggtctaaaaaaaatctgacgacnnnnnntctgatgatgatggcaccaccttctccgag

SEQ ID NO: 1221 - DNA, 455 bp, Zea mays
acaagagtaggtcccgacatctgctaccgaaacattggatccagccgaccagtagtttgcgaacttcagtttcagtactaaccctttccgcttgagaccggtgcaggcgtggtttacggcgtatacagcgagcttccgacgtgggctgagccagggaaggactgcatagaggagacatgctgctgctttggcctcagcacggcgcagggcctagtggagttcgagtgcgagggcaacgcgagcaagcaggagtggatcgacgacgtgcagaacctgcttcgtcaggcggctctgcatgaccgagtaggggataaactgggattagtaaaactcagctagtgcagtctcagtatataaccctctttcatggtagcagcagattgctgtgtcctgctgctcctgcatcagcgatgcgaggggtacattaacatatattggtcgtactcttgtcactg

SEQ ID NO: 1222 - DNA, 413 bp, Zea mays
  misc_feature (115)..(115): n is a, c, g, or t
gacggcatgtcccacccacggcagccgggcgcagccgcagcgcaggcgcggacgcgaaggcgtgccgccgaggtggagcgtagggtccaagcacgaccgaatcactcatcccatntctgaatctgaatctgcagggtgtcggcgacggcgcggcgggcccaagctgcagctccgatcaccagaagccttcctccataagcggaacggtggaggcggcgaccctgcagcaggagcaagagcagcagcagcagcatcaggggcagcgggaggagggagtcaacatgtcacttgagctcaccctttccttcgcctacatgtagctagcacccttctgctctaactaactctagcgaccagccagcgtgccgtagtactgtcaaagaatattggaaggaagttgtaaatcacctcag

SEQ ID NO: 1223 - DNA, 410 bp, Zea mays
tcgcgcgctgtgcttgggctcaaggcggatgagatacacctctgcggtgaccctagcgtgctcaagattgtccagaagatttgtgcagatactggggatgatttggtggtgcatcaatatgagagattcaagcctcttgttgttgaagcaaagacacttcttggggacctcaagaatatccgctctggtgactgcgttgttgctttctcacgcaaggagatattcgaggtgaagctggcaattgagaagtttacaaagcacaagtgttgtgttatctatggagctctgccaccagagacacgacgacaacaagcaaagttgttcaacgagcaggataatgagtatgatgtgcttatagcaagtgatgcagtcggtatggggctgaaccttaacattaggagagttgtgtt

SEQ ID NO: 1224 - DNA, 513 bp, Zea mays
cacattcctttagtgtttcgctgtataattcggagccaaagttttaacgagtttagaatcttccgaaaattctgcccacagggctatctgattggcaatccgttaactgacgtggactacgatttcaattccttcgtgccatttgcgcatgggatgggcctcatctcaaccgacatgtatgaggtcagtggttcagattgtataattaatccagattgttgcataccgaaatccatcgaccgaccagatacaatttgtttcaggatgtcaaagcgtcctgccgcggcacattcttcggcgccgtggatgatctgtgccaggagaagatcgacagagtgcgctgggtaatgcgtctcaggactggagccacagaacagaacacattaattgagtcgacagcatcgtcgtctgatgggttgggccattgggtgtctgcaggaactgaaggacctgaacaagtacaacatccttgcgccttgctaccatcatcccgaaatccaagaggtagagttc

SEQ ID NO: 1225 - DNA, 636 bp, Zea mays
gctatatacatacatatagtacaaagtattgctcctatgttgttagattaaatttttttgcatgtattaggtaacattaggcagcccaaatacgggcacctgaaagatctccacgacctgatcaggtccatggagaaaatccttgtccatgggaagtacaatgacacaagttatggcaagaatgtcactgtacgagctttcacaactgaagattgtcttttcttctcttttttttgtcttggtaactaaaaatgttgttcatgacaatatgatttaggtgaccaagtacacgtatggtggttcttcagtttgcttcatcaacaaccagttcgtcgacagggatgtgaaggtgaccctcggcggcggaactcacctcgttccggcatggtccgtcagcatcttgcccgactgcaagactgttgcctacaacactgcaaaggttcttttcctttctgtttgtttatttatatatacgcagtatataatttgatttgggtgtgcattagatcacttactgatcgatttgagtttgtgttgaattgaatggcataattagatcaagacgcagacatcggtgatggtgaagaaggccaactcggtggagagggaaccggaggccatgcgatggtcatggat

SEQ ID NO: 1226 - DNA, 877 bp, Zea mays
gagtatgaacagctctattccatcttactatcccactatttgtttttttcttgcaaatgacctgaagttgtcctgagaacaaagtgtaatggaaaccaacattggtctgacattttaaacaatatatctgtgtttttttcttagttattgtattgctgtattatgtcgtttactaaacttgtatgcgcgtggagtgggctagccattttgcggatctatcagttaattttcatgcaattactcttcagatcataattgccctgttctttttaccaaatttcaggttggccctacccctgctcttattaaggctgaagtgccctggtcagcccgaagaggcaatctctcggagaaagaaagagtcttgaaaacggtgaaagggtaatataatgattttaccttcctgatcggttatttaagcgtgttgattgccttaaaacttcctagttccttgtttctccattatgttttgtttaattgctcttaattatgcagtatactgaacaaacttacaccagagaaattcgatcttttaaagggtcaactaatggaagctggaattactactgctgatatattgaaggtatgttttatttaccaccatctatttacagccttttcccttttgttttttgacgtcttccctactgcttttgttcaggatgttatatctctcatatttgagaaggcagtttttgagcccactttctgtccaatgtatgctcaactttgttctgatctcaatgaaaagcttccgacattcccttctgaagagccaggtggcaaagagatcacattcaagcgcgtgatattgaacaattgtcaggaagcctttgaaggtgctagcaacttaagagctgagattgctaaattaact

SEQ ID NO: 1227 - DNA, 506 bp, Zea mays
tggtggaaggcggcggcgcggtcggagccagagagccggcggacggcgacgaaggagccggcgctcccgtccatccctctggtagaacagcgacccagctggccagctctggcctccccacttaactttgttggtgcctaactttgttccccgctccctctctcccagcctctacgcgcgggggctcatggtgtcgtgcagccggagctccaaccgcgggggcggggcggcaagatcacacaaggcgggcgggcagatcccgagaaggcaggagaggaacgggtagagtagaggagggaggcttggatttgctcggcttcgcggcggccttgcctcgccacgccacttccgtccgttggttagttggttcgttggcgctggctccgcttcgtcgttctggttgggcggcgcggcgctgctcaggcctcagcaggacaatgctggtgtgtgctggacggtgcagtgctcctgccgctgctgctttggataaatcaatcaatataggg

SEQ ID NO: 1228 - DNA, 327 bp, Zea mays
atggacagggacacgtacccgaggaagtgggggcttggtccagtggcactcaagaagaagaagatggtcgccgagggcctccttgataagcatgggaagccaaacgagaagaccccagctgagtggctccgcaatgtggtgcttcccactggcggcgatgtatcgatcgctagcatcgcagctgctcctgagccagagaaggtgaaggtggaacaggatgcagttgccggtgaaaaggtcaaggagaagaagaagaagaggcagaaggatgaaaacaatggcgacgatgcttccgttccggcgaagaagatcaaggtcgaggaagat

SEQ ID NO: 1229 - DNA, 277 bp, Zea mays
acgtgtaagagtaagtagagcggttccctctattgataatcagaggctttcaagtaggcgagcagatggagacgagtttattgttgacaaggcacaacgtatcgccgccgcgaaagacaacatggaaaaaagtgtttttcaaagtgtcttagtggcttagattctggaggttgttgcgaaaggaggagttacaccaagatatcaaaaatgtttgtcgtgcaatggaagtggtggcaatggacatcttcgcaacatatggttgacgatgcaatgttaa

SEQ ID NO: 1230 - DNA, 710 bp, Zea mays
ggcgtgctcctggaggtggcgcatgtgcccttcctcaaggaccgctatgcactgtgcctgcagctcgagtgcatccagttcggcatcattcgctcctgctccgacctcgtcacgggcaaggcgctggcctgcaagtccatcgccaaggttcgcctcgtgtccgccgccgacatgcatggggtcaagctcaagatcgaggtcatgacgctccttggtggccagcccaacgtcgtcgcctcaaagccgtgtacgaggaccgcgattccgtgcacctcatcatggagctctgcgctggtggggagctcttccatcgcctgcaggagcgcgactgcttctccgagcgagaggttgtcttactgttgcgcgacctcatatatgctgtgcatttatgttgtttattacttcactcgaattaattgatgagtggttagtattttgtttgtttgttgagcatttatgttgtttattacattcattgctaacttgatgcatcttcgatttgtctagagagtcctcaatggagaggcaaaatacgacaggaaaattgtgaccatatctagcattgatggaaaagataataagttatgctaggccagagcaccaactgtaagtctgaattcttgagagtaaaagtttcgagaaacatcattctcaatcaccagtcagtatttattccattattttgctgaagtagagaaaaggcagtgatg

SEQ ID NO: 1231 - DNA, 355 bp, Zea mays
gaagtcccggccgcctctcccttcccacttccttcccacttccctctgtaacggttgtgccattaacgacaataatagctgcgggtttcttccttctccagctctctctctcctctctataagtacggatgccgaaccccatggatctgaccccatccacacagcttctctctgctcgtgagttgccaccgtccgacatcaccgtctgtcgccgtgcccgccggtgatctcgacgccgcttgtgttatccttctccgtctgtcgacctcctactcccacaaccgacggtcgtccgtgcctctgcttcctcaccgacccattctgcttgttggcatcgctgcgcaggaactaagac

SEQ ID NO: 1232 - DNA, 410 bp, Zea mays
gctacgagagcagcgacgccccgccgtcgtcggaccagcaagagaagcggtgcgcccactgcctgtcctccaagaccccgcagtggagggcggggcctctggggcccaagaccctgtgcaacgcctgcggcgtcaggttcaagtccggcaggctgctgcccgagtaccggcccgccaacagccccaccttcgtgagctgcttgcactccaactcccacaagaaggtcatgcagatgcggcaggccgtcgcgcagcagcagtgaggccgcgatggccggccggccggccgagaacgtctcccggaatctatcgttggaagcgcgttaggggatctcttagatcgtagcttagtcgatgctcagagaggatgagaacagagactttggttatagtagtagtaggcaatcgtc

SEQ ID NO: 1233 - DNA, 371 bp, Zea mays
ctcttatctgacaaagatgataattttgcatgactacccacttcacattgctcaacagtcatcctttattaattttattgagagtctgcagcctcgtttcagagttgtagatgtggagacaatggaaggagaggtgtatgctgttttccagaaagcaaaaggaaacctgttgcaagcattcagcactatgccaggaaggatcagcctcactataggactctggacaaccagtcagactcttggctatgtttctcttgctgggcagtttattgactccgattggaaagtgcaccgaagaatgctcaacttcatgatggtgtcttctccccattcagagaatgcacttagtgaagctattagctcaagccttt

SEQ ID NO: 1234 - DNA, 351 bp, Zea mays
tttattttgattagaaatatctataaaaagtaattgtcttaaataagcagagttatttggttttagtaatgaatttagcaatgccaatgctatttttatcgttctatataaattttagatattcatggtcaaacttaaaaatgtttgacttggacaaatatagatagacctacacatgcattgtgattttaggaagtcctacaattctcctccccaaagtctgctatcaacttctaacagttagtccagttttcatgaacaaatttagttttaatcattctatgttgtgccaaccgccagcaactaataatcagagctgggtcatatcatcatatcatagtagattgtata

SEQ ID NO: 1235 - DNA, 781 bp, Zea mays
gcttctagtggccgaaatcagcaaaaaaagctaaaaacaaacgggaccttaaaaggtcataaggattgcacagtgtcttttcatcatgagcgattgtaagccaaggcaggtcggcactaacatattctcattcgagccaaacagtcctcctttgatcattttgttcttattccagcatccaatttggcattaaggtgttgtttggttcacatatttctaatcgtaataggtaactaataacgttaaatcatgttgtttaagtccaatcgtaatcagataccacactagaaactgataccggcatatttaaatttgttaccactggtatccgagtgtgaattattaccgttgctatttattacatttcatgaaccaaacgacacctaagatattatgttattattttggaattctactttttcatattagaaggtatttcatcctcaccctctttacttcatagatatatatttctgttcttttcatgtacgtcgatggttttatttcccttctcacttctgatttttgctaggaactaccagatgtgattatttggggacacttcagtcatgatgttggtgtcgatctggacgctaaacataggaaaggaccgcctagtggggctctcttcggaggcgcggacggtccgtgtcattgggccggacggtccgcgacctggcgccggagcgactcctcatctgtttacgtccggacggtctgcacctagggctcagacggtttgtgatggcgtagagggtcttcttcttcgcagcagacctag

SEQ ID NO: 1236 - DNA, 751 bp, Zea mays
tgcagaagtgtcagattcacagtcaacaagttcacaactaaacctgatagagagatcaacagagcatctagcctcatgtgaaatcaacccagtgagcgttgatgatgacaacgacaatgaacatatcgatgccaatgaagaaactcaccttgttattcaggacgttcctcaatgccggatttgccttgatagtgaaggtttgctctttgactatcagtgttcttaaggcgcctaggcgagcaagtgcagcagacaaccgccttagcgcctaggcgacgcctaggcgggtaaggcgagcaaggcggccagttttgcccgagcgcttggacgcctaggcgttgcctaggcgacgccttaagaatagtggtgactattagaacttttcttagatagatagttgttaaggaatttgaaatgccttgttattttttaatatttaattcatgtttgttttgttgcatacctgccacggagtaggtgatgacttgattgcgccctgccgttgcaagggaacgcagaagtatgtccataggtcctgtcttgataactggagatcaacaaaggtctggattctagagcatctattctctaaactgcagacttaaaagatgcttcctaatcatcattattagtctagttggctctaacctagtatgtctgtaacacattacccaggaaggttttgcattttcacattgcactgaatgtcgagctgcattctttcttcgtgcaaatgttcctccagatcgat

SEQ ID NO: 1237 - DNA, 425 bp, Zea mays
aaccctagcgacctcgattcctcaccagcatggccgtcggcctctactctctcggcctctctccgccgccgcggcttgataccatcctcttcccacagctgcggcctcacctacgctgccgcgtgcccgctcgggttgctgcagccggcaccagctggtctcccgccgccggtgactccgaagacggggtcggcggctggtggtttcccgagtacgagaaatcgatgaaacaggcgagggggaggattggtaaacttatcgtttctagacaagtcaatggtgaaatattattccttcgagcagatgttctgtttttatcgcgaatattgttgttgatttgtagggtttaagagagctgtcgtggttgggttgggagcttctgcggtgatcgccttggctgggctggcgtggcgcttcccatcttc

SEQ ID NO: 1238 - DNA, 300 bp, Zea mays
gccttctgctctcttggtctccgtggttttctctgtatcatcccttcggcgcgtcgcgtttctgctgctggccgagcttgatcgctcgcgcgcgttcgatcgatcgagctagctccacaagtttcggacgccaacgacatgaatctggaagcagtggcggcgtccaagtccggcagcagcagcacggtggccttctcatgggagcacgagcccggagtgtccaaacagagccacttgggggccaacaagcccaccaccgccggcggcgcgccccgcgcggaggctgtaagcaggaggacg

SEQ ID NO: 1239 - DNA, 1267 bp, Zea mays
gattgaggtttgtgctgttgtttttctagtttaccgtttatttttttaactgagcactctgatatcagttaacttgtcttatcatttcaggcaaatgagatattgtcatcattcgatgttcggcttaggcaatatgctacaaagcaactaattaaggttaacagattcttctctgcataatgccatatcacttttgcctacaaggcttccacagaccaatgttttgaaactgcagatttccaaatatagcacactgacaatcacatagcatatgaatgttatatatctgctaattgtttggatgctgttatttctcatattatttggcatctgaaaaataagatgtttgtgtatgttcacccaccagtcaggtgttaggcttgtgcaaggaattgttaaggatgtgcagcccaacaaaataattcttgacaatggagaagaagttccttatggtttactggtatggtccaccggagttggtgcttcaccattcgttaagtcattgccatttcctaagtcacctggtggaaggtataattcttttgtgtctgtaagcatcagatatcgagtcagttatgcatgtttatgcctgtgtacacacatttatacgagtaactgtatgtctatgtgccattgtatactgactgggatgcaagttagataatctgcacgcaaattatcttatgtagtttgtgtgggtattatgtgtttgaactttgaagcaaataccgatgtcatattactgtcctgttctaggatctttacaaggtttttcaatgttgacaggatcggtgtcaatgagtggttacgcgtcccttctgttcatgatgtttatgccattggtgactgcagtggatttctcgagagcaccggcaaggaagttctccctgctttagctcaggtagtctcatccttcttgctgcagtacaagtcagttacagaaatgtgcacagtactatggcggtatggtcatcctgcattgctttctgaagcactggggaaaacaggtttgggaagggaacaaatgaagggatatacatgaaaaaaaatgagttgcagatatttctgttccacttccgtatttatatgattcggttgtttacattcagaagaagaaatgctgttgagcaagattttttttttcactcgcccttgtaagattctgtggtttctttgtttcagaagagatgttaaataagataactcttttactgatgagcaggttgctgaacgacaaggcaagtacctggcaagcctgctcaaccat

SEQ ID NO: 1240 - DNA, 1218 bp, Zea mays
tggtcctatatatcattaggctacttcaagcaggtaaactaaaaagggttgacaccacagtttgggaggattaaacttgttctgcaaggaaacaaattgatggtttttgatttttggtttttatcttccctattaactttcaacaccttccaaaattcttttcttttttcagataccaaaggctggtgaagttggttcttccactatgcctcataaaatcaaccccattgattttgaaaatagtgatggcaatttatgtcaagcgaattctatattgtctggtataagcatgaaactaccaatatcccggttgcaggtattgtgtctaatccaattttatgcctaaatttcagtttttctagcatgaggtatcaggatgaaaacctggtgcctgtattcatgatacctatacgagattggatcttaaactatagttatcatctcattagtatgtacttatactgatgaaccaccatgttgtatcattgacagcgtgacctaacagactcgactgttttgagaaacctgggtatgggattaggtcattctctattggcttacaaagctaccatgcgtggaatcagcaaggttcaggtaggtgacccagagcttgtcctttgtctcgttacagatgatatagttggttacagatgatatattcgtatcttcaatatagttgatgcatacttaatttttagcttatggttattaaatacttgcagaatgcttgatgatcaaagcagatagatgtacctcaccacttgctcttttcataagtgttggcctaacaggggaaaaatacactataaattagtggtgactgctaggcgtaggtatttacccaactaaaagatcacaccactcaaaccagctgaggattactgacttggtaggataaggaagttcctttgtgcagtgctcgactgcacacacttgcattcttggacaattgcatgggaatgtcagacgtttgctcttctttactattgacctgaaacatgcgttgtatgtaattatgatcaggctagaactactatgctgaattggtgcctttacagttgaatgaatcacgtttagctgaagacctggagcaaacttgggaggtccttgctgagccaatacagacagtaaggcatctgtttccttctgtccatttccccttgaattctgttttggttgctgtcagcaagtgcttattgtgcgtgcatcagacgtatc

SEQ ID NO: 1241 - DNA, 398 bp, Zea mays
gcggcggcggcggcggcggcggcgacgacgacgacgacgaggaggaggaggatgaggaggagggcggcgaccgcgctgcctcgcaccggaggcacgagtgcatcgcgtcggtccaggaggccctgcgcggcgtcatggaccgcaggacggccagcagctgcgacacgtcgtcgtctggtggcggcggcgggagcattaagcggcagcgcatgaactacggcgcgcaggagcagtgttcggtgtagcattcatgcatgcttgcacacacacacacacggcgttttccagcagcgtggcgtggtatcgagctgtgcgtctttatgctttgcattgcattgcatggatgcatgaacgcatatatatctgcaagttatttagcgtagctacttgctagtata

SEQ ID NO: 1242 - DNA, 372 bp, Zea mays
gagctccattccagcagggacgcccaggtcccgacggcccctgcgcagctcctccccgcggccaccatggtgctcgacgcctctccccttcaagcgcagcagcagcttccctagtctcccatggcgcccccttcaatttccatgaccggcacccaagctccagcccctccccgcgagccctctccccttgctgcctggccgagctcgctgttctccctgctccacggcgagcagcagctcgtccacctcttcctcccatggtgcccagaaattccagcagcaaggactcgacagcagcagcagctcgaccctcctctcctcgctggcgcaaacctctcccatggcgcgctgcagcagacgccctagagcatc

SEQ ID NO: 1243 - DNA, 251 bp, Zea mays
tggaacaagatatgtgcatgctaattccttaattacttcataggaagagattatattgcaattataataacattaaccatggtccatggagatggatgaacctgcattttagggagacatgtactttatatcatcaagctgaacttaagaagttgtggactactaaatgggcacaacaaaattcataaattttcttgctagatgtacaaatgaacacgcaatatttgtttttttctttattttttccacag

SEQ ID NO: 1244 - DNA, 216 bp, Zea mays
cgggacgatgaacaggccgaggagtgggagtggccagaagaaggggaagcgcgggggaggaggaggcggtgggctcggcgcggcgctgaggaagcaggtggccaggctctgcatcatccgggagtgcgtcatcatgctcctcttctaccacgactgatcccactgacgatgccctttgcggttcttcctggccattgactacctttatcttttttt

SEQ ID NO: 1245 - DNA, 446 bp, Zea mays
  misc_feature (433)..(435): n is a, c, g, or t
gcagcagctcctcatgtagcagcagcagcgcctctgagaggtcggtgagcccgccacccaggagcaggtccagagatgtaaggaggaaaaagggcagagggaggggcagggagagggatcgtaaggggagaaagttgcggagatcggcaagttcatctagcatctcagcaagcagtggcagtagcaggagcaagagcaggaagcggatgactgttggtggcactaaggatcgcgctacaactacaagggataagatggaaaagggctacactgatcgccgttcttgtcggtctgtcatgaacgtggacgagcacgttgatggggatgaagacaggctcgccatttccaaggtggtggacaatgatattgacaggcacaagaagaatttggaatcggagagctcaccttccaagaatgccaatacaacagaagnnnaagtacctgca

SEQ ID NO: 1246 - DNA, 775 bp, Zea mays
tcttgattgatggtaccatagctggttgcgcattggatggtgctgaaggtccacagtggatggaagcatgggtatgcaaattagaagcagaatattaaacaatgtttgcaaatggtcatttaggatcaataaatctatctaaaatcaaactcaattaaggttctctctgaataaaggctaataggctatagaaacgttccattatctacgtgtcctatgtttatgtattgaactttactatttacacagtgcagtatctgcttattatttcatataaaaattctcagtttgcataagtggtattttaatcaggagcttgctttatgtactgtaattggcttacatgaccagcttctggacttttctgtttaatcggctaatagttgtcctcgcagataaggacacgagttgctgttattttaacaccgttattgtttcattacattttgttcagcaaactggtgactgatcattgctgtgtacaggtgcgggagatgccaaatgttttaattcttccgcggagtgcagactacagcgaagaagtgtggatggaaataagagagaaagcaataactatgttacagtcctttttcttcgatggtgttcttccaagtagtgcaatttctgatgaagatgaggaaataagtgaagctaaaaatgaagatgactatctaggcccacaggcaaaggatagccagtcacagatttttgatactgaaatagatcaaagccacataacgctggagtctgaaaagaaaagagccatatcccacca

SEQ ID NO: 1247 - DNA, 928 bp, Zea mays
tgatggaggcggcgtggacctccgcggtgaatcgggccaccggcatggccgactccgccaagcgcttcctcctccccttccgccgcccgccgccgccgccgccgccatgtccggaccccgaccctaaccccgtaagcgaatccacacccttctctgtcttctcgcatttcaagttcaaagttcaaaccccacgacgtagcccgtataggtagggctctgtcccgttcgcgttgccggggattaggatgccggcgggtctagtttgagcgtgtctgtaaatgccaaaagcttcccctttttttcccgatcgatgtagggttctgtggaagctgtggcctatttgttgcatttatgtaccattctttttttcttttggaagccacattaggacaggaaggcagtgagctgcaccattttgtgttgcccacgttcataaactatctgatgtgtatgaacattgtttgacaaatatttaagtctggaatatttcaatgcacgtttgctaaattgagccaatttgtacatcacccgtgacacagatatttttctttgtaattcatgttttctccaatcataaaatgggatagacaagtgtggtgttctagttccttaaatacattcagaaaatagaatgtggcctttttcttctcatgtgcccttaacgccttctctattcgtgacatgattttgggtcaagggactggcgtaaacttgatgttcaattacgggctctgctgcttttggttttgtttggcatttccttcggggcctctgattcatgtgccttccattctttatttacttcaggtacagatcttgaaacgtttgcagcgacaagcgttttacgacattatgcagctgagggagagacaagagaaagttgaaagagtgatctcgttgttcaaagctaccaaagttggtccgtcgc

SEQ ID NO: 1248 - DNA, 568 bp, Zea mays
  misc_feature (483)..(489): n is a, c, g, or t
  misc_feature (493)..(512): n is a, c, g, or t
  misc_feature (523)..(531): n is a, c, g, or t
  misc_feature (540)..(556): n is a, c, g, or t
  misc_feature (562)..(565): n is a, c, g, or t
ttggttaatgggacacatagtttctagccttacatttctgtgtctacccagagcagtccacactaagttaacaccatttgaactgatacaatcatgtactgcaggtggattatgcttgcaccccagaagaagtgcaacagcatttccaagcttgtggaactgtcaacagggtgacaatcttgactgacaagtttggacagccaaaaggttttgcttatgttgaatttctggaacaggaaggtgttcaggaagctcttaacttgaatgaatctgaattgcatggtcgccagattaaggtgcagaaatgcttatgttgcatggtctcaagagttccttttttaaaacacttgtcaatagtgctttacttctgctttaccttcttgctctgtgctctacaggtcgccccaaagaggactaatgttcctgggatgaagcagcgtccaccacgtgggtataatccataccatggctacccttatagannnnnnnttcnnnnnnnnnnnnnnnnnnnntttcccttctnnnnnnnnnttttttctnnnnnnnnnnnnnnnnnattatnnnngga

SEQ ID NO: 1249 - DNA, 342 bp, Zea mays
tctggcactgagcagagagaatccaggagcgtacttgtagacaggacatctgggatacaaaatgcggccgagaagccccacgataccaaggtgatcaagcctcaggatccgtgcgtctccgaagagcaagctagcgaggccgagaaagagaatggacctcagggatgtcgttgcagcggcaatcagggccaagaggaggcagcgaaaactgcaactaaccacccgccagcttcaggcttgaaggcggcaggtgtggaggggaagcagcagcagcagcgctggaagaaggtcgaaaatccaaagcagcatgtggacagcgtccctgcccagtgctcacaggaa

SEQ ID NO: 1250 - DNA, 361 bp, Zea mays
  misc_feature (352)..(355): n is a, c, g, or t
acgacaccattaatggcggccaccgacctctcccttcccgtctctctctctccctctcctttctctctataaatattgacgccaagcccccatgaatctgttcccccggccaccctagctcgccccacaccctctcctctctcgccacgctcgccgacgccctgctaatcgccaaccggagccaccggagcgccgccgccgtccaggaccgccgaagcgccactatcgaggaccgaccagagcacgccgaccgcctgccctgctagccgcctgccctgccgctagccgcgcccctgctccctggccgaccccttgctcttcgatttcgtccctgtgcaagaattagtggagnnnngttgaa

SEQ ID NO: 1251 - DNA, 313 bp, Zea mays
  misc_feature (304)..(308): n is a, c, g, or t
cgggtatacagaagcatggtcaagacgaagcttgactaggatggtgatcacgacgaaggataagatgatcacgaagctatatgctgaagagcttcggtatcacggcgggaaggggaaaccgacttaaagatgaaaagccaaactagacctcgaagaattactatagagttattgataaatgtaaagggcattaatgtaatcttacatgggctgcgacccgtgcctataaataggtgaacagtattctcgtactgttcacgctgacttggcattcacttttgcctcacgcctgtattcctttccnnnnngtcga

SEQ ID NO: 1252 - DNA, 365 bp, Zea mays
ctgatatttggatggagacattacactgcgagtggtaccaaactgtaggaaatggaaagttggttagaggggaatcgagagtagttccactcacatggtcgttccaggcgtgatccctgttgtagatgatggcagcgccaaggctcctagctgggttgatgccagtgccagtaatggggatggtggcaaggtggaccaggaacaccgcgaacccaattggcagtggggcaaggatctgttttcaccaaataagggtttcattcatcgtaagtcttaacacaatatgaaaaatatgtatcgaagagtatgcatacattttcaatttgttgaaacacaagattaaggaatcagctaaattccagtcc

SEQ ID NO: 1253 - DNA, 800 bp, Zea mays
  misc_feature (19)..(19): n is a, c, g, or t
  misc_feature (785)..(786): n is a, c, g, or t
tggagctcacttctatcgnccttttcagggtggagaaaaatatcttgcttcttcaatgtctcgtttgaaatcaaggatcactccattgagtttgatgaaaaccgcaatgtcaaccgtgctgaatttcttgttcgagcgtcaatgacgtatgctgttttttatgcatttgcgagtcatttttatgtcactttcacctgctattttacttctattcatgtttttttatcaggcattattaactctatttttttaacttttttatttaaagaggtgggagattctcagacggttggggctcctgcgatcgacgagagaaaaaattcaacaaacctaaccatgacattcccagcacagctgaaaccagagctaagaacaaggcttgccaggtaaggaagacttcaacacttatccgaaccatttatcttgtttacatgatgcacctatagtttatgctgtaatctgaaaagaagtgcattcttgacatgtccatcatttcttaattgagaagtcaaatgcatagttcatgttttatttcataactcaagtaacatgtgaaggttaaatcgttcttacaatcttactgtaaattttaggatcttcttggaattggacgtccaggatgagaagtggaggtcactggaccccaaaggtggagtccatgaggtgtttacctttagatcagctactcatcgccagctcccaaagtggaatccacaaattttggttatagtcaaggttgtctgcgtggctgttagctcagtgcaaaaatatactggtacgtaggnntcttaacatttgaa

SEQ ID NO: 1254 - DNA, 362 bp, Zea mays
atttagaaatgtacaacaaagtctagtaatacattgttaaagataaatcaatactcaataagttcctcatgctttggatttggggataacatacctgttttatttacatgctaatatttggaccaacaaaaaataccttaggaacagccatttgagaaaaaaacaaagccttttagtcctaagcaagttagcatagcttagagttgcaacttctacatgagcacaataaacagaaaagaaagagaaaaggaaaataaatatatatggcaccaaaagctattaccatgttataatataaatttaatgaccgaaattataaacatttttacaatcttagcaaacctctcaacgtgtagtctgaa

SEQ ID NO: 1255 - DNA, 570 bp, Zea mays
  misc_feature (375)..(417): n is a, c, g, or t
  misc_feature (537)..(546): n is a, c, g, or t
gcatgggtcgttccaatcagcagctagcacatggtttaggcttactcgtagtcattaaaatagaattaggagtccaaacatctaatggagtctgacgtggcaccgtcgcgtcgagtttaggcgaatgcagaatgggatgagtttctcgctcgagaaacaccggtttcctgcctttaaattttcttgttcccgctactgacccggaaaccaaaaacggttccgttttcagtgttatttaggtttagaatttaataatacaagagtcaaacgaaaaacggttcggttttcagtgttatttaggtttagaatttaaaaatacaagagtcaaactttggtcacaaaacggcatccgaaaaatgcagaatcaaattgtannnnnnnnnnnnnnnnnnnnnnnnnnnnnnnnnnnnnnnnnnnagacttcaacacttatccgaaccatttatcttgtttacatgatgcacctatagtttatgctgtaatctgaaaagaagtgcattcttgacatgtccatcatttcttaattgagaagtcaannnnnnnnnncatgttttatttcataactcaagt

SEQ ID NO: 1256 - DNA, 1199 bp, Zea mays
gagtttgttcttaatcatggatgtggcatttgggtgtcacaatcttctctgagaagttagcttcaattgctgctgccatgtcttgcaaaatattccataataactcaattctacgatgtgatcaaattttgcatcaaccctgtttcttctgttagttctatccttttattttttctacatatatgttgaataattttcccctaatcataagtgcagttaagacttctttctgctgtgtggcatgagaatttagtcccacttatcggctattgctgtgaaaaagatcaacagatattggtctatccgttcatgtccaatggctcactacaagatcgtctttacggtatcaagcttcgcatagtttttaagaaaaaaacagttggaagacccttatttatatgtttttccgttctgtaggtgaggcatcaaaaaggaaagttcttgattggcccacaagactatctgtttgcattggtgctgctagaggtacttttttttaaaaaaaaaaactcagtccacttctacaatgggatgaactaaataatattcatgcaattgaaggacgtgccatgttactttatgatcttacctttgctctgtaaacaattgaacagcgtacatacttccttttttatttgtacattcacatattacatagtggacggcttgttttgcttgttcagggctagtatatctgcacaattttgccgggcgttgtatcatacacagagatattaaatcgagcaacatacttctggatcacagcatgtgtggcaaggtagccgactttgggttttccaagtatgcaccacaggaaggtgacagcaatccatcaatggaagtgaggggaactgctggatatttggaccctgagtaagttctctcatctctatcactttggaaacactggaggagggtcgaaagattaagttgaaaataatggaatagcggtgattcaaacatatagaacaatatattgtttggtgagaaagttgagtgaaattaaaatgttttctattaacgtgaacatagcattatgctgggagtaagttgtcctttgtaccacaatattatgtgttactagttgatatgctagatcacctgtatcaaatccttcacatttttgttcatcatgttttggtgttgtttttgttttcttctagatactattccactcaggtgttatcaaccagaagcga

SEQ ID NO: 1257 - DNA, 888 bp, Zea mays
tcgagtttgtacagaaagcaattgtaagtgattgtttacttttattccttctctacataaagtatacatgaataataccatgtaagaaacatttgctactgtcattttgctaggatgatatggaaggcatcatgagtgaaccagtacaagatggacatgaaccaaagttagcaaatgaagctgtttctcaggttgtcaaaatcaactacttttcttcgtgttgcaggtgtttgttcggcctccaagagtacctctagaggcacaatatcgtcacaggtacaagtgttttacataccaattatgttcccttctttctttggataagttgtacttgcaacatgtaccttgagaaagcatctagaaaaaaaattaaaatgtatggaaacaatgtgtggtatattttgatgcaattgaaaaaacattgtgcttcaccttttgcccatgctcttgtcatgtacgcatccaacaacactcccttgtccttggctctatctatgcatccacctttcactcttcttttcatccttgtaatagaaaacagtaggaggtagcagacaaagaaatggaaaagtaattagcagtcgtttaacttgttcgatgctttgtgttttgcttggttcttgttactgcccatatatatagacgacttgatgctttagtgtctaattacatattaatatattatttattaattatgttcttgttcttgcttgtatgtgtgtgcatgatatgaagtaataggttatgtttatttataggtccaagatctttagattaccttgagaatgagaagcaataaacggcagaacttcgacaagagttggataacatgaagatggaatcagaaactttggtaaaacattctgaggaaatagaggattaaagaag

SEQ ID NO: 1258 - DNA, 783 bp, Zea mays
cgctcagcgcgggcgcgacgtgtccaaactcaaccacgcgctcaaggcacacgccgatcccgcccagcgcgccactcttctcgaagcccgaaagtacgtttccttctccagtctttcgcccagcaatgggggaaaaggagttgtggttttgtaacttttgtttgctctggatttctttttcttgggcctgggtctgtggggaggagacaagttgctgcagtaatgcaaatatatatcatgtgtgttcatcgttcggttcatttgcttgatccaggaagatgattgaggcaatctacgagtaccaaggcgaggatccgctccaaccgtggctggagtaagtttttctcatagcccctttaactcgcctttttcgatttcttggttcgtgccaggactggtagctgttctagcagatagattgttcatttcttctctgattcgtccgcgtgcagctgcatcaagtgggtgcaggagtattttccgaccggcggcgagtgctcagggttggtggtgttgtacgagcagtgcgtgcggaccttattggacgacgagcgctacaaggacgacctccgcttcctcaaagtgtggctggaatacgtgagtgatgctttgccagcttgattgtttttctctgtagtttgtgtcagtgcagtggaggcacctcatatatcattccgctgccgatcttgtcctttttgcaggcggggaactgtgctgatgctgaggtaatatacaggttcctggaggccaaccagattgggcagggccatgcgatctactact

SEQ ID NO: 1259 - DNA, 690 bp, Zea mays
  misc_feature (383)..(384): n is a, c, g, or t
  misc_feature (540)..(540): n is a, c, g, or t
  misc_feature (542)..(544): n is a, c, g, or t
  misc_feature (569)..(575): n is a, c, g, or t
  misc_feature (586)..(591): n is a, c, g, or t
  misc_feature (598)..(633): n is a, c, g, or t
  misc_feature (638)..(648): n is a, c, g, or t
  misc_feature (653)..(686): n is a, c, g, or t
ggccactgcattcaatagccactcaaaggccagaaagaaaaatgctgccaaaaactcatgccacacaaggtccgtcacggagcagatacttcaaacgaaatttcttggtaagttcaagcgcaagagaggtagaagaaacaggcctagctataagcatgataattccagtgagcacggggaagcagaatacaagttatctgatagatctgaatctgacggaaatggctgcttgctgctacttcaggcacttgaacaggatctttcacctccaaagttgtccgctgaacatgatggggaggccttaactgacctgaaggaagatttcgaaatgagcgggggggatgctgagttaagtcggtgtactgctttctcggaactggtanntgtacttgagatatattttgatgcaattgaaaaaacattgtgcttcaccttttgcccatgctcttgtcatgtacgcatccaacaacactcccttgtccttggctctatctatgcatccacctttcactcttcttttcatccttgtaatagaaaacngnnngaggtagcagacaaagaaatggaannnnnnntagcagtcgtnnnnnntgttcgnnnnnnnnnnnnnnnnnnnnnnnnnnnnnnnnnnnncccannnnnnnnnnngactnnnnnnnnnnnnnnnnnnnnnnnnnnnnnnnnnnttat

SEQ ID NO: 1260 - DNA, 376 bp, Zea mays
gcatgcaaggcccgacgtcggatcggagtcgggcatgcatgatgcgtcccaggaaaaacaagcgaacctggcaaaaagcgtcgtacgttttggtggtggttggtggtgcggatgatggcgcggtttgaacggtggcgcgtgcctgcctgcctgcctgcagtgtgccccgcgtgccgcgtgcgtggctgtgcctgtgttcgctggcccccgtcttttggattgtatatctgccaccactaatattgtgtgggctcacgttggtggagctgactgtgcttatgggctttatttgtgtgggctgtcgctggtatgcgctgggcctgtttacatatgtgtgctgggccttcagttgcggtatgcatgggcttcacttaat

SEQ ID NO: 1261 - DNA, 762 bp, Zea mays
agactcgagcgcacacgattaacccaggcattttttgtaatgttgatgcaagaacactgacttcattatcagaaagactttctagcattgatggtatggcttctagcaactggattttagtttttgtatttgtggaactttgttcaacacagtcgttgaagttaacagtagcaaatacaggtctattatcctgatgtttttattctgcacttgcaggcattagcacaaatcatatgaaggaagcagattcacaggcacctgtgaagctgaagctacagttatttccaataaatgaagctactcggaaggcattggagaaggtaaagcatggtttcttgctactagcaagctgcatatgaatcacaattttcctcagtcgctgtatttttaacttgtcagttattactggtgaattattgaccaagcactcgggttcttgttgttgaattcatgcatgttatagatgaatgatgatgaatagattacttgattagtgtccctttgcattttgctcaaacttttctttgtatctggtttgggtctgagttgttttgttctgttctccaatctttgagcaatttgaacattacatggtgctttttctcctcttatcaggatgaccataatcctcatctagagctcacattaagctctagaaagaaaatatcatctgtgctagaacatctaaaccgaaaatggggtaactcaaacatcgcatctggagagcttattctttttccatattgtgctaatcaagaggat

SEQ ID NO: 1262 - DNA, 344 bp, Zea mays
gacatctcgcgctggtcggtgaagacgcggacgcccacgcaggtggccagccacgcgcagaagtacttcatccgccaggccagcgccgccagccgcggcgacaccaagcgcaagagcatccacgacatcaccaccccgtgatggctcctgctcgtggaggacaaagctagcaccgagagatccagacctggctactgctgctacctgcattttatctttacctttgcgagacgggaacaaaaaaaaacaaacagccgtccctgtggttgtagaaatgtaggcaaagctaagttagcctggctggaatctggggtctggtataactgtattaagcggcactacaa

SEQ ID NO: 1263 - DNA, 868 bp, Zea mays
gttgttttgtttttctcagatctgttatctgcaacccttttccgctcaatagttttcttgcaacaggcatatgcgcacaagattctcacaggaaggcgctctctcttccatactattaaacagaaaaatggcctttctgggttcacgtcgcgttttgagagcgagtacgatccctttggtgctggacatggatgcaatagtctatccgctggccttggtactgcccttatttgttcattactgtcttgcatggcaaattgaactgttctctgcaactggaatggaattgaaatgatgctcggagttatttcttagtgatatttttcacctatatgattttttattacttcaataaagttggatttagtttccaaatccaattatttatgcggcgctaagagattttatttttaaggatagatcctaatctaaattgttctgctcagtactttcagtttctattctttattttcatatgaaattgcatggaatcctcacagtaaacgatgcttacagcccacagattaatcatcgcaaaactttacacatcatgataaaatccaagctctattcagtatttcttgaatcttgcttcttttatagccttgtaaagtttcatttcgtttctttagtttttgagttacttcttatcagggatggcggttgcaagggatataaatgggagaaaaaatcgaatagtgacagttataagtaattggacaaccatggctggccaggtgtacgaggcaatgggtcatgctggcttcctcgattccaacatggtggttattctaaatgatagctgtcataccttgcttcctaaagcagatggcggggcaaagatgtcagtcaatgccttttctagtgc

SEQ ID NO: 1264 - DNA, 368 bp, Zea mays
gcatccagcaagcgaagaagatgatgaagaagcagtaacagcggcagtaccactagaactagctagatctcctctcttactagctagaagcttgtacaaacagtgcaccacacagatgttgccgtaccctaacaaccctcaccatttcggcgtctcccaagaactcccacacccaaaccctacggccggcttccccatgcctccaccgggcgcgcatctggatcagcgctactacgtggaccatcacttctttcccggccacggtcactgcttcaactccgagactctggaggcggtgctgaggccggcgcgcgctgccccagagtgcgacgaggccctagtagtcacggcgccgcaggcgggtggaa

SEQ ID NO: 1265 - DNA, 265 bp, Zea mays
  misc_feature (258)..(258): n is a, c, g, or t
ctatttatgcaccactacataaattttaaatatttatgataacgaatctagtcaaaagataactactgctgaaagttttttcccttcatgtgatctcagtgagatcgggattaattgaagttttctgccttgagttaaatgttgacctgtgcatcagagaaggattgtccaaaacaccaaacatttgtaatttgtgtagtttcttggtagatatgctttctgcgaccttgtttacatgaggtaaagtgcaaactatgnctactgt

SEQ ID NO: 1266 - DNA, 694 bp, Zea mays
ctatttttttagggttggtcggatatgaaattaataatgtttgttgagcataactttatgtgatttttttacaagtttaagctcaatttcatattcctatatcccaaccaggacaccataattgcttagtactcttcactttatgctttataatatcccaggttctggagaaagttattcaactttatttagtgccagttgctgaatccttattctatataatgcatcctctcttggtagctgaactgggttttttttcaaatgaatcaggcaccacaaggcaaaagaagctcaggtgagaatgttgtgatggttgatccactggaagctaagcgcctagctgctaaacaaatgcaagaaattagggccaaagaaaagctgaaggtgcattgttgctgtattggagtgtatcattccttagactaaatcaaataatcaatcatatatactaatagatggaaccttggtaataaggaaaagcggaaaacttataccttttgtttgggccaattgttggtgctgaatcgttgtttcagaaaactggaaacagaactaggcttttccctgttcatgctgtcctgcaatatgagaacaagaaacaccattgtagtagtatttgtttggtcgtaatttttgtgttccggagctgaatcagaacggttcctaggtgtcaaatgcaccctaaattaaaaaa

SEQ ID NO: 1267 - DNA, 602 bp, Zea mays
  misc_feature (542)..(553): n is a, c, g, or t
  misc_feature (576)..(591): n is a, c, g, or t
gtagatgcggtcgaatatcttcattctggcaagagtgttggcaaggtataagttgtctgtctatctgtgacagcatgagaatctgtcccaatcttcgcaacttacaggttttcatcctgaactttttcaggtcgttgtgtgtattgatccatcatacggtcagatcgttgcaaaattataatccatggacatgatgcgcattgtcttccatggtcacgtaggttactgtcttatagttacacatatacctcaagaccgtattttcccagcgggtgacaaatgaataagggaacatgttggtgtatagtttagtttcatttttccaaagtgtaagatgcacaactatactgaagggcaagcatgggcatggaaatcgattaagtttctaatcccgtgcagtaggatatgcattcgagtggcctcgttccacgttgtatgtatacaccatgctcttgtcatgtacgcatccaacaacactcccttgtccttggctctatctatgcatccacctttcactcttcttttcatccttgtaatagaannnnnnnnnnnngtagcagacaaagaaatggaaannnnnnnnnnnnnnnnttaacttgttc

SEQ ID NO: 1268 - DNA, 409 bp, Zea mays
tgttgaaggggctgatctaggtattgtgggtgatgatacacaggtttccagtgatggacctttaagtcctgctcctggtgtagagacagtagttgtcttcccaaaaaatgctggcaaaagtgagtatactttcaagtagcatccattacttatcttatagtctaccatggcctctgtattgatcacttgcaataaactctaaactaaactgaaaattttcatcatttacaagtaaggactccatgaatatatccacagcatgtgattttcctttaattatatatagtctatctcatgattacagcaaccaataatgcctatatttttttaatcttgctgcagttgtactagcaggtgaagaaactgaattactagttggtctgcaaaatgacggtaaccattattttcc

SEQ ID NO: 1269 - DNA, 383 bp, Zea mays
accacaccatattcattgattttttttgacctagtgaatgcattctaggtatatcaagcagttaatgcaaatgcttatgatgagatgttagagttttagttaacgtaacaccaggggtgttacaattttcatatgagataaatttgcaaagtttcttttcacctgttgatttattgctctttgattctgtgtagttttttaagaaaaagtactgaagtagcatgtactctgctttcattcagttgttaatccgtctcatttagcctatataaacttaagtgaaaagcattaaaaactcccttttagtttagtttcctaattaattagctttcttttgcaactctagggttcagtaattggttcctgttcgtctacattccctg

SEQ ID NO: 1270 - DNA, 400 bp, Zea mays
caatttcagtctgttgatgaatgccgatatctgattaagttgcttttctacttgatttgatatatatgtttggttgcacctgaatacaatttggttttgctgttttgtgcataataagtttgttactttgttagatggataattttggtggcccggtcacttgcaatcagccggatcagtttctgtatttatcaattttcgatgtacatgtaatgctgattgtaaatgataatggtccatgattagctttgacaaatatgtcacgactttttgattgcttttctgaaggtttttatgggtacctctgttattatgtgaaaatgagcattccggtttgactagcaatcaagatgagtttagctaccttgagaaaactaccaacttcgtctggattgtgcta

SEQ ID NO: 1271 - DNA, 385 bp, Zea mays
tagccttaccgctcttgttggtccatcgtcttcaccgtctcgcgccactggataccgtgcacccgaggttattgatccccggagggtttcccagaaggcagacgtgtacagcttcggtgttctgttgcttgagctggtcacaggcaaggcccccagccaggccgctctcaacgacgagggcgtcaacctgcccagatgggtgcagtcagttagtcgctccgaatggggttcggaggtgttcgatattgagctcatgagacacgaggctgacgaggagccgatggctcagcttgtgctgcttgctctggactgcgtagcgcaagtcccagaggcccggccctcaatggggcatgttgttacgcggatagaggagatcaggaagtca

SEQ ID NO: 1272 - DNA, 308 bp, Zea mays
cgtcgccgggagcgtccatcatcaccacgaccaccaatctgacccaccagaacctatgcccatatccggtggccgctggtgacggccaacacgggcgtccagctgcccatccccgccgacgacgaacagctagcggtgtggccattggacggcaacggcgagcactacaataaaacgacagagttccgatggctctgttatgtctgatggcctcgtaggcagccgccagagataacattatatccgatggcccagagcaaccgtcggacataatatcctacgctcgacgactggcagaaggaccgtca

SEQ ID NO: 1273 - DNA, 431 bp, Zea mays
tgtggaagcattcactgtctcctgataaaggtgagcttcacatctttagaacagacacgttgaaggaaatgagtattcgagtaccaagaacgaaagaagagcttttggatataaatggcctctacaagtaatgcagctactctgccatttttgaatgaattatgtatgctgccatccttttgttttcaaaaacggcttggtcccggtttgttcctttctttgttttttctcgaacgtttcttgtcgcggtctcatggtggttgctataactcaacctccagttcatagcctccagttcatagtagggttgaacaaagtatgcttaaggggcaggttgactcttctcacttgaaacgaaatttgcaggggctatgttgtgtaatggtaatatagtgtcacatcaaaccattgtccctgactcagttcatgct

SEQ ID NO: 1274 - DNA, 881 bp, Zea mays
gcccccgatgcatggctcctcattctcctctcggaatcgctccctccctccgcgttcggcaccgtgcacccccctcgcctcgcatggccgccacgggggtcagccgaggctggcgggaatacacgggccgcgtctggcatgcggctgaggagctttgcctccgcatcctcacatcctctgccatcagcctcctcttcgcgttgctcctgcatccacctctgaatcgaaaggtgaggtaccctggctgatctcatccggaatagtctgattcttcacacgatctgggcgccgatctcacctccacgctgctcatttgatgtgatgccaagtaattggtccacgtgtaattcctgctattcaactttggttaagggaagggatactataaatcactagaatattatatgggcaaaaagttcatatttttgggtgactcctaaagtagcataagatggatgaccgacctgaaatctgtcgttggagctgtcttggtctctgattggcatggcaatacattatacaagggacatgacctgtacggaatatttgtgccctctttggtttgtgcgagagctatactatgcatatattattttcatgtgtcaatcctaatggtctatttgcatgatgttgatcagtttactatctaattatttgatccgttgtggctctgcctgatcgaaatttggtgattggttacaaaagtttgatcatttgttattcccatgcttttatgttttggttctatcaccaaaaaacgatttagttctaagttgaactattttagtaatagtaacaaactactgcagcctactttgtagtttcagatgtactgtatgatacagacttggaatttaaggtaaagccaatgtgtgttcttt

SEQ ID NO: 1275 - DNA, 489 bp, Zea mays
  misc_feature (446)..(449): n is a, c, g, or t
  misc_feature (456)..(458): n is a, c, g, or t
  misc_feature (475)..(479): n is a, c, g, or t
ccccccaacatacaagtactcgaacaattcggacaagtacgccggagacgacatgaaccagaaggagaagaggagaacccctgcatggtaatttttttttaatttttttgctgctgcagattttggcgcagactatctctgccggactttgactagaagccaagaagtaacctcagtgacctttggcacgcaggtgcgaccgtatcctatggtacggagcaggcctcggtcaactgtcatacgtacgaggtgagtctcgcttttcggaccatcgacctgtctacagcgtcttcagcgcggaagtggaatcgatcaatcatagccggatccagaagatgagctgctccagctctcagctggacatccaagaactgctgccttactcatatggatacaccgacatcaacccgtacggatacacggacctgaacttctactgaaacagnnnncaagtannnttgtcatttcttctttnnnnntgcttgcttg

SEQ ID NO: 1276 - DNA, 1013 bp, Zea mays
gcaggtgttcgtcggatatctcagcgtcgcgtccctcgtatgcatgttcgcgtcccccatgtcaatcgtcgtgagttcttattcttacactttgtggagtatatttcaggtgcctggtctttttagatgatttcagacaatccctactttgctgtttggcagaatctggtcatccggacgaagagcgtggaatacatgcccttctacttgtcattatccatgtttctgatgagtgcatccttcgtcatatacggagtgctgcttggtgatggcttcatatatgtacggttcacgtttcctatttgcttggattggaagagtgtctaactgcatgtctgttagctgtgctcatctaattagtttctctatatttagattccaaatggcattggaaccatattgggtatcgtacagttgctgctgtatgcctacatcagaaagggatcaagcgaggaagccaagctgcccttactaatcacacatacatgagcatgccaaaagggaaaaaaaacaaggttcgataacctgcccatttgttctcgctctctcatctctttctcttaactttataaccatttggtaacgttgtagcagctgcacattaaagcaacttcatctttacacgtcatagataagttcttcaattaaatactgcttacaaaaagtctgtatatatctaatgttcggataacctgcaagcaatcacatgttcattttgaaaatgtttgcttcaatagactttgccaaagacatactagaagcaacctcgtttttacacatatgggtggtcaataaagacgcaggtagcttttttttattgggtgtcactttcttgcaagatattgctgtcttttggtacggctcaaacgctttggttttcttggacgcaaggcactaaacatggtccccatccaacaaatattatattatattatattagtctgatttcagctggagaataatccatgttgctggatctgagctggcactaagtcaatctagtctctcctaat

SEQ ID NO: 1277 - DNA, 374 bp, Zea mays
tggtgttcttctgcttcctggtggagcagcggcggacggtgcggagcagcaagccggcggcggggatctgctcgcgctgcggcgggtgcgccagcgtggcggacatggagaccgccaccagggtctgctacctgctcaccgtgcaccgccgcacctggcgcgccatcatctgcaccttctgcggcgccatgctcaagtcctaccgccactacaggctctactgactctcggccgatcgatggagttgttcgagtcggtgggtggtggtggaacgcgcgccttcattcttcgcgggcctcgcggcttgctgtgaggtgtagtgatgagctacttacggtactagctagtgatctgttcttcctgatgagtcctca

SEQ ID NO: 1278 - DNA, 429 bp, Zea mays
gcgtcctcgtgctccttctcatcggcctcctcgtcggtccggacctcaagcgggtcgtccgacggcggtgtggggccgacgctgaggaggagcagcagcgcgagctcggaggtggagaaccccgtccaagggctcatcgcctactgcaagaggtcctagcagctggcctccgtccggaagagcgccagcgacgccggcttccacttcctgtcgtcgtccgcgtccaggatcgccgccgagtccgagtccgagtccgacggcctcgacgagctcaccgagatctgcagaggatgacgatacgatagtgctccacgaacgatgaatcccgatcattgtacaatgatgcaaatgcgttctggagattttgtgaaggaaaaaaactgaaacttgtggcgttgaccgcgcgccctgtgtcaagtgtcatgatga

SEQ ID NO: 1279 - DNA, 393 bp, Zea mays
gcggcggcggtggaggtggctgaccatagcgccttcgttggagcagttgttgggaaggaggtggaggtgcaggtgcaggtgcaggtgaaagaagaggaggagcaggaggaggaggaggaggaaggaaacgaggaggagctgcacacgagagtggaggacttcattgcgagggtcaagaggcaaaggaagctggagctcaagagcttcttcgatgttgatcgatgatgactatatgatatgtttggcaggtgcaaaattacagtaaggttgcgggcgccctaaaaaggatctgtaatggtttgtgctgctagctatccttttgattaattctgtcacttgtagttgtagtaggttaaaatgtcgaaggtaaaacgataaggagacgaacccatc

SEQ ID NO: 1280 - DNA, 367 bp, Zea mays
gcctccggctctgcccagttccggcgctgtcgttgtgcgcgtcctcctccacgatggccagcttatccggggcaccttcgtggccttcgatcgcgccatgagctctgtccttcgtgactacgtcgagctccacccctagaccgccggtcgtcacatggatggaccccttgtcttccctcgtgcagtgatcgtctccttggcaatcgagccctcattgtccccctcccctcctagtagccatgtcggagcacctcctctggctctttccacgcaccctgcgactttcctaagatctcccttcccattgattgggtggtcgattctggagcctccttccacactacttccaccactagctcattattcc

SEQ ID NO: 1281 - DNA, 253 bp, Zea mays
gccgccgccgtcgcgcaggccgccatgttcaagaaggccaactacgcctgcagctactagctaggcctcgcgcatcatcagcgtataacgtacgcacgcaatgttcgttatataattccatacgtatatgggtgtgcaaggtccagaccgaccagctgtatgtcttcatcgttgccttcgtttctgcgtcgtcctcccatgcatgtttatgcatgatgccgtgccgtctcgttgtcagctggttcagtagtga

SEQ ID NO: 1282 - DNA, 364 bp, Zea mays
gctcagttagcaaaggagaagatgaatggaaagttaatctgcggacgcccaatggtagttcaccttgctagtgagagaagttctctaggctcttcaagttcacatagagcagtcaaagacaagaaattggcaggtggttcaggtgccaaatcacaatatactgatacagctgcaaagatagctgctataaaaaataagttgaaatctctggaggatgggggatgtagcacaaaaaaaccaagacttaatccagacaacttgacagaaatcagggaacagtctcataagaagttttgaagcgaggattttttttcgttctctggaacattgagtgcttttgccctctcatactggtgacacttct

SEQ ID NO: 1283 - DNA, 364 bp, Zea mays; identical to SEQ ID NO: 1282

SEQ ID NO: 1284 - DNA, 510 bp, Zea mays
atactcatgtgtcagttatctccgaacaaactggtttcattgtacgcaaggtatcacgatcacactaaccaatctgaaaaaactctcttgtttcctttttgaaccgagccagctccgagtccattgtgcggaggttctgggaacacccatcgttggggattacaagtatggacgccaagcacaccagaactggatgcctctccccatgccacaaacaatcgacaaggaaatgctgaagaagaggaagcttccctttggtcttactttgggcggtggaagcgtagctgagcagcagcctcagctgcatctacactgcaagcagatgatccttcctgacatctcagcagctatgcaacagctgcggtcttcagatgctgaccacgatttctctgatctggagaagctgagctttgtcgcgccattgccattgcacatgcagttaagctggaagattttgttgtccgtaggcaagtagtgttgtcatttcttctttaggcatgcttgcttgct

SEQ ID NO: 1285 - DNA, 257 bp, Zea mays
gttacatgtaccatccgcatcatattgcttaggcatcaatctttgttgtaccatataaaaaataaactgctcatgagatagatgtctcattaaacacaaatcactagcaaaaacttgtgagttatcatttccaatgtttcataagtatatgccttgacacatgtcaatgacttattgctcgcctatagatttttttttgtacgccataggtctcaaattgggtcatataatgtatttatcaggatttgtgaaggttt

SEQ ID NO: 1286 - DNA, 257 bp, Zea mays; identical to SEQ ID NO: 1285

SEQ ID NO: 1287 - DNA, 389 bp, Zea mays
taaatgaggattttggataaagaaatgagtaaaaattatataagcacaaattcattcattgtattaagtctctgcagcaagttgctttgggattatttcccgcaacatcatttcaatattcgaagcagctaaaaactcattgttgcttatccccaaggttcctacctgtaccaatttggtacacaccagtgtggcgttatgtcagactgttcactgttggcctagggttgctagcatatgtgtgtatcagggtccatacatatatggtgaggttgagtgtggtttgtgtgagctatgtgcatctgccttatatctccaaaaaacgcaccaaaaaatcatcattgatcaacctagctatagctgggagactgggacctaatgttaagcat

SEQ ID NO: 1288 - DNA, 419 bp, Zea mays
cgtcagcttgcgccaatggcgactgcacttctctgttacctggtggctcctgctcaggtcttgcctggcctggcaatgtgtcatacgcgttcaacaactactaccagcagcatgatcagagtgaggatagttgctacttcaatggcctaggtttgataactactgtcgatccatctgtcgacaattgtttgtttcctctcacaattcacgtttctgccgccacttctttgcacctaacattgcccgtgtcgctgttattagttttgtggttttgcattgtctgtatatagtctgatgaggctatagattgagccttcaaaagtgtttcgttgggcctcttgttgaatgtactccaaagtctcggtgcaccatcagacgtattcctagaatggcacaatctggctatcagaactggtagg

SEQ ID NO: 1289 - DNA, 358 bp, Zea mays
cgcctctgagctcatcgccttcccccatagcccgaacgagatatttgcgtccgacccgcccatcgacgtggacgccatcatggagaacgagctacggaagaaggacggcggtgcggatgtggaacatctcagatctgtcactctatctccggcgacctgggtcgggcgaggcacttctttgatgtgatgcctgagtggaacttggtatcctggaacaaaatgttgggcgcgtatgcctgtggcaggatgctcaccgaggcgcgggacctgttcgacgcaatgcttgccaggaacagcgccaccttccgataattattagctcgcctcccctcccattttctcagtacaatctactcca

SEQ ID NO: 1290 - DNA, 509 bp, Zea mays
atgtcatgcacccttcctgtctcgttccctgccacggggccagcgcatgcatgatccagccatcaccatcagccgctcactcactcaccttgcgaggaacttgtgcagagtcgtcgtcgacccggaagagaaagccgcgtggcagcatgcgggagcgggaggaggggaagcggagacggtgggcgagtacgcagccgccgggagggacaaaggacacggcagacacggccatcgagcgcgcccaacggtgcctggagaggatccgcgccttcaagcagagcttgcttgccgcttggattcactgacgggatgcgggggtggagaaagaaacgagagcaggaggaaagaaaaactctggcgatggaaagggaaaccaaaaaataaaacaactttgatcgatcgagaacccagaaccccttttttttagtattggaaagtgagaatcataatgttcttggacaaaaagttggctcttcaagattacacagacctatgtaagtacagctgcc

SEQ ID NO: 1291 - DNA, 382 bp, Zea mays
acgtttgagatactgatcacagcactttgtttccacagcagagcagatgaagcggtcaagctctttgataagatgctgcaacttagatgctcccctgatagcagcttccatgctcaagtgatgcccctgttttgcaagttcagtaaagttaaggaggtgattacgttgcatcgaataatgaaagaaggcaacattcagttgagtctgcagttgtacagtgccttggttagatgtttatgtgagaatgaactactggatgacgctaccatagtgttcaaagagatggtagcatcaggtcatgctccaatggcaattacatatgtggacatgataaattgctactgtacaaaatccaagttccacaacgctatgatctttctag

SEQ ID NO: 1292 - DNA, 752 bp, Zea mays
ggatgattggagactttgcagatgacaggactctacgggcttcgattgcatcattcacagctgctgatggacttcagttcccaagggattcaggtttgatgaagtcatctagctactaatggttttttaacttcatagtaaccagctaacgtcagactgcttaactgacattttaccatcacatattcaatcgaggaagacttctatacgcgcactagcaatttcagtgactttgtaagtattttcgcctgtagcgacatcgtatgtttgtgttctagacgtcactagtcttatgagtgcatgttgctctgaaggcttggagtgagcagcctgaaggccaaatggcaggagcatcagaagcttttcagacacctggggtctgcattttctttgttccactttatgcatttggaaaaaaaattgtattccattgcatttctatagcatcatgtttcccaagtaaatgcctgctcctggattgcgtataaacatactccttcaacaggctgtgagtaaccggctatcctgtggcatgacacccaaaactgtgaggctacccaagaatggtgagatgctcctatctgtgcatggttcacctcttggggtctataaagaagaaaatttagcagccattgaaggtattgctcttgttctcttgctagtttccctggcagaagccccattaggtgttttcctgttaaccacttttcttattccagaatctggtaacggaagtgaagatgctccctgat

SEQ ID NO: 1293 - DNA, 434 bp, Zea mays
cgtcgaccgcgccaaccacttcgctgcgaggggtgccgaggccgcggtcgcggagacggagatccgacaggcggcgccggagctcctcctcgtagctggcctcccggaaggcgtccccaacgccgctgcgaaggcggcgtcccttttccaccgcaccggcctgttctggcttgacctcggccgcgccgacctcgcttccgcctgcttcgagaaggccacgccgctggtctgcgccgctgacacggaggaggatcgggacatcctgttggacctcaacctcgcgcgtgcccgcgcggcgtcgagcgaggggaaacaagccctcgccgtcgcgttgctaagccggtccaagcccctcgccgcggcgtcttccgtgggggtgaaagccctcgccgaggggtaccttctcctcggcaaggctgctctcgccactaaat

SEQ ID NO: 1294 - DNA, 350 bp, Zea mays
tatataagacggggtgctttgcattgcgtgcgtgcgtgttcatgggatcgtgttaagacggaggatgcactcatggtcccagagagagagagcgagagagagagaggcagcatatatgcatctttcatcgttaaaagaagctaggccatggacagacaccagcagcagcagcagccaggaaaaaggattaaaggtgtagcatcagcagcagctagctctagggtggtagtggtagtagtggtagagtgaggtgatcgttcgaaagccagctaaacacagatgcaatgtgtgtaatggatggagttgttgtgttagatcgagcgcgtttgcgtttaggatcggaccatctg

SEQ ID NO: 1295 - DNA, 234 bp, Zea mays
agttcagaaacgtgttatgctgcgctactgctgctagcagttatgatgtggatttggcatcatgacaaggatattacgtaaatatacttcggtccccttgaacgcaccacccatcgtgttaccatgaatcggtttgttcttaggagacctgatggttcatgttcagtaaatttgatttgatgatgaggcagggtttctctcacctgcacagacacaaagcttcaaatcgcaagt

SEQ ID NO: 1296 - DNA, 404 bp, Zea mays
gagctcgcgtgcaagtgctcagctgcggccattgcacagcgcgagccgcgagcggaagggacaaaagcgtcttgcccgactggcgcggccgagaggaccgttcacgcaagcacagggaggaagagcagcaaagcaagcgccacactcgccgcgcgcatcccgtgcagcgtgcgcagcagaagcacagcagcacgaccccggctaggcggctaccacgatgggtgggcaaactttactaagaaagtcgccacgggcattgacgcattgttaacggcagatagctacatggatttagttaagaaagcctataaattttagtgcgagttgaaaggcggttcctcgtgattttgccccatgattttcgatacgcattactagtatttctcatgtatacattaagtagc

SEQ ID NO: 1297 - DNA, 263 bp, Zea mays
catccccgcttcacctccagatgtccagttctccacccccacttcgcccaccgagtgccagtggagcgcttccttgacctcgccacctcctatcctccccctcccctaccggcgcccgttctttctttcccttgccggatgcccgccgccggagctgaagagagggaatgcagccgccacagcactacccaccaacgcctgaggcggggtcgcaggggccagggccggccccaccaccgtcgacgaggcgtccatggaactca

SEQ ID NO: 1298 - DNA, 466 bp, Zea mays
ggatgggccgcgccgcgccacagcaggtgtgttgcgcttcgtcagggcgttcgccctctgcgtggctacggcatgcctcctcctggcggccggcatgccctcgcctgtggcggcgcaggacccgtcgaagctgagcctgcagtactactccaagacgtgccccaacgtggagcacgtcgtccggacggagatggagtgcgcggtgcgcgccgacacgcgcaacgccgcgctcatgctccgcctccatttccatgactgcttcgtgcaggtgatcagtcggtccctcctatatatatcagctaatgcagcagcagcagctagctgatgtcatcgtcctaatttgcagggctgcgacgggtcggtgctgctcgacgacacggcaaccatgatcggagagaagcaggcggagcagaacgtcaactcgctgaaagggttcgatctggttgacaagatcaaggagaagctg

SEQ ID NO: 1299 - DNA, 908 bp, Zea mays
  misc_feature (573)..(576): n is a, c, g, or t
  misc_feature (579)..(579): n is a, c, g, or t
  misc_feature (662)..(905): n is a, c, g, or t
gagtgactccgccgcgggccgccatcttcgtcggtgatcttttctcctgtgagtttgtcatttacttctttctcctctcctctcccatgtctatgtcctacggtttcgatttcttgctgtagtgtcctgccgaggcgtgccggatggcgttcagccgggcagaggtgaacgctggcgaggtcgcggcgctcacctgcagcactcagagttgcttagccgcggcgcgcgcacgtggttttgcggctgggcgtagtgagtggtgaaggcgcggctggccactcacctttcgaaaccccaaatcctcccagacccaaaacgattcagagatggttcagagagttcagagcacctgaatgatttagctttgcagtatcttttttgagatctttaattaaagatggcatctctctgaattgaacaactgtctttaggatggagggagtactacaaaaccacaacatcttgtttgtagacaaggagtgcgatgcatttatattaggaagaaaatggaagaatactagaggcaaggcaccaagttggccagattacccaggtcgatacaaattaaaaagnnnnccntgcaggtcatagtaacgaagaaggaatagtatagtaaaatggatgtaaagaatatcctctccccctgccctgactgctattgnnnnnnnnnnnnnnnnnnnnnnnnnnnnnnnnnnnnnnnnnnnnnnnnnnnnnnnnnnnnnnnnnnnnnnnnnnnnnnnnnnnnnnnnnnnnnnnnnnnnnnnnnnnnnnnnnnnnnnnnnnnnnnnnnnnnnnnnnnnnnnnnnnnnnnnnnnnnnnnnnnnnnnnnnnnnnnnnnnnnnnnnnnnnnnnnnnnnnnnnnnnnnnnnnnnnnnnnnnnnnnnnnnnnnnnnnnnnnnnnnnnnttt

SEQ ID NO: 1300 - DNA, 345 bp, Zea mays
  misc_feature (334)..(334): n is a, c, g, or t
atttcaccatctcatctgcatagttccctttgtttttattctgttattcacatggtttttctagtgatgttattatcaaagcagttgacgatgcttacctgtttttccatgctaacgtggcttcgatattatcatgtttttttgagccctttgagaattgtagcccaccagcatgcctctctctctctctctctctctctctctccaaagtcgtgcgtggagattcaaaccggtagtctagtggttgccgtcaaaagcagccagatttgtgaaatcgtcatgtgtgttgctctctagtttaccgatctgtgggcttgtaaagaacactgtaggnatgcatgaaaa

SEQ ID NO: 1301 - DNA, 367 bp, Zea mays
cagtgacacccaggacagggtcgtggggtgttcatccttgattgccactgctagctactgatgagagggcgtcaatcacacaataaatgtgttcttttcaaggtctctaggagactaattaaaaaaatataagaagcgagtttttcgcgaagaattgtctctacacgactctctatatatattattttctgcatctaggtttagagtctctgagttgaatcatatagttttttaactgtatcttatacttaaaaaatcagggttgtacataccatccctgtgtctggatgatccaaacacgccgtccaacgaagaatgcccgtggtgcacaaccgtgaatgaaggtcaagattcaagaaccagaagg

SEQ ID NO: 1302 - DNA, 462 bp, Zea mays
tggcaactccacacccagcaaaaggcaagacccctgcaaacaatgacaaatcaacggagaagtctccaaaatctggtgggtcagtcccttgcaaatcatgcagcaagtaagtaggcactgatttatttggtgagcctatttggttatctggtgaaaaatcgatcaatgtattgatccttggtctctgtttgctgtctgtccaggacattcaatagtgagatggctctgcaggctcactccaaggcgaagcatggggccaaatgagttgcaggtccaactgagtccatgaaggagaagcatggtggccaagtgagtcgaaggtccattcgagtccatgaaggtgaagcatgggagatccaagcgagtctggaaagattgtcgatgttagtaggctgtccttattttgtttagagacttgtggctatgtgattgatgtagcgaaacaaggctgtgatgtgttaa

SEQ ID NO: 1303 - DNA, 526 bp, Zea mays
  misc_feature (509)..(517): n is a, c, g, or t
tgcgtttgctccgccggcgctccactcgcctcccccgcgtctccggccgcgtttgcttcgcggcgctctaaggttccaggcaagcacacttcctccccagctctcctccacccccacacttctagttcccattgctagggttcgtcgtgctagggtttagggcttgcgaccgcctgcccaataagtctgcggcctcctccgtcctgcagaacccgccgtcgcggcggtgtcctcgcgccatgcccttcttcctggaccagcgccgcgacccgcgcctgttgtcggtgccaccgccgcagtcccactcccgctgcagcaactggtgcagcgcgctgccgttgtcgctcgagctcagctgccccaggaagtgctcgcagctgctccccgctgctccccatcgatccactcccgctaccgccgcgaggtgcgtgtgcgcgtggcttggtgcgtgcgcgctctgtggtggtgtcgagagctgggcttggctttggtgcacatcaaatgtgttnnnnnnnnncatttgaag

SEQ ID NO: 1304 - DNA, 447 bp, Zea mays
accacaataaacttgtatgtattcactgctggtggggagcagcttagcaaacatttgactgtatgtcaagctatccaacgtcgtcgacttatgcttgacgaggatgatgaagaagtgtttaatggatcttgtatacaaaacgatggaaaccactactgggatgatgttttcacaataacgtaccagaaggctgataaccaagggacttgcacctcattgaacataaaatcagattcttacaggtctatctctgaagcacaaggggtttctcttcttgatagcatcttgtgtgaaatccgaagtgtttgtcaatagcaattgtgtgaaatgcgggttccttgctcttgtttgtagattcagtcagaattgtcccctgagcagcagcatgcgtttctgccagtttgtaaccggggtttccacttggtggattggctgcccttagtccca

SEQ ID NO: 1305 - DNA, 325 bp, Zea mays
acttcccaaagcctctccaaacatggtgcgtcgccgcaacccatcggtgattgagttcagcagcgactttgacgagattcaggaggaatcaccggttccctctcctccgcctcgttgttccctctctaagagaggacgcggctctggtaggatggaaggagagggatctttgatgccctcgcagcctgctcataggaggcgccaaaaggttggcgccaatcgtcctcgtcgcagcacctcctcctttggatacgctccttgccaggaggaggatggagcattcgacgacgtcgtcgatcttccgtcgtctgacgccctctacatc

SEQ ID NO: 1306 - DNA, 330 bp, Zea mays
ttccggttgggaatccgatactgtagtcttcaactaatagttagggtgcaactaatagttagttgaactattagtttggggtgtttgaatgtcttcaactaaaaacagcaaatagttaaactattagttggattgtttggatgtcaccatgtaattttaggagctaactattaattaactctagtgcattcaaatagggccatagtaggtaaatgtaagagcaaatagcacacgctttagtaatataataaattttacaataatatacggacaatggttacaaccttttagtaatatccccgattaggattctttcaatatgtaccttgc

SEQ ID NO: 1307 - DNA, 396 bp, Zea mays
ttccaagcagctaggacgaacctctgtgttgggatggtcggatgaggaggaggccattccgtcggtgtttgttctgataagttcaatacttggatggttaggatgaacctcggctgcatgtctataagctgcttccactttctgcacctcacacatgctggcacccgaacagtcgtaggaaataacggctttctgaagatgtcgatacaaccgtagctggctgatgaagaaagcgtcaggtttatccttcagctggagcacgccgccttctagttgaatgtgctgctgaagctgagaagtacacaaacatagaggtgagatagtagtacccatgaacatatatataattaacacagcgtattttctttagcagactcaaagagaacagactcacca

SEQ ID NO: 1308 - DNA, 671 bp, Zea mays
tttgttagtatttactctcctccctcccttcccacaactatgcttttcagtttttaatcaaacaggaaagtgatgctcagaacaagcccgggaaactctacacacaactggtgtcagctcagctcaagatccaagacatcaaatcacaaagatcagcgcttcttttagaaatcagcagagtatatcaattaggacctaagcttctttattattatatgtacctagtgagactaacagacatgaatatacttttgcagatcaagcagattctggagcaagagaaaaacataattcctggttttcccgtaatttcattgctcatgtttaaacattgatcatgttaaattcttcctatatgcattgtcatctggtccttgcaggctgcactacagcagatggatatgaagtcattggaggaggaatacaaagctctgcaaggtgataaatcgggggaagttgagtacttccagtctcttgatgaaacaattaatgggatgaaggtactttgctcgtgctgttcagtttggatgccacatcatgactataccattaggaattattcattttgcttttctcatggccatacttcgtgcaactcttagcaattttaacatgtgaacttcaattcctccattcaggggattttggatcctgtcaaatgccaatgtgga

SEQ ID NO: 1309 - DNA, 515 bp, Zea mays
cagcagcaccagccgcgccctcttcctcctgcggcaggtcggcgacccatgcccctgctcttctcatggccgcctctcctccatcccctatccatcttctcccatggtgagctcgccctagccctgcatttttttattttattttcctacagcacgccacctccatccctcttccatggatgacgattttctttcctgcagcaagaagccatggcaccccttctccccttgttttccatggaaaacccaagaacctactcctccccatggctgtgtctcctgtaggttttcgtacaatcgcagcagcagcagatatggaatcacctctatgtcgtgcccacggcatgctcgatgaaatgtcgcagccagttacacctagatctatgcagccccatcccacgatgtcgtcgacccttggtgagatcccacaatgtttctcaacttgtttcctcacccgacggcgttccttgctaataatcagtgtatatgtgtggatattgtgaggagagatctga

SEQ ID NO: 1310 - DNA, 819 bp, Zea mays
ttctactactatcatgctggcatggcggggacacggtgccgtggttggcacacatccgagaacgtgatccttatagtttatgttttagtacaagctgtgtaaagtggacctgtgcttgcgacttattttcacaagatcttattaaagaattatcatgctgtcttgggttggaaatatatcataaaaaaggcagcctgccaatcctttgttttttatatatactacaaacattacgcagggtatgcttctgttactgatttattcatcttcctgtagggtgctgagttcgagcttgataccatcaaaaaattgtcaaaggagtatgcagaagcaaaggaactggcccttgcaggtgcctgtccattgccattgtgggatatgtgcattttccttctcctttacgtaagactccggacacaacgccattcctaatccaactgctatctgtttgcccctatcacctggacagaggcaagccaaactgtcgaagttgaagatgctaagcacctccttcagagtgagaggctgttgggcgacaagatagatgaagtcgtcaaagaatgggatgtccagaaggaggggttctacgagagaactggattatcctcatcccctggtgaccagctcatggcagtcgacaacgatgaatcaggagctcgagctcaatgtcacaaggatggatcctgtggcgatcagctcatggcggtcgacaatgatgaatcgggagtacaggatcacgaggacctcgacgacgacgacgatggctttgccgagttagaactgctgctagagtgaagaacatatacaagtctgtaaact

SEQ ID NO: 1311 - DNA, 407 bp, Zea mays
gtatgctaaggctccgctggaggccaaagcccacgcaccaagggccaaggttctgagagatgggaagtggagagatgtacatgcagcaaatctggtcccaggggatatcatatttctcaaagttggggacattgtcccagccaatgctcgcatactccgatttcagaaaatcgacacaatgacttgctgggccaaaaggtctgttgattgtgcgcatggcttcctcctatactatgcttggactgtttcctgtggccaaggaactgccgttgtcattgcaactggacgtggcattcccagaagtacattgcggctctacccacaacgttatgctcgacctgggcagcttaaagaaggagccatgcttactggctgcttctgtgcttccctggtacttgttggtactt

SEQ ID NO: 1312 - DNA, 377 bp, Zea mays
acgtttactgatagccaaagtaacgtttctcttttaacaaacagcttgagaatctaagaaattagctaaatcttgcaggttcttcatcatcacaggagtaatactgcttgttagttcaacccgattgattgcgcgtctacctaggcctgttcagaagtttttgaagagcaacatagagcgcacccacagcatcaggaggcctggttcagcacgagggaaggatcccatcccaacaacaacgatccatacgtcgtcactgcacttgcttgcttctccaacaaaggagaaggcctagaaaaatgttggcactagagcaacttcgtttcggcgcctcacgtttgccatgtcattgattgattgaatggttccgtgaacgt

SEQ ID NO: 1313 - DNA, 607 bp, Zea mays
  misc_feature (562)..(571): n is a, c, g, or t
tggtttggtgtttcagccacagcgagcacagcgctgaaggccgtcaggctgatcgaacgtgtgtggtcgggcggtcgtcctaatactgtgtgtgtgacgctggctggactggacagcttcctggtgacgatcatggggctggtcatcccctggagctgcacgctggccatgatcgacgtgtactccgtgttcgtgggttgccctctgcgcgtgccgggcgtcatggtcatcgtcgtggtaggagactgcgtacgtatctctctacagtcttcttctgcgtcccggcgcgccaattcaaaaccaaaaaagagttcaaacctgaaatctctcaggccctgtcgatagtctcgttcgccgccgcctgctcgagcgccgcggtgatcgacctcctcctccagctccatggatcccacagctccccgacgttctgcgggaggtaccagctgtctgccatgatggcgttcttgtcctggctcctcatggccgcctctgccaccttcaacctctggttcgtcgcctcacggtggtaaagctgcagcaggccactcttttttgttttgtnnnnnnnnnngcgcacataatttggctttggagagcgtatgctact

SEQ ID NO: 1314 - DNA, 659 bp, Zea mays
acttcacctgtcagtaagcactgcatcatcactgccactgctcaagctttagcttcacttccccctgtatctgcaaggctatatctgaggccttcatcttccatcatcacctgcagatattgttcttgtggtgacgacttgacaattgaccatgttattccgatctcgcgtggcggtaaatgggaatgggagaatttggtaggcggtcctagtgctcctattctaatctactcgttttttttccccaagtttgttaggcatgtccatcttttagttttaactgaatctgtgcaggtgactgcctgtgcaagatgcaactccaggaaggggcagaagacactggagcaggcaaacatgaagctgcgcaagatccccagggtatgtcatgtggcatctctgccttcctcactggatcctgattgattgtttgctcttgctgcaacaaggttgcctgtgattgcggctgttgctgactgcatcgcactgcaggcgcccaaggagtacgatatcatggctgtgcccttgacaaaatctgcgttcagaacgctcaagaggaaccatggcctccctgaagtgtggctgcagtaccttgccaggccatctccatgaccaagacccccctcctcgccatcgccatacgggccagcaacagcaagcaa

SEQ ID NO: 1315 - DNA, 425 bp, Zea mays
gccaggacaccggtggcggcggccgccgctccctatgggcgaacgggagcatagcgaccgagggcggccacttacccaccgacggtgagcacgacgacgaggaccctacggtggcggcggcgaggcggcaggaggaggaccgcaagttctgggaggcgtgcctggcgtcgggttacccatgaacccttcagggcgtgcaggccgacaggcagcagggcatgcacatgcgcgacgcgcgcgctcgtgcttcttcttgattagtggttttgtttgtttgatcgatgccgacggcgacaagaaggagaaggctgttgttaggatgaagttaaaagttagtgcatgttatgtatggcgtgtaaattgcaatcatgaaacaaagatggatggccaaacagctgcgctactggtagattgtcacattgctt

SEQ ID NO: 1316 - DNA, 370 bp, Zea mays
atggaaacttaaggcccctttgaaaatcaaaatcttcttatggtttttgcggcatagagtaatcctcacaaaagaaaatttagctattcaaaactggaaagaaagcttagactgtgtcttttgtcataagtaggaaactattaatcatctgttttttgaatgtcgcttggcccggtcggactagggaattttgcagttggttacaggtttttgtcaaccaaaaaatgtggatcatttatttgggtcttgggctcacaacttcaataaaatggcagatctttgtttttacttggagcagcggtcttgtgttggcctctgtggctctgtaggaacgacttagtttttaagaaaaaaactcttttgctctcct

SEQ ID NO: 1317 - DNA, 390 bp, Zea mays
aatagaagtcttgtggaaaattatatggaggagccctgcaaattgacgcatttacatgacaatctcgatgcatgctacacgtctctgcgtactaatgtgaaactagatcaaaatcttggcacgtttaggagccagtgtccctgcccaggccatcgataggtcgactccatgttgtatattggctagctctgtagcttggctcactggctcttaaacgtgggaaggcttgatctagtttgagattggtgcacaagggcatgtggcatggatcaagatcgtactataaacgcgtcggtttgcaggacatagattttattttctaagtcttgggtgatttgatcatgggcaccgggtaccggatccgtggactgatgtacagtgggtctattg

SEQ ID NO: 1318 - DNA, 365 bp, Zea mays
agggccggcggtcaagcttgcctggacccgcaccgcgcttgcgcctcgtgttagttagggcgtcgcgtcgcccccatgctaaggagcgccggctcacggagggcatcatcggcgtccagcaaaatgccttctacatgcaacatcctcatgtttgaatctgaacaagcgaatccaatcaggttctacagtcgtcgtccccttcgatgtcggcgcagcagccgccgaaggggagcagcatggacccgcccacacgtaagcgcccttagaagcaaatcctggagtgctacagccccagccaagcgttgaaggtccctctcattagctacttcttgcagtactaccaggatgcttgattgtgcactgtt

SEQ ID NO: 1319 - DNA, 337 bp, Zea mays
gtggcggcagctgcaagcctgcgcaggcgtaggaccacaagcggtgctgctgctggcggaggtggtgccagctcgatgctccagttttacaccgatgaggctgcgggccgcaaaatgtcaccaaacaccgttctgatcatgagcattgggttcatcgctgttgtcgctatgctccatgtttttgggaagctgtaccgcacctccaactaggttggtactaccataaccaagaaaacagaggccaccaagagaggagccttatagagccatttcaatggatagcaagtgactatcagagaggaaccttgtagagcgatttcaatggatagcaagtgac

SEQ ID NO: 1320 - DNA, 377 bp, Zea mays
tgcgcgagaggcggacgaagcgctcagcccggaatcacggccgtcgagcagcaagcgccatcgctccggcaccgcctcgccgtcgtccaggagcagcccctaccgcaacatcctgcaggtgttccagcagtgcaggcaggacgtcgtcggggagactcccaccaagaactactgaagcctacgagcgcgacagagcagggtcaggccgcgccgcgatatcacggcttttcgtcgcttgcttgctcgagaatataactcttgccattttgcccattcttctttatgtgactgaaaagggatagggagttttttgttcttgtgtaaagatcaggatataaaagttacaggaccttagtaaagaacgccatagaaatgca

SEQ ID NO: 1321 - DNA, 407 bp, Zea mays
gtcgcgccgcgtgagctcccgcacgcagacgccacgcctatccctgtgtcctcggcgcccggcctcctcgcctccgcaccacctcgcgtcagtggagcctgcagccttccactatcgcggctgtttctcgtttcccccactctgctctaaagaacgctgacgccattgatggcgtcaatggcgctgtctgctctcttcttctccctccgacccctctgctatcttcccctctataaattgaagccccgcgcatctgtgattcgttacccggccacgccgaccttccacgtgcctccagctctctgtacgcgaagctgtcgtgccgaccatcgccgttcgccgccggcaaggacgctccaaagcccgacgttgtgcttccgtcgaccttcctctgtaacgtcctctgt

SEQ ID NO: 1322 - DNA, 728 bp, Zea mays
gtttatgtacttcctctgtttttacatgttatattaattttgtcctaagtcaaacattactatctttgaccatccattaaaaaaaatcttatattttcatagcatacaaattatagattatgaaagcatttctcatgtagtgaatctaaaaacgtaaatcttatcatgaacttacatttttcttaaaaaaaattgatggtcgaagatacacatgtttgacttaggactaatatgacatgtaaataaaaacagggtatgatggatttctagcttcacaaacgatactgatatgtcaatattatctatgctgtgcagttttctatggtctatgtgaaacccttttcgagcttgacctgggacttgtttgctcctcatcatgcaatattggaaagatgaaaattggaactcttcagtgttactacctactatcttcttgaacaatctgaaaaaggaccagtgctccccctgtcagggacggatctagcggtggggtgggcggggctcgagtctccctaccgtttcggatcccatgaagccccactacagtctcctctaatctaaaatgtatacaatataatgtagaatgagcttttatactgcagcaatttagttcagtccctcctaaacttttttctggctctgtccctgcccctgttctattttgatttgtgatgtagtgagagacatattttttatttttgtgaaatgtatatttcaccgcttgtagt

SEQ ID NO: 1323 - DNA, 698 bp, Zea mays
tactcactcagacaagcatcttctgcaacaggcaatttttctgtttcataatcaactgggtctgaaatgtctcataccaactaatggccgtgagaatgttatttaggcttatataagttatacagaagatgtttcgttatgataatgcacaaaagttatggtgtgcaatgaaaggtatatttgagagtaatagaaatagactcattgtgctgcatccttaactgtaagtttcttgtgtgcgactcatcgtaatcgcaggtgtttcctgtttccaatttgcaggtgcaaaatgtgttttccaccctggataggtactgtctttcacttattttcgtttgttccctgaactggcttttctttgtgcccccacccttttaattcatttttttataatatataacatactgttagggcaacccctcctgtttcctaaaaaaattattgacatctctaacatcaagattggagattgttcctgcgcttcctgaagtcttttttttgtcatgatttgcattttcatgagttttagtttcctcttaccgagcttcttatgttgtttctgtatgtgatagattgtagctactagctagcagcttcttaaggacccacactataagttttaatattcttggttttcttgttaacttcaggggtcgtggatttctaagtcttgaggaggtgtaccaggcattaatcaa

SEQ ID NO: 1324 - DNA, 213 bp, Zea mays
gattcaaaggcttgggtggcctaggtagagcatttacgtagactactggtatacaagaggagtcggttttcttgggtagacgtagtgattgctgagggttgaaaaaaaatggaagcgatgattcttttctcttatctaattatggggagaagctgactatcgtagagtgcaccaccaaaattattttttgtgaaactgcagaggtgacaaata

SEQ ID NO: 1325 - DNA, 585 bp, Zea mays
tgggtgggtgcttgcaccaccctctggggctagggctgacaatgggctataatttttgcactataagatttaaggatcgaagcgagttaggatcgggctttatttctagtcatttttgaactataatttatttagggccttgatattttgtgaagaactatttggatcacgatccattaccacctctatctggggccctctgtcgggttggggggactcgccctatgctggcggacgtttccacggcaccaccgggtggactgggtcacctactccgaccgaatcgctcgccagagaatcaaactcgccgcggttcgtcctacgcgcgtgggcagtgtcatccgtgtcgctagcgccggtgagtattcgatctttgtgtccgcctccgttttttctttgcgtagcacacttcagatggggaaaacaggggcaggagagttgttttcgtcgtctgctgttcgtcggtggggcgtcatgatcgtgggctcccctccaccatgtggcgccatcaggtaaggaagaagcacctaggagcattgattccacgaatggacgaccgagattgaagtagcgtactggttcatg

SEQ ID NO: 1326 - DNA, 570 bp, Zea mays
aaatattttgccatagacgaaaaatatgcaattagtttttgatctgttgcactcggagttagcgacaatctccgcggtcgtagagttggtgccccacaggtgctgtgctgcgatgtcgaaaccggcgtagaagggcacgaagacatcggcggcgtgggaggagtcgcccgtggggcagtcgtacttaggggtgacaatgggctctaaattttacactataacatttaaggatcagatcggattaggatcgagctctatttctattcatttttgaactaataattatttagagccctgccattttgtgaagaaacatttggattacgatccattaccatccctagtcgtactactgcctcatccggctgtggaagatgacgtcgaggccgaagtgctccgtggcgtaccacccctcgtcagctgtgaggagcagcagagcagctcccattgacagcaaggggtcggctgcccactgcggcactgcctcccagggtctgctgtaaatgtgtaaataaatataaaatatccccaactccatcccatggctgctcagtccaacagagagaacgt

SEQ ID NO: 1327 - DNA, 357 bp, Zea mays
agctgtcggtgcctgcctgcctgtatgactcgccgtcctcaaaaaggccctcacggggcacgggttggtgcaacgtatgcgctatgtgcaaagctagaagacatcttttgctgaccgtgatccaaagcaaagagcggcactgaccaccaaaggcaaggaaagggggggagatgggctggagcctggagtccaacaaagtgctgtgtgcctgacgtggatgagctcaaactctgagccacaccaattgcgcgggcgggcgcctttcatcatctcacgctgctttgctttctctcaaatcccgctgcatgtgccaccacactagcgtacatacgtatgtatgcttgtgtaatcgctttg

SEQ ID NO: 1328 - DNA, 507 bp, Zea mays
gggcgatatactcacatgtcagagctaaccccaccccccctggtgggtgtctgcagcagcaaggcgtgagcagcaacagcccgacgacggtgcccgcagccgagcccctcaagcccaagctgcaggtatacggagagagagagagagtgagggcaaataaaaaaattgcatcctctacaaacctttgctacgtacttgtgagtcgtggctggctctgatggttttttttttcccgtctttgatgaaatgaaatgaagcggacggcgtaccaccagcttccccctcgacggcccgcgtacacgtcatcggagtagctcggcgagcggggagtcgctgcagtgcagcaccgtaggaagccggaatccacgaaggtggcgccaattgggttgtacatgttgagaaacactgatgaaggattacgtggtaaatatcgaatatatttctaaaggatatcacgtctctatatatatatatatacatatacaaattaaatgtatcgtctcgtgt

SEQ ID NO: 1329 - DNA, 662 bp, Zea mays
gaggggaaagaggctggagccggctcaaatggactgcggaagcgattccgacggcgctcccgaggagctcaccgccgtccaggtacgtctagtcctctcccctccaggacccgaccctacgggaggtagattcaggattaggtacggttcgcctgtgtattccgcacaagcagacggtaggtggggtggacgcgcagatagccccgtaagaggattctacagctctgtgccgtcgatttggttgaccgagaactattttattttttggttggattagagctgttggcctttttagccttgccggtcatattgtttcttcttcacgcttcaagctctatgttgagatatgcaaaaggtactgagccttgttatcgtcttttagggtgttgagaagcacgaagagatcagtcaagttgagaaggatagtgccatcaggtgtgtttcttatgcatactttacagctgagctgactggatggacctgggccctctgctgcccaatgtgctacgttgaactgttcttgtttctgtagaatgcacgtgagtagtagttgccaattgatgcttgctatggagactagttttgtcttgtggactatgctagatttctcttgctcggtgctgtgtctacacttattcattctcttggtttcagtagatgca

SEQ ID NO: 1330 - DNA, 163 bp, Zea mays
tcatgaagaatgagtactttaacactgaaattgtactggaagactagagttatgttatttacctagaatggctagctaccactgttgaggaataccttgatgcaataatgtggcatcctttttcaacgttttccacattaattgattgtttacttgactcaat

SEQ ID NO: 1331 - DNA, 1099 bp, Zea mays
  misc_feature (949)..(953): n is a, c, g, or t
  misc_feature (1009)..(1012): n is a, c, g, or t
  misc_feature (1046)..(1058): n is a, c, g, or t
gctgctttggccagcgacgccttcttcccgttcggtaagagggaaaaaaaggggaacctggaagtttcagtgcttgcttagagatttgagtcaaagcattcattgatcttagtcgattcttagggcttgtttgatggagcagagctccatgattctctagacccgaaatagattttctgatagagtaattctaagtgatactttatcggaagtgaatctatttggcgaaaaccgtttgacaaataggctgtgaagtgatttttgaggggttaaaagagtgtggtgtaggttgagagtgatgggaagcaggtttttttggctcccacttcctaatacaaagtagagactaaatttacttaactcccaccatgaaatagttcagatttttttcgtcggcagtagttctatttcagagaatgaaaggagctctgtcagatgcccctaactttctcgtgaactgtacgtggaagcacgcccgtagttgctggctgtgtgaatctgattctggatgcaacgaagaatagtaaaaatgcagcgtctgttatttattagcgtgttgctgaactggactggaatgatgcagcttggaacgacgcggtggaggaggcgtgccagcgcggcgtggcggtgatcgcagagcccggcggcagcatccgggaccaggacgccgtggagtgctgcaacaagtacggggtggccctcgtcttcaccggcgtccggcacttcaggcactgatcgacggcgacggtggcagcggagaccgtgacgacggacgatgggagggacctctatatagctgcgtcgatctggccggtggctggaaggaaggatctggcgtttcatcccagcgctgatgccggctggcgtttcttggctactagggagactctgatggtgctggatactcagtggcaaagagtagagaaagatacaaatggcagaactgttnnnnntattgcaggaactatagtttatatacaagaatataagtgatttttaataatgtgtnnnntggaaataactgttagtagttgatcacatgagannnnnnnnnnnnnccaaatgtcgcctctcgagaggatgggtcggtgggtcccgg

SEQ ID NO: 1332 - DNA, 726 bp, Zea mays
tcatcttctactgaaaaaaccaggagaagtggccatcgcatggcatgacacacaactttgtccatcccttttactctggcatccagcctctgtgacctggacgagctaccggcgcgtggagcccagaaagaacggagtgtcattctcttacgccactgtgaccgccctcaaccccccccaaagccaatgaaaggcggtttagtcgcttcctacctcacttggtgatcgttctctctttccggttgatggttggcgctgtttatttttagcatcggttggactatcagactaggctaagggcccctttggtagggcttatttttcagcttcggctctggctcatgcaaaagttgtgccaaacacctctttttcaaatggcttcaccaatgaagtgcttttccaaaatgaactagagggcatgagccaaaaaaagtggctcacccggcttcagctcacgtcatttttgcacaatagccctcccaccagtccaaattaatttttttggtcatgccctcaatccctagccacgcacaatagccctcccaccagtcccaactatacaagggtctttctaaaaaacaacttataagccgttttgccaaatgatttttcagaatggctttggctcatctaaagaagtggcttcacctcgtgagtcagagccaaagccgtttttgtagaagccagagccctgccaaaggggccctaaaccttgccttagtttaa

SEQ ID NO: 1333 - DNA, 393 bp, Zea mays
agttccccagcgggcacaagatcttcaccaacccgacggcgctacacaagaaggggttcatgttcatcaggcagacgctcatggacggccaggacatcaccgttgacgtcggccgcttcagggaggtgctgctccaggtgctcaacagcctcgcacagtagccgtctgcgtgctcactgctcagcacggtgctacccccaccttagtagtactcctgaagtatatacacacagctacgcactacacagccatgtatacgtacaatactttagttgcaactttgtactggagtatcattgttacggatgtacactctacagagagacctttgcgtggtcaacggtccatgggggcataatactgtactacaatgagagagggaaatcttagggt

SEQ ID NO: 1334 - DNA, 330 bp, Zea mays
  misc_feature (318)..(324): n is a, c, g, or t
gctacgacgactatggcgacggcggcgagtgcaagcggcaagagagacgacgacggcactgccctcggcggcatcgccaccacttcttctctgatctggctccttttcttcttgttgctgtggtgaactcaactgatcgtgaccctgcttttgtattatggagtgcccatagatagatataacagcttgttgaaccttgcagccacattcaataaatgcatgcgatattgcagatatatatctccaacatatatcttctatttctgatcggctagactatatgtatatctgaaaacggtgggctcagagcttgtggannnnnnncataca

SEQ ID NO: 1335 - DNA, 269 bp, Zea mays
aaaaaactaattttgcttgctccaacagctcctgtacccaccgaaaaaaatctgcatccctaatcggagacctcatctcccacaaattttcgcgtgagcatttctccccaatccatacgtactccccgtgtttttttttcctgtgcagttgttgtggtcgaggcggcaagcggcagcggtgacccagagaggaggcggcggcaagcgcggcgatcgatcgaagaggaggcaacgacgtttgaggaggcggtggcgggcgatgtgatgct

SEQ ID NO: 1336 - DNA, 319 bp, Zea mays
cctcagatcccggcagcaagaccacaacgacggctaggtggagtagctggcgaatgcggtgatgtggacgaccccgacgtagaccacgcacatggagtcgatgctctcgacggcgaccttggatgtggcgccgcgtcgcgtcgcgggcatgagcagccagctcaccggcggtgatctaggccacccgcttcactctttgaggacgacgcaggacacatgtttgatgaaatgccgagccaacgtccagtaaaatgatcgttcttgttttatttgtttattttttaggaattgctaattgaggtctgttacttgataatga

SEQ ID NO: 1337 - DNA, 763 bp, Zea mays
  misc_feature (742)..(742): n is a, c, g, or t
  misc_feature (751)..(753): n is a, c, g, or t
cagtggtattgctcatcgtgcagcgtggagagggcagaagaggggatgagacagtacgagaggaggacgctgaagctccaccggaaggaggatgctggactacaaagttggaattttgatggtgtggacctgctgctatctgccgcggagcagctcaggatagatgagcagctggagactcgtacagattagcgtgttaaagtgagtttgttgtttgaagagcagaggcctgcctcaggatcagaaggctcgggcaagggcagttaacaacatttgctgcagtcctctcacgaactgatgaaaatacaaggatcttcaaacagcattcgccttttgagatgcgtgcatgttatcatatagcacgcatctcaaaaggcgaatgctgtttgaagatccttgtattttcatcagttcgtgagaggactgcagcaaattttgttaactgcccttgcccgagctctgatcctgaggcaggcctctgctcttcaaacaacaaactcactttagcacggcaaaaggaccagagtgtaggtgcaacacgctaatctgtacgagtctccagctgctcatctatcctgagctgctccgcggcagatagcagcaggtccacaccatcaaaattccaactttgtagtccagcatcctccttccggtggagcttcagcgtcctcctctcgtactgtctcatcccctcttctgccctctccacgctgcacgatgagcaataccactgccccttggntattgaagnnnggcgaggtgt

SEQ ID NO: 1338 - DNA, 402 bp, Zea mays
  misc_feature (391)..(398): n is a, c, g, or t
gtgccccaagccctcatacagtggcaaggagctcaactgcatcggctacatgggaagacacggcggcattccgcgctaagtacccggcgttccagctcgaggacgagctgattcttggcggggagggagatgtcatgttcgggcgcacgtacaccaggcgccgccgagccagggacgtgcgccgtgcgcaggagcgcgccaaacagctggccgacgctgagaaggaaagagtatcagcgcgtggctaagaaggaaagaatgggaaggaaagagtagcagcgcaagaaggaaacaatgaataaggaaacaaagattagggaaggaaagcagtgcaagaaggaaacaaagaataaggaaacaaagattagattgctattttagtcctaaattnnnnnnnncctg

SEQ ID NO: 1339 - DNA, 288 bp, Zea mays
gctcagcggggtggtgtagcgtggatcgggctcaagggcaactcacacaccaactggaacaagatctgcaacatctacagcaagttctgccgtcacattggcagctctgttttcctgggcctcatcgcctccgtcgtcctcgtcctgcttaccatcctcaacgcccactccttataccgccgcagtcgctagttaaggaattgatgaatatgcatatatgcatgggatgtgatgagtgacatggcatctattttgtattgcagcagtagtctctgcaatcgaacaatg

SEQ ID NO: 1340 - DNA, 483 bp, Zea mays
tctctgctcaggatcgtgctcgcgagttctctctgggcccatggccgttgccttctccctgctcaggatcgtgctcgcgagttctccctgctgtctcctcgcacttccacttggtaaatccatgttgtcctgtaaacagctttctcaaagcattaggaaaggacattaaagcatcatcagactagatcacctaaagacatgtaatccaactttgcaccacctaattctagtagatttacccacactgctagtttgcccaacacttggatgatcaagctcttgttgaacatgcagagaagtcccccagaaacaacaacctcagtgtttggtggcaagaaccgatgactccaagaaacagggtatgtaaggggtaataaccacatagccattttcaagagtgcagagaccatgcagttcctgagtatccatgttatatgatacaagtttctggttccagtgctgaacaaggatgaacgaattgtg

SEQ ID NO: 1341 - DNA, 368 bp, Zea mays
ctctagcattcttgttttcatctcgctggtggaaaagataaaggtggtgctgatcttgtgcagtgagatttacctgtgctccttgcttcactttgtgcgcctgtgtggtgctgtgttcgtctgattattgtccaccgtggcctggtgcttgggctccctactgcgtggtgttcttcttctcgggttggtgctgtggacgtctccaacggtctcaacagcggctctagtatctccgtcaacctcccgctgtgcaggcccggacgtgggcgacggaattggttttctgggacagaacttcgtgttcgctgagttgatctttccacgtagacaatctacatgttgtgagtagtcggttgcctcactttatt

SEQ ID NO: 1342 - DNA, 369 bp, Zea mays
ccacccgacgcccgcctcccttccttcgtgcatcggcgatccacgctacccaccggaggtcgcctccctccccactccgcacgacgaacccccatatcgagcctacacccgcatccttcccatctccccaggtgccatggtctcgttccgcacagggagctctgcccccggacccgccggccgcctccctcaccacccgcacgacgaggcagaccgactgacgtgccacctgcacgatgagcccagactcatcggcgcattcctccccacccgccggtgcgtccattcctagccgccggtgcaccacgctcatcacccggtcggcacgccaatcaactacggccaactcctcagtgaatgttccaaagt

SEQ ID NO: 1343 - DNA, 398 bp, Zea mays
gtcgctgcctccgccgccaccgctgaggagggtcacggtggccgggtcctggacttgttgggcctcagagaggcgatgctccccgccacgtacaaggtcgaagtgagatcagttagacgccaaagcaggagctgagtatcctccgccggttcctcgtcgctacctccgccgccaccgctctgaggaggggcatgatggccggatatccgtggggcctctgtgaggcgatcctcgccgccacgcataagggcgaagcgagatcagttaggcgtcgaagcaggaggagccgcagccacacgccatcagggaccaactgcatttcgtctcctgctgcctcaccaacccgccccatggcgtacgcccttccttccctgtctcctctgcctactgttctcata

SEQ ID NO: 1344 - DNA, 374 bp, Zea mays
agcgcacgcacggcgcgcaggctgagcaaggcaaccgaagcgagcgaggtcctttgcttctacccgcggcaacgccccaggcgcgcgcgacgcgtcgagctccggaggccgagggcgagcaccagtgcgggagtggaggagaggaggtctccgctggacgactgcacccccacccactcggggtcagggtccaaagccggatctgccttggggctcgcgcccgcggctggtggaacggactgctggctgacgagggctccgataatcgacggcggcggtggaatgccggtggaacacctgtttttcatttttgatgaggtggaatgcggcttcccaagctccattctgttttccatttcaatgaggtgaacgat

SEQ ID NO: 1345 - DNA, 578 bp, Zea mays
  misc_feature (471)..(472): n is a, c, g, or t
  misc_feature (494)..(494): n is a, c, g, or t
  misc_feature (565)..(568): n is a, c, g, or t
tgctccggtatggcgccgccgtgaggtgtgcgcgcaccgccgcctggtctcgctgggtggagaatatgtgccgctggccattggctgttggattggtcgccaacggtgtggaacaaagagctatggtaaaatcctgtgcgtagatcggcaaagcaaggatgtagattagaagcatccatacccattcgtgatattaaatcagagccgttggttggtagttgggatgatcagatttgcgggtggcgcagcgcaatctcggccatggatcagagatccgagggccagcattttcgtaccaggtcatgtatggcacgatctaatcgtggtcgtgggatttggatcctatggatctaatcggtcgaaaccccttcgccatgctattttttagaagaaaccccgatgaggcctagtttgggtactcttggattgaagtggtttgtagggattgaagagtgtttaaatccccaatanntcaaaaactctcccaatacatntcaatccacttcaatccgtctcattcctagagtacccaaaccaagcctgagtgattaaataaaacccgcannnnatagctatta

SEQ ID NO: 1346 - DNA, 442 bp, Zea mays
gtttgttgaaggttccaatctaactggcaaggggaagactgttgacaagggcacccctggtgactccaatgatagcaagcctatgtccaaattagggaagaggaagaggtacatgactgataaagatgttgttgtgttcaatgggatgaaagaggttgtatctgatgttgctgctgctgtccgtgaaagcatccatgctgaagcagcacctaggatctacaatgttgtaatcatctatcctaggttctcttgggaggctctcatgtatgccctgaaccacatgatgcagcacaaggccaccttcctgtgttcctggacaagactcctaatgatcatgacctatggctcaagactttcctagccaagcactaccacatctgatctgtctatcctatataatgcctaagaacagatatgctacacattctcggatctttctatc

SEQ ID NO: 1347 - DNA, 741 bp, Zea mays
gtacgtaatttattaattactgaaccgtacgtatatatatgtgcccatgcagcaatctaactccaattaaggactaaaattagctagattttagctaatagttcagctattagttatttttaataaatttgctactagctgatatctatttattagctagctaatttcaccagtaattttttagcttaactaataaatagctagataactagtacctaatttactaaaaatagctaataactaaactattaactagagtgtttaaatatctctagttaattttaataactaactattaactttattacattcaaactctttctaactcttagttctaatacattcaaccatccgacgacgatgagaatattgcatgcatgcaggcccgaggctgagacggagtggcagctgatccacatgctaggcaaggacaggcacgggtacctccacaaggacaccctcagaggcgtctacgacggcaccgtcttccccaagatgcgcgaccacaccatcgaccctcatgcccgtcacagcgatgcctgatgatccgatgagctcagctccatggatgataacatgggttctcgtctactgccggtgcaataataaaacagtgtactgtacatcgtcgtatgtaatgtacagaacgctatatacaccacgtttatccactgccagtgttttgtcgagtgtcgcaggcactcgttaatggctcgataacactcgacaaatgctttactg

SEQ ID NO: 1348 - DNA, 430 bp, Zea mays
tgattcgagaatcggatggaaccaaatctgattgcaaaaaagcaagccaagacttggttttctccaatatctcatgttcagttggtcagatgatgtgtatgtgtactggtgcactgcagcttggacatgacttgtctgaagaatttgaagctgaaggtgagtgttggagggaaccaaatctccagctgcatgcacagcacaaggtttggtttcctccaatgtctcatcttcaactgtctcaaatcaatgcaactttgcaggcattttcaggatcattatccttatccttatccttatccttatccttcacagagtgaccaaatacagtattttcagttaaccaaatagtgagctacaattgattggaagctaatggtatctgagttgatgagttgctccatatcttgttatacaattgattggaagctac

SEQ ID NO: 1349 - DNA, 434 bp, Zea mays
cccaattgggtgcacggactggagattctatgctccaaaggtgaggggggattgattgatgcgagtttttttgcatgcctttatttttcccttactttgtcttttgaggttgatgcaggcccgaaacaaggcttcttatcttctgcaaggttcaatcttgaaaaaaagcagtggcgatggtaaaagttgtgtccggtaatcaaaggggaccaaatgtctggtgcagcagtgcccaggttgtggttccattcgatgggcaacggcgaagtgctcatatcattccatgttttatgtacaattcttttttagttgttgtgttttagttcaaaaatgaactagcgagcgacaaatattcgagaacagagttagcagccagatttagaggggtgttgattgatgtatctgtgggggtgcttctgcttggttgattgaca

SEQ ID NO: 1350 - DNA, 255 bp, Zea mays
catcacagatcgtttttttaaaagcaatcttctactaatacaccagttacaaccacgaatgaaaatagagggaacgtccagccacatatcaatcctaccatcagcaggtcgaagacccgaaatgtcgtagagttcggcagctccagtgaccctcaaatgccactgaatttcttcacagctgatctttccaacgcctcccggtccttttttttttttggcgaattgcacacaggaccaatgtcgcaataaccacag

SEQ ID NO: 1351 - DNA, 283 bp, Zea mays
  misc_feature (272)..(276): n is a, c, g, or t
tgctctgccacctctggcgcaaggtgctcgacaccgagcgggtgtaccgcggccggcgcggccagcgccagcccggcgacatcgaggtcggggacctcagcacgaaaagctacggctacagtggctcgttgtcgccgtcgtcctccgattacaatggccaccgtgggggcgccgtgccggccagatccaaatgggaatcgtcggcggcgcgggagaggaggaaggacaggctgcggcagtccctgcgcccgaggagggccagctccaaggtnnnnnacgccgt

SEQ ID NO: 1352 - DNA, 332 bp, Zea mays
  misc_feature (323)..(326): n is a, c, g, or t
aagcttcttttcgattacgtgaacatggcagtggtcgagattggccatgacaccttactatgcgcctacccctggaggcagccgtgctccatggcctgggaggagaccctctatcaagctttggcggaggaagtgccacgccatatgagggattggctccatgggtcaggaaagtttgcaggaaacgagaacgacgacgccggaacgttgttggagagaatcatgcggcaggaggtggaagggagaggctgggtgaagtccatgagatgggagttggatgagatcacagagcagattgcaggaaaggtgctggatgaaatagnnnnagaagc

SEQ ID NO: 1353 - DNA, 431 bp, Zea mays
gggtaaccactgccaaaaccatgtattgaatcatcatcgcattgcagcagccacccagtgagaaatctggcaagagagacgaaacgggaaaagaacccatctgagagacgcgtcgaaaggggggcttcagtgtgtgtaacaacataaggcgatcagcggcggacgaatccgcctcaccgaaatccgctaagatcctttcggatccaaatcatcatcagcccgagctacgaaccaatccctcgcaccgttgagagaaaaatagggggaaaaacagagaagcacggaacgagcaaacaggaaaagaaaatatcagcacgcagatgcagaaccaccgtaaagaagcgagctcaagtaatcggcggcggcggcggcggtttagggtagcttcgagcaggatctgtagatcaggtcaggttatatagagggagaga

SEQ ID NO: 1354 - DNA, 361 bp, Zea mays
ttgctgaatctcatccgacgccccccgattcgcccagcggcatcggagaacaagtcgcatggaagcccatccgaccggcgccgccatcccttcccccatggcggcaccacagccgccaccctcttccaccaccaccccgcccccaaccgctacaccacaggagccagccgccaccgccgtcaccgctgtgcgctctccccaacccgtgcgtttcgcattcctcgtcgtcgccgcgctcatgtccgcgtcgtggttcgtcgagccgttcagcgcggcggcggcggccgacctccgcgtgccgtggcccgctgtcgtggccactctcgtctgcttcaccgcgttattctgcgcatcagttctc

SEQ ID NO: 1355 - DNA, 470 bp, Zea mays
tcagagaaatgactttgattttgtcactagagatgttcagaagtctttgtgcaagaagccaatcttatttttcttgaaggatgtctggaaggatggaagcataactacgggatcttacacacattcaagtgctagggatgacctcaaaagaaaggtgttttgcttccggtcaccccctctatctgacatagatgagatccaagtttcttcgtctccattaagcaagcgctggcatctggtttgtactatcatcccttaacagtattccactgcctctcttaattatttacaagtgctaagttaccattctgctgatataggcaccaagaaggttgtgtagtgcacttaaaggatctattgatggtactctgtttatggttgttcggcaatgtggacgcgggacttttggtttagcttctgattccttatgactgattggaaacaaagatgtatattttctgtccaaatga

SEQ ID NO: 1356 - DNA, 413 bp, Zea mays
  misc_feature (362)..(363): n is a, c, g, or t
  misc_feature (371)..(386): n is a, c, g, or t
gttgagaagcaggccgatggcaagttgactggctacatcaggataagaagcaagacccaaggaattgcgctcagcttaggagacaagatcaccctaaaacagaagggaggcaacagctagctcagctacgagtcgttgatcactgtggtctgtggcaggcacatatcacccccgttaactcacctgaacacaaaatttgctagttagccaccaattttcagggttgcctcacctgatacacaatttgctggttgcccaccaatttttaggatagccaattattttggatgcgctgttgataatagaaaataaggatagggcactagtctaagttgtagtatttttgggtcatttcatgtgcnntatacctnnnnnnnnnnnnnnnncaacagcgcatccaaaataattggcta

SEQ ID NO: 1357 - DNA, 413 bp, Zea mays
  misc_feature (66)..(66): n is a, c, g, or t
  misc_feature (177)..(178): n is a, c, g, or t
  misc_feature (203)..(203): n is a, c, g, or t
  misc_feature (213)..(213): n is a, c, g, or t
  misc_feature (221)..(221): n is a, c, g, or t
  misc_feature (237)..(240): n is a, c, g, or t
  misc_feature (252)..(252): n is a, c, g, or t
  misc_feature (333)..(333): n is a, c, g, or t
  misc_feature (338)..(338): n is a, c, g, or t
  misc_feature (342)..(342): n is a, c, g, or t
  misc_feature (362)..(363): n is a, c, g, or t
  misc_feature (371)..(386): n is a, c, g, or t
gttgagaagcaggccgatggcaagttgactggctacatcaggataagaagcaagacccaaggaatngcgctcagcttaggagacaagatcaccctaaaacagaagggaggcaacagctagctcagctacgagtcgttgatcactgtggtctgtggcaggcacatatcacccccgttnnctcacctgaacacaaaatttgctanttagccaccnattttcanggttgcctcacctgannnncaatttgctggntgcccaccaatttttaggatagccaattattttggatgcgctgttgataatagaaaataaggatagggcactagtctaagntgtantatntttgggtcatttcatgtgcnntatacctnnnnnnnnnnnnnnnncaacagcgcatccaaaataattggcta

SEQ ID NO: 1358 - DNA, 471 bp, Zea mays
tatctctgaagtatgttgcattgccgctatgtcattctcccctcattgatggaaactgcgactgacatatattctattgacatcctgcagatgtcgtgggccgagtaattttgtgttttgttgctcgcatggaaatggtatctgattccccattttgacctgccaatgaaattagccatcaacaaggtagaggtagatacagtatcaaccggaggccctcgaatgacaggtcaactcttattcttgtcaccattttggcacacttaaatctttgaagtcgacatatgcaaagctgaaacaacacgttcgcatgacaaattttggttgaagatggaggccaacgtccccaggagtgtcggcagagttttcctcttgtctgtagcactggcaccttcggcgtcctgaaggtgccatgagatcatacactgatgtacactgtagcatggttttgtaaatcaagccgtcacaaat

SEQ ID NO: 1359 - DNA, 422 bp, Zea mays
agacccgaccgcctcatctggccatccccatttgtttactggctccagtccccgccccaaatctttccctcctcagcaccaccaccaacctcgaccccgtctctgtgctcgggtgcgagattggggatgtgatcggagatgtgatcggagctcgactctcggtccgagtttgtttgcttcttgaccatggcatggaggaggcaagctggcggtgagatgggtcagcgcggaggaggaagagaagcagggcgttgatggcggcgggtcacggagcagagatagcgcagcggttgatgggatctgcgagatgcgttggtcgattttgcagtagcggatcacggtggcgacgaaagtgcgagggggagctgagctaagcggagcgtggggaggagggcattgatagcggggagtggatgatgagc

SEQ ID NO: 1360 - DNA, 529 bp, Zea mays
  misc_feature (432)..(513): n is a, c, g, or t
  misc_feature (515)..(526): n is a, c, g, or t
attagcaacaaaacaatccagacacaaaatggaagcgcagtcctccctctccacctccaccacagaaatggaaattacttgccacctgctaaataactatagcacccccattaataacagcagcagatgcagcggagttacataatacaagcaggcagacgacgagtgaaattaactcccccaccaaaaattcaaatcacacccaacccttccaccgtgacgacaacaacacggcccccagccaaacatacgacaagggaaaggaagaagaggggcaataccaccaccgtgacgctgatccgcgtcggcgcagctcctgagcacctccccgctcccacctccggggccaccaccgacgacggccccatccaccccctccacagcagctgccggcgccaggatcttcccgaactccaccttggctggtaacannnnnnnnnnnnnnnnnnnnnnnnnnnnnnnnnnnnnnnnnnnnnnnnnnnnnnnnnnnnnnnnnnnnnnnnnnnnnnnnnncnnnnnnnnnnnnctc

SEQ ID NO: 1361 - DNA, 446 bp, Zea mays
gcatacgaatcaccaacgagggatcgagggacctagaccaccggcaattccttgccgggttctaccgtttcgccgtgggccgctgcgcgccgtgggtggctctctagccgtcacctctgccctcgataagcccccccattttgtgcgctttgttcccgtctttgtataggctatcgggtttggggagagatacactggcgtgccggaataaccctctccagcgggtgcaccaccgtggctcggtgccatcgcgtcgagaggtacaagatcacccaggtgccgttagtttgatgatggacgataacgattgagcgttgcgtccctcttcaccccattagatctgaaccatcgatctcagatctgacgtcctaggtcgctttacgtcacgtgtcggccagatttgatctaagccgtagatcttcgatcggacggttgtgtttgtgtac

SEQ ID NO: 1362 - DNA, 404 bp, Zea mays
agggggcgcataaacccgcattggaaggaagcaagcagagccctactttgttgaacaggatgacgcccgaagagaggcagatgtagatcagcaggtagaggtaggtcagcacgagctgcctgctgatcatcttcgccacaccccgcaactcgccgcttggggacgatggttggacggccagtggctggccgctggtggctccggggaggtggatgcggaggcgtcggctggaaggaatcgcagatcggagatgggtggggagcggcaggggccaggggatgtccgtgtcgggcgaaagggcgaggcctagtgtgttgggtttcgagatctgctgggccgtcggatggggatccgattgatatggctggattgaacgcccagtcgcaaggatcagtgtgctgtgt

SEQ ID NO: 1363 - DNA, 409 bp, Zea mays
tgaaaagaacaccggtacatactatttattaccatagatagtacacataattgacactcaatttgagacacaagtggtacaattgcagcgaccttagccaaaaaaagaggacggaaatcagaatgagcatgagggaaacgactaattaggggacaggggatgggtacttttaaattccggggtgcggtgccgagacttgaacagatccaccgtgacctcctcgaaatcgatcttgttcaccctgcacgcggctgccgacatcaagaatcgagcggcggatgacttgaagagccggacggaacagactacctacctgcagaagatgatgacggcacgggagggtgacgaccacctgtgtgcgtataccttgattggcggcatggcgagccttcgtgagtaatctgggagc

SEQ ID NO: 1364 - DNA, 611 bp, Zea mays
tgctcaataggtaattgcattttcattcttaaattgttctgtgattctgtcctagtacacataaattgtttttttttgctcagtgctcagttatgaggagttagttgttcactgcttgtttgctcactgctccagacctccagtcaggaaccaccgattgtgatttgtgaagaactgtgaattgattaactgaagatgtcaaatagtggaggcaagggatgtcgttcccgtgctagatcaatgccacccgagaagcaactaggtatttcaagtttcttgcctgaacctccaccgccgcctccttctacgaaaggtagtaccaacggtcagccctgcatggatgatgaggtatgcaaccattttccatattattgttagaactccttgttactgatctatgaatttagccttattggttagaattaattatccgagaattgcaaacttgtaggaacaagatgctgaaagtgatcccgacgtcatgaatgattatggtgagctttgaccgtgagtcagcgactagtcatggtgcttaatgcttgacaacatgtttggaactttagataaatatgttgctgtgtccatgtgcggatgtgcctgtttctgtgtgt

SEQ ID NO: 1365 - DNA, 359 bp, Zea mays
cctatctagaggctagtgctggaccagtgtaccctaggagctgggtgccaggtgcggtggcgggcggggcctagcaaagcatgacgctgtaggagggatccagtcatccgatacgtcagcactccggcacagcagtaggcatctcggaagctggcagggccacagggcaccacgcccaaggcttagccgcgcaggcactgagcagccaagtagtcaggcagtcagtgagcagcagcagacggcagcaaggctggaagcgcgaagtacctatataggcatataagtttagttcgaccgggagtttacttctctgttatctgtgacttgcccgaccccgacttgatgtgcattgtagattc

SEQ ID NO: 1366 - DNA, 428 bp, Zea mays
tccccgcagcagacggatcgccctggtcctccacactagccatggagcgcaaccgaaagagcgtcgttgtccgcacccccttccgctgcccatccaccgccgacggcactagacctaccctcttccaccgctctcctgctgcccaagctggtgctctgttgcggatcccatcaataggcagcccccagggactcatcctcggtagaagcctccaccaagcagtcgcctctcaactcccttcccctggtggcgtccagagctcggacgcgggcatcccctcgacagagagcgggcagagagccgcccccagtaccccctgctggattccatggtcacgtaggatgcagcgaaacaagattgcctcccaccttgacccggctgcttcaaaggtgctcgatctattgcccatgtgtcgtataccttctgaa

SEQ ID NO: 1367 - DNA, 540 bp, Zea mays
atggcggtcaacttctacccgccgtgcccggagccggagctcacctacggactcccggcgcacaccgaccccaacgcgctcaccatcctgctcatggacccggacgtcgccggcctgcaggtgctccacgccggccagtgggtcgccgtcaacccgcagcccggcgcgctcatcatcaacatcggcgaccagctgcaggtgtgcgtgtgtgtgtggcgcgcgcgcgtaattatcactactactatccgctctgtctttgttccctagctcccatgtcgcggccggtctcggcgaggctgagacagcgacagagcgaagcagaacatgcttctcaactgaatcatcctccgatgttgcgttgcaggcgctgagcaacgggcagtaccggagcgtgtggcaccgcgcggtggtgaactcggaccgggagcgcatgtccgtggcgtcgttcctgtgcccgtgcaaccacgtcgtgctcggccccgcgcggaagctcgtcaccgaggacaccccggccgtgtacaggaactacacgtacgacga

SEQ ID NO: 1368 - DNA, 645 bp, Zea mays
  misc_feature (635)..(635): n is a, c, g, or t
  misc_feature (637)..(639): n is a, c, g, or t
gacccagccaccgagcggtaaatcctttggtccttccgttctgttccatgcctagatctgcctttgcgctcgccgcttgatctacctctgcgcacgccgcttggtcgcttggtcctatagcagctttgcaacaaagcagtttagtgatttagatagcagtttattgatttagatttatagagccaatttggggcaacagtccataagtccattggtgagcgcaaggtgttcggcaaaatgctccagcccatagaattcaagttaataatttgtcaactgatgtgttttattggatattgtttctatgattttttaggcctttaaacctcacagaaacattgggtgaagcaaatgagaaggtttttccagccactttcaagaggctctggcactagtgctaataataatgtgaataacacaccaactgttggagggacgttcaatccggatgacatagttgcagatcccgctttaaggaggcaaatttatgaatatgataaagatgtccaaaaccaagtgagaagggcatatgttctaaatggtccatgccaaccaaagggtttagatttccctcatagacagtatgaacaaagtttaaggccttttaaagaggaatggtatgacaagtatgatgngnnnggagta

SEQ ID NO: 1369 - DNA, 730 bp, Zea mays
acggcgcccccgtcgtcttcctcaagcacaacgtccgtacacactcacaggctattgctgtgtgcagcatataatcgggatgcagcgcaacacgcgtggttgatttgggggtaatgccgcgccgcggatggtgcaggtgatcgacgagtacgacgagcagtcggaggtggcggaccggctgcgcatcaagatcgtgccgctcttccatttctacgtggacggggtgctggtggagtcgttcccgacgagggacaaggagaggatcatcgccgtcatccggaagtacacctcggtcgagccagagccagaaccagaacctgagtgagtcaccactctctgatctgctttgatttgacaaagataccatcagaattcagaaccagatcttctagtgaaccaacgatctcaacgactaagatgtgaagatttttttttccccgaatatgtagctgagtgtggataagtaagtgtcgatcaacgatcaacgatcgaagggacgcattttctctctctctgaacatgaacacatcgctacgcttttgcagctgttgtaagaattcgagtcgagctgacatttccatttccctcgcagggaagaagagcagcagcagcagcaggaggaggagtgattccatttccactccagtggtggacatcagtttcctcgagggtgcagatagcctgctgaatcagagatatcatgcacaacagcaccacaggattgtttgga

SEQ ID NO: 1370 - DNA, 448 bp, Zea mays
gatgctctcgcgtcgtcggatcgtcgccaccgtctcctccgcgtcgcctacaccgacatggacgaccggcagtatgccggactgaccaaggcaggcttgggcgtgctggccttcaactcgggcctcgccatctacaactcctggggcgacgcgagctccgtcgcgttcgtgctctccgcggactccatcctcgtgctgctcttcctctgcctccgtgagctggagctgcaggggcggggggccgccggcaggggcagggatgtcgggatcatcagagccgcggtgtggacgctgacgacgctgctctcggccatgttcgcgtctagggtggcgccgctgatgccgcccgtcgtcggcgcgctcgtctgggcgacggctgtggccactgccgccggcggcttctgggcggtcttcctcagctgaatgtttaggcttagttcgacgagag

SEQ ID NO: 1371 - DNA, 353 bp, Zea mays
aacgcgaaggttttccaactgagcaagtgtagcgcgtgcactttcacccttgatctacctgctgtccatttcctgtgcatgcactcgttccaccttcgctgccttggtgacaacgaaaaagaatgcccagaatgcgcgcctgaatacagatccgtcatggaggcaaagcagaagctagagcaaaacgccagggaccatgatctctttttcaggcagttgaggggttccaaggacggtttctctgtcattgcagactattttagcaagggcatagtgagcaagacaaccttacctcctgagaatggacggtagtgaaggaccactggtactccgttgccttgtacgacattata

SEQ ID NO: 1372 - DNA, 1220 bp, Zea mays
  misc_feature (1085)..(1085): n is a, c, g, or t
  misc_feature (1136)..(1136): n is a, c, g, or t
  misc_feature (1169)..(1176): n is a, c, g, or t
  misc_feature (1178)..(1182): n is a, c, g, or t
  misc_feature (1203)..(1213): n is a, c, g, or t
  misc_feature (1215)..(1217): n is a, c, g, or t
aggaggtgtggaggtggacgggctttgggcagcgggggagctgggcgccagcagtgtcgaaccctaccaaatcacaggtacgttgaaccctaccagatccgggctcgtcttgtctcatgtggatcacgccgtaagcgtcatagacagtggcggagctagccaacgatgaaagcatgtgcacctcctcgttgaagctggtaccctcttctccccttcctacacctcccccgcacacctcctctcctcagcctcgccgcatctactttggtgttcctccattctcctcctcatgcatgctcccaaatctgcagatcccctcggccagtccccgacttactgtgccacttgacccaaatgtagcggctgcaaatccaagtagcgccagttaggtgaagcctccaaattcgacccaaaagtagcggcttcaattcccaacaggttgcccaactcagtgtgcacatgaataccaaatttgcttcttgtttctttgtttaccagagaatacactagaatgacgtattgatatgtcatgtttgtgggcgtcagccatttaaaattgcatgttcatatctgaaatgcagcaagccatttaaacacatttgtcccctggagctcagatacgaacacatgtttactgtttagctccatttaaacacatgtttgtgggtgtcacccatttaaattcacaaatgtgtccatacctatgcagatattaattttgagagctgtgaagtagaaaactctaatctttggaggagactttctgaatctgcatcaaaagttgagtgtggtgagaatcttacgtacaagtcaacaaatgatgttagtttatttttatttttgtggataagaaaatgctttgcttaatgctggagtttggtgaactacttgcttattgctttcaatattacttgcttattgttttgttcagattagtagattattacgtactaatgaacagtttgtttgtttgtttgtagaattgtttgtatacgttccagtgccaggattcaattcaatccatcctctccgatccatgcgatccatgcattccctgtaccctctatatgaaggattgtaagcangcgtgtctgattgtaaggtactcctctttagatctgattttttttcaccancgttagcttgtaagcgagcgagaactcactttnnnnnnnncnnnnntgcaattctgtatgccatttnnnnnnnnnnngnnncca

SEQ ID NO: 1373 - DNA, 648 bp, Zea mays
  misc_feature (427)..(428): n is a, c, g, or t
  misc_feature (431)..(431): n is a, c, g, or t
  misc_feature (434)..(435): n is a, c, g, or t
  misc_feature (437)..(438): n is a, c, g, or t
  misc_feature (441)..(453): n is a, c, g, or t
  misc_feature (473)..(473): n is a, c, g, or t
  misc_feature (477)..(495): n is a, c, g, or t
  misc_feature (497)..(520): n is a, c, g, or t
  misc_feature (523)..(535): n is a, c, g, or t
  misc_feature (567)..(567): n is a, c, g, or t
  misc_feature (569)..(569): n is a, c, g, or t
  misc_feature (594)..(594): n is a, c, g, or t
  misc_feature (596)..(596): n is a, c, g, or t
  misc_feature (619)..(638): n is a, c, g, or t
ctttgtttattacatgattatttcagtgtgcctccctaatatgttgttaattttaatgtcttacttatattcaccctgctgatgctagatgaaattcctttcagggaatgatttgctgcattttgttggctattgtcctaatcaacccaattgtcttttctgtaatgagacatcatatatctttatatatatatatatggattgcctctgtcctcttgatagcgatctatactggttatttccgaagaagaattggttattttcgaagaagaatcaagaagcaattcaacattcaggcaagtgtggaaccaatttgagacatgtgtgttagtctgtgacaatataaactcgttagttatgtgtcagagaaaacatagtaacatttttttactctatttctaccaatcattgtggtctgatcaggggnnagntcnncnnaannnnnnnnnnnnnactgactccctcttttctgntcannnnnnnnnnnnnnnnnnnannnnnnnnnnnnnnnnnnnnnnnnttnnnnnnnnnnnnncaacaacaaatgcaatacatccaagcattgtngnaacaatttcataactttaacagatngntggaaactggacgtatgcaaccnnnnnnnnnnnnnnnnnnnntgaatcaagg

SEQ ID NO: 1374 - DNA, 633 bp, Zea mays
gcgccggatctactaggaacgccgaggcgacgcagccggagctccaacgatcgcctccgctctgctcacggagttctcagccgatgaggccgcaccacatatggcagctaactctcctaggtcaggcgctaatatgatgaatactctttccctcagcggcatctaagaccacaacagcaaaggcaaaagctgatgcaagcatctcaacagcggttgatgccatcagctgctgggcgatgctagcgcaggtaaagctaggtttacattggggctttggatctgtgcttagatttatagattttctctgcagtatgtgtttccctctacttgatcttgttctgaatcggtgtatccacatttttcctgtagagcgcacttcctcaactagaagatttacagggggcaagttcaacaaaaattacaggcaattactgactccctcttttctgttgcaattgttctttcgcctgaaaacttgaatttttgaagaaagccttttgtaggtcccaggtcaacaacaaatgcaatacatccaagcattgtcgcaacaatttcataactttaacagatagatggaaactggacgtatgcaaccaggcaaggctcagagtcaattgaatcaaggaactcagc

SEQ ID NO: 1375 - DNA, 411 bp, Zea mays
tggcatggacgccgacgtcggcggcgacgctgcggttcgtagccgtcgtcgtcgccatcgctgccgtcctcgccgtggcgttggctatcgacgcggcgttccgcgtcagggtaagccacctatcccggttccagcgtcttggatttgccagttcgagcatggagtagctctgaatttgaaatcgggtgggcgtgcaccggctgtttcttgcaggacgacctcggtaaccgcagaggaggctgcgacagcaaaccaatcgcccgctgggccacgttcttggagttgatggagcatcctcctctccactggaactacaactacaaggggctgctcggtgcgccgaaacgagggttggagtggatcttcagcaagtagagtagcagacagggtccggctgcgtctggtaacttt

SEQ ID NO: 1376 - DNA, 355 bp, Zea mays
  misc_feature (348)..(351): n is a, c, g, or t
ctggagctggagagggatcacgacgcagccctgacggccctgatggagaagcataagccagatacttttgaggcctccagctcgtgaataggcttcagcgagatattcaatagatgttgctaaaacatggtgtctgttgtggtagtgtgcgtgatatggagacatgacatgaccaacaccgcgttatatgatcgtactgtgtggttcgagcatctgaacactgagcgtattgcctgtgaggctgtgatggcatatgggtcaaaccacagcttcgattttgccctctaagccatctctatagactgctgtctatagagtaaagagtttgtaacatgaagtgagataggnnnnccat

SEQ ID NO: 1377 - DNA, 355 bp, Zea mays
  misc_feature (239)..(239): n is a, c, g, or t
  misc_feature (241)..(241): n is a, c, g, or t
  misc_feature (348)..(351): n is a, c, g, or t
ctggagctggagagggatcacgacgcagccctgacggccctgatggagaagcataagccagatacttttgaggcctccagctcgtgaataggcttcagcgagatattcaatagatgttgctaaaacatggtgtctgttgtggtagtgtgcgtgatatggagacatgacatgaccaacaccgcgttatatgatcgtactgtgtggttcgagcatctgaacactgagcgtattgcctgtgngnctgtgatggcatatgggtcaaaccacagcttcgattttgccctctaagccatctctatagactgctgtctatagagtaaagagtttgtaacatgaagtgagataggnnnnccat

SEQ ID NO: 1378 - DNA, 357 bp, Zea mays
acctggtccggcggcctgtcgccgcttcgaggcgcggccgtggatgcgctggacgtggactaccacgtgtacccgtcctgtgactatgagtcggtgtggaacgcggtcgtcgtgcccgcggcgaccggtgagtactgtgggtacctgcgctggctcgaggaggagatgccggacgaggtgggggtcgtggaggaggaggaggaggaggaggtggaggaagacgacggcgtcgcctctggcggcgggaacgagatcgaccggctagcggagcagttcatcgcgaggtgtcgtgccaacttcttgctggagaagcaggagtcgtacgaccggcgtcaggagatgatcgccaggagcctc

SEQ ID NO: 1379 - DNA, 365 bp, Zea mays
gtggagtataaatataagcatgcaaatgtgttctactttgatggctgggatggaattggtgcatctgctgctctcaaggaagcagcaaaacgcctaaaatcttcagcatcaaagtttgacagcgttctccatttggattgctcaatatggaaaagtaggagggccctacagaaggctatcgccgaggagataaagctccctcattcagtgatggccatcttgagccagcatgacaaggaggatgatttcgacggtgtagaagaaggcgctagaaaggaggtacaggaaatcaatacgcatacctacagaaagctagccaccgtcaatagattagttgtggtcttccataatggaagtggtagctt

SEQ ID NO: 1380 - DNA, 329 bp, Zea mays
  misc_feature (255)..(255): n is a, c, g, or t
  misc_feature (263)..(264): n is a, c, g, or t
agatcgttgatctctctgtgcctgggcacagtacgggggtatttatagatactcgaggggctgcttgtccccgtcaaagacatttagaccctcgagtacctggtttatccccagaatattcccacgaggagaggttacagacagtcattacggtaaattttattacagacacggccctaatcgcacatgcccacgcggggcccaactctatgggccgaaccgcacatgggcctctcttggtggtgtgagagccangaggtccnngtagacttcggcggggccttcgtcttgtctcatgtgagcgaagagggtcgaacaggcctccatcc

SEQ ID NO: 1381 - DNA, 596 bp, Zea mays
  misc_feature (403)..(532): n is a, c, g, or t
  misc_feature (535)..(539): n is a, c, g, or t
  misc_feature (542)..(546): n is a, c, g, or t
  misc_feature (555)..(572): n is a, c, g, or t
  misc_feature (576)..(592): n is a, c, g, or t
cctcctgccgtcctgcatgcagtgcctgaactgcgccgctggggtcaccatgaacgccccgggcgcgtccggcatgctgatatcgcgcgctgccttcgaggcagcgccggcgctcttcttcgcgctgatgcgagccgctccacccatcgtggccgccaccgtcttctgcacggaaacggtggcctcggtcatcgcttctccggtcgccgctctttttggcgtccggcgatgaactggtcaagcatgccacgagcagaagtgagggaagtagatcctacattcctacgagacgctagtctcatagtctcatgcatgagtatgcatgactgtatgagcatgtctgcatgatgtaaagctcctacgtttagttgactaatagaactcgaggagtattctaccgtcnnnnnnnnnnnnnnnnnnnnnnnnnnnnnnnnnnnnnnnnnnnnnnnnnnnnnnnnnnnnnnnnnnnnnnnnnnnnnnnnnnnnnnnnnnnnnnnnnnnnnnnnnnnnnnnnnnnnnnnnnnnnnnnnnnaannnnntannnnncaagcattnnnnnnnnnnnnnnnnnnactnnnnnnnnnnnnnnnnnactg

SEQ ID NO: 1382 - DNA, 508 bp, Zea mays
tgctcttgttacattcagattgttaaggagaaccaaatgcttcacaaaggctctgttgagattgaagatgattttgctactcttgctgataagagtatttttcctggggattttctctgggtcagagactctgaaatatatgagaaccgtgacattgcaggtgaataatcaaatatatggtgtggcaaattatttctaaaaaaaggagattgttgatggtttcaacttcaagtgatcgtttatgtgtttcagatgagatttcagaacaaaaggatgatatgctacaggctgaggaaggctttcgaggaactctgttgacatcaactgtctcagctcagctttgtcaggatatagcttttagtgaatgagttcccacatcagatatgtagctgcatatctgctgacttaagctggtgaagcctgctgggaggtgatgctgactagcttattctttgtttttattgcatattgctgttttttctgaatggcgatcactacttctacatcc

SEQ ID NO: 1383 - DNA, 508 bp, Zea mays; identical to SEQ ID NO: 1382

SEQ ID NO: 1384 - DNA, 561 bp, Zea mays
gaaggcatttcaaaacaagaaaactagacaaatgcaattgcctaggtctcctagaactggactcgactataggtatatccttatttcacttgttcaacaatttttacttcaatttgcaattgttaacttatttttcttttttcagattttattcgatatatggcatttggttataaatggattgtggtcgttattactctttaataaggtattttccaatatatatcacttattttgtagctatgaattgctttaaaattgtgtcatgaattttcattcgccgttgtgttagcaacaccttgatttttcggcgtcctccgccattgggcaacaacaactgcaaaagggagagtggagagtacatctcaagattggacaacaaaaatgttcgtattctttgatccttctaatttttgtgccgctatagtgttaggatttgtgtgtatcctcgtctagcctatgttcataaggcgtcgcctcgccacgcgcctaattcgcctaggcgtccagaaggtggcggaacgccgcacctcgccttactgccttaataactatgtgcat

SEQ ID NO: 1385 - DNA, 647 bp, Zea mays
  misc_feature (436)..(436): n is a, c, g, or t
gactactcgatccatcacacaaagccttgttacacacggcagcagccaacccggcccggtccagaaccagcaggcggcagcagggagaagagagggagatcgagtccgtttgctgacgacatatcatgccgtggttcccagccgtgccgccggcgctggcggccgccgacgaggcgcggatcgtcaagaagcgcgcggggctgccgaggctgctgcacaagctcttcatcaaggtgctccgcctgaggccggcgttggcggcggaggagtactacggcgcctaccggatgggcatgggcgtgggcgccgcggacgaggactgctgctactactacagctacggcggcgcggggtcgtcgtcgtgggccggcgtgctctcctccatcccggaggaggactacgacgacagctatttacagggggcaagttcaacaanaattacaggcaattactgactccctcttttctgttgcaattgttctttcgcctgaaaacttgaatttttgaagaaagccttttgtaggtcccaggtcaacaacaaatgcaatacatccaagcattgtcgcaacaatttcataactttaacagatagatggaaactggacgtatgcaaccaggcaaggctcagagtcaattgaatcaaggaa

SEQ ID NO: 1386 - DNA, 303 bp, Zea mays
acgagtataaccaaccccatgcatgctttcaggtgtatgaaccggagaaacgatggagtgattttaattagattgatcagggaaggatttttttttttgaaaagaacagatttctttgcaggatttgtgaatgcatgcatgctttaccatgaccaatttgatccacaagaacctttttttaatcagatttgctaatagctagttagctacacctacggattacacgtatctctgatgatgaggattagtcagtgcttcctaactagctctttccttattcttgaagctgttgtttacttgggt

SEQ ID NO: 1387 - DNA, 368 bp, Zea mays
tatagcatacgtgaatcaataagcacataaattgttttactcagaatttgtctgtcactgtatataacatgaaaatataagtgctagtatattgcgaagtgcctttttgctagcaacatcatgtgttagatagttactgaagtcactgataaattttttcaaagtgcttagtctagctagtcagaccagcacttatctgcttgctctagggttaggcctactgtttgtgaggtttgtaaacctcataatcttagatacttgtgcgcaccatatatatttgtacttaaatagtgtgatattacaacatctgtgtttgtggtgtggctaccaccgtgcaccaagagagaatgagactcgagacgcttagg

SEQ ID NO: 1388 - DNA, 350 bp, Zea mays
gagggaacctggggaagcttcacggtggtggatgcggcgacgatggcgtagccgagcagcttagagatgagcgggagcaggcagcccttgtcggggatcttggcgtcggacagagccgcgaggacgcacccgaaattcatgcctaggacctcgagctccatcgctgccaccatggccgtctctctcctcctccgtcgccacggaggttcagttgcagcttgcgtcggcaatggtgagtggtgacgagacgacgaacagcgaagaagcccacggcccacaagccacgcgcccacaagccgaccagcgtatctcttcagtgagatgggccttttgtgacgggctggacgtct

SEQ ID NO: 1389 - DNA, 485 bp, Zea mays
ctctttggcttctgttcgtcaccggcgcgcagaccgccctcctcctctcttggtctgagcatccagttcatcccacccgcgcctcctttggcttcctatccaccatggggacggtaatgttccctcgctcgggcgttgggcctgtgacgacaggcacctgccaagatgccgtgtgaatcctagtcctagctcatccatggcttctctggctggtagtatcccactagaccacatcaatgtcactggtgtcgtagcgccatggcccatggttgcatgcttgtgcgaagagaatacagactgagtacgacatgttgtgtagctttcccattgaataagatagtgtaatttcttttcttatttaagacttttccttactgcacttgcccatcaatattataattagatctgtcatgggtcctgcaaccaatattataattcaatagcagcacgtatctcattgtgtgttgaggacagagatattttgt

SEQ ID NO: 1390 - DNA, 344 bp, Zea mays
gtgtggtggtggtgctggtgtgacagcggaagctgcgcggatattgatagatatgatagttgattgatagggtgctcgaggagcgcggcgtgctttgttggtcccgggccttaggcggcgacgtgtgtctgccctgcacccgtgtcagcgggctcgccgctcgttgggacgaaggtcctcctcgcctctcagagaagcggaaccgaggttggatgagcgggcgagcgacctgtgggccagacaacacctgtcataggcgatgattttgcatggataaaactaaggatatcacggcctatatatatggtaatttaaaatagggtttgcatcatagctgctcgtaa

SEQ ID NO: 1391 - DNA, 246 bp, Zea mays
atgattcaccggtgtaacgacaaacggctcatgatttctttagacgctcgaagatagattttttttattacctgcacttaaataggaacacttcgtaacgacgagatgaaggcaggatttaggtttcatttggcatagcttattcagcagcctcttgagctagttcaagttattttgtgcatctcaaatggttttacgtgtgaagttttttaaaatatatatgctcttacaaggggtagacgtgag

SEQ ID NO: 1392 - DNA, 416 bp, Zea mays
gggggcgccaggacgactcacggagcgcgggacgcaatgcgtgatcaagaaacggagaaatgaacaggggaataggagaaagggaaggggagaaagggatatacggcgcatgtagggaagcttgcggagggcgttggagtacatctgagtgcccagtcccaggagggcgccgatgatcgtcggcgtcgccggcatcctgctgttctcctgtctcctcggggcgaggctgcggcggtggggtggacgactggacggcaaggtcggggagagtgctgtggggacttgtgagttgtggccggagagggaccttcctatctgttggacttcgttgctctagcctgtgtgggccgccagttgcgtaggtccaacgagggtgtggtgcaggccggagagcaagaagcccattgtgctaaata

SEQ ID NO: 1393 - DNA, 258 bp, Zea mays
tcgtcgaaagcgtcgttcatgggcgcttccccgtcaggccatcaaggtttcctcttctgcccggctcgttgccctccaataccgtggcactgagtgctgccttttccggatgtccatgcccacccattgttcgtcggaatgccccagcggtggtgccatttgccaagaagaagaggactgaatatatcgaagatccgccagatgaggaggtcgcagatgatttcaccgacgagttggaggaggacttcgacgacgcca

SEQ ID NO: 1394 - DNA, 834 bp, Zea mays
ctatcactcctgacaggtaaacatgggacttatcctgctttgttttatctgatcttgctacttctctgatttctaactttacctaatttctattttcttcttctgaaacaagtctctgataagtgcacacttatcttgcacatatttcatagatcccagtatcgttttggatgtttcttttctgtgcacatttacaagtgttgatggagttataagtcctttatttgtacagtatccttttacttactcctctttttttttacacttttgacattatgctctatcaatcttcgccatgtaactaagtgttcgtttagttccttcttcaaaatcaatctgtttaaactgcaggaaaggattggtggaactctttgatttactggaaaaaggggatctcacggaaggtcctaagctgtcggcacttgttactgacatgcacaagtacaggtgattttatttaatttatagctatggatagccatatgtacagtgcttttctttaactcagagattgtatcaagaatgcatttccctgtctgcagacaaggggctccaaggaagaggtatggctccttgccaggaagcaagggcagagcacggcttaggagtgaggaatctttttacgagaacccgtttcctgagtgcatctgtttgactgggaggtcctgatgtataggtaggtatgatcctatcgtatacgcagtatgcgactgtttgtgggcttggagagaattgagatagagtgctgttgattaaagtgtatttgtccaaaccatatcacctcggcgatcctttccagatgaactgacgtctgttctcaattgtagctttgca

SEQ ID NO: 1395 - DNA, 445 bp, Zea mays
ttctcgagggacggcgccatgcccttctcctccgtctggcacaaggtcaacaggcaggacgtgcccatcaacgccgtctggctctcggctttcatcgcgctctgcatggcgctcccggtaaattgcactgtgttgctgatgactagctgctttctcaattctcatccatgttaatgaatgaatggttaatgatagacaaaaaaaatgcagtctctgggcagcctggtggcgttccaggcgatggtgtccatcgcaacggtggggctgtacatctcgtacgcgctgccgatcctgttccgggtgactctggcgcgcaagtgcttcgtgccggggcccttcagcctgggccgctacggcgtcatggtcggctgggtcgctgtgctctgggtggccaccatctccgtgctcttctcgctgccggtcgcgtacccggtcaccaaggaca

SEQ ID NO: 1396 - DNA, 928 bp, Zea mays
  misc_feature (880)..(896): n is a, c, g, or t
  misc_feature (904)..(921): n is a, c, g, or t
tgtgctaggaggtgaaaatcttggaacacaattttgtgaagtagttgtgaatgttgtgctaaaaagggacgcagatctgcctcgcccttatgaccatatggagaccatgggtgatgcttatatgatgcctgttgcatggccatacaagagagtaataactgcacttgcctttgcttctatttttcatgtcttagtgtaaacaaagtttctaattgttgttatgtttgatagatgaaggtcagcaaggcttccaaatcatcccatgttgctactggtatggtattttgttttttcttattcacatgcataggaccacatagctcttcctttccactagtagcaaaaggaaacatccatctataaatactgcaatcttgattagtgttagttgtttcgtgtttgttttgcagaacctattattctaaatttcttatcatgtatcatgtatggtgcactctaaaatgctatttcattttttgttatctatgtgacttagtttatgtttcacatttaatagattgctgaattagaaccctggactccattatctacttatgcagtgagcgccatcaattagaacactagattgctgctatttcacatttgtgttttggttggttcagagttcatagcaccatcaattgagctgttgtgcatatgcagtgaggaaatagaggttggggaaatgagggaccttgttaggctggggaaagattagttgtttatgctgggtgtggcagccccctttctctttgtataaataattatttgttgtatgtcctgatgggcacttcctgggctatgagagggaatgatctccatattatttctgcagtttcctgcatactcaatgttgagctgtggtgccttatgttcatannnnnnnnnnnnnnnnntcaggtannnnnnnnnnnnnnnnnntagcaca

SEQ ID NO: 1397 - DNA, 371 bp, Zea mays
  misc_feature (353)..(354): n is a, c, g, or t
tcaagccctcgttccaccgccgacagcgtctggagcagcgcccaacgacgcggatcctcctgcaaaagcgcgataccgccgccccccaagcccggccgagctgactccgctgtgcgatgggacgcgcacaagaagacggcaatcccagcttcgtcgtcgtcgtcgtcttcaggcacgtcttcccacgtaagcagcggcaagtggatgatgagccgcgcgtcgtcgtctgcagagcgctgggacgtgcacaagaaatatcgcccgccgcaggccgccgaggcgctggacgacggcgagagcagtactgcttccagcaacgacattgacacggataaggaggagattgtatgganncattgtcttgcgcacgt

SEQ ID NO: 1398 - DNA, 380 bp, Zea mays
gttctcgccgacgaccacaacaaggagatcctcttctacggcagcacgctgcagaagtccatctgcggcgacccgccctgcggcacggtggtaagccgccgccgccgtcttctccgtctgggatttgctttgtactccggcggggaatcttgagttgactttgcattgcctcgtcggctccccctggacaaggaggctgcccggaggctcggggaggagctcgtcagggtgtgcaacgagttgggcatctccgagatctcctacgaccgcaacggctttgctcgaggcgacaagaagatgacggcgttcgaggttccggacttccggtctcacagcatgggttcatgccaagataggctttgcagtttgcactgacactt

SEQ ID NO: 1399 - DNA, 866 bp, Zea mays
cccgagctttgcttgaaggctgtttgtgccctctaccggaagcaaactgaggatgaacaggtggaaaaggcttctttagttcataataagcagggatttagccacaaagatgccccaaggtatgtttatacgcatctcattgcactaaggtatttagctgatttaatagcagattcattactcgcaaaaaagtaaagggctgctgtttgaagctgcttgaatttcagcatagtaggaactttcctctatacatgtgttagttaccgtaggttcttagcaaggtacactatcttacactgaatttctaaatgtgtcgagttgttcttgacttcttgttaggaatcaatattgaattattttaatagctctgcacttgattattagcaaagatttcatagacattgttaattaacaaaaaggtgttcatcgttaagttccttgaacgcaatgctagaaaaaaaccggcaatcattttggttcagctaaacagtttaggttcagaggaaattttagtactaagtaactttcatgacatgcttgtgttttattttagctcctctaataattcattttaaagagcaaagtagaacgaaaatatgagcgctaagggaagttattagtgttctcagtctgccagtagttgattgcactctactgttcaatgtaggggatctcgcattgcagaatttcttctggatggtgatctggttggtccgctgaagaagaccgtctcggatctagacgagtatgatcgctatgcttttgagttctgtcgcaaggtggcttcgcactactcaaaacaactttttgcaatctaccagaacaaggaggacccttactttcatccatagccctggtaatgctta

SEQ ID NO: 1400 - DNA, 352 bp, Zea mays
  misc_feature (346)..(346): n is a, c, g, or t
aggggcagtgacataatcatagttggccgtgggattataaaggcgagcgatcctatgaagaaggcgtgggagtaccgcttgcaagggtggcaggcatacaagaacagcttgctatgaaggaaggggggcgccatgagcatccccaagtataagggcgaatccagtcagtttggcgaaataagcgcatgcggaaaggttttcctgcagttgagtcaggacctaattgacatcagattcactgcagaggagactcatgccccattatcgtttctgttacaataatttcctctcggtttaccctgttcttgctggttgagttaggcacgttgtgatgtctgtgctcggntaaatc

SEQ ID NO: 1401 - DNA, 388 bp, Zea mays
gatgaagatatcgacatactgtgatgtcatcaagacatggaggacatggatgtctatgttggctacacgctcgcagacgaagtggagatcaatctaaaaatgtttcatgcgctggtgttgtactgggttgacagagaggtagacgacactaatgttatcatagtaaacgagtgtgctcttggttagacagttatggagctcctagaggaacttccatagccaacacaccttagccatgacattggccatgatgtggtactcggcttcgttgcttgaggcaggagccatgggctgacacttggaggaccatgagatgaggttgtcctcaaggaataaacataactgaaagtagagatgtgtgcctggacactacgcccaatgagcatat

SEQ ID NO: 1402 - DNA, 272 bp, Zea mays
agagcagagaatgctctatagttcagactagaaagaaaagcagtgcagggccacaggggaagagggagccccgcccaagatcgcaaaggcaaagtggcagacaaccatggaggtggagccaccaccagctgccgcggtcgctgtagcagcagcgcttctgaaatgccgcggcaacggtggcggcggggagccaactctcgaggccttcggtaaggcgcggtcgaggagcccgagcagcgcggccgccgcggggcctccacagaaaaccggac

SEQ ID NO: 1403 - DNA, 361 bp, Zea mays
ctcgcggttcgcagcacggagtccacggcaggcagcggtagggacgtccggctcgggaagatcacgggcatcgccggcggcagcgtgacgcggtccgtgtcgtgccatcagagcctgttcccgtacctggtgtactactgccactcggtgccacgggtccggctgtacgaggcggacatcctggacgtggactccaaccggaagatcaaccatggcgtggccatctgccatctcgagacgtcggactggaaccccaatcacggggcattcgtagcgctcggaggaaaacctggtcagattgaggtctgccactggatcttcgagggagacatggcttggacccttgttgattgattataaa

SEQ ID NO: 1404 - DNA, 278 bp, Zea mays
ggggggggcgcgtcgcctgagcatgactggcgcgtcctcattgctaggcttcagtttcatctggtggtgggcggtcatggcgtaggagtatctgccgtggcaccggcgattttcctggctggatccagaattccagacttatatgtactactgttgtgttgagtagcaggtttcattgcttctttttatatatagtatgccctgttgtaccactaccattgctgccgtgagcagaacaagagaaaaaaattgtcaagaacgatgcaaacaaccagaag

SEQ ID NO: 1405 - DNA, 358 bp, Zea mays
gcgagatggatcgagagcattaggagtgagcccaagcttggtcagacagtgcaggagctgctgcaggccgatgcgtaaacatgtggcctggaaggtagcggttcctcagtgtgatcatctcatacgggctgttcgggtcagattaaagtcggttgtttagattcatatgggctgttcgggtcagattaaagtcggttgtttagattgctgcagctgtaatttatagagacaaacattgtagaaacagtagaagtcggtataaattaaacctaaacgaccaggcctataaattcttgaaaaggttcaggtgggcttattctacattgtattggcagttgcttgcgtatgatttgttgag

SEQ ID NO: 1406 - DNA, 378 bp, Zea mays
ccgccacgtcccccgaaaatccctcgggcaggtcatcccgctcaccccagaatccgcgccacccacaggcgggctcaccattcaccacgtaccgacgcgtctctcgtctccccgcagaactacacgctcaactccaaggtgaacgaggagctggtggcggcggcgggggtggaggagggtgacgtcgtgctcgagatcggcccaggcaccggctcgctcacttccgcgctgctccaggccggcgctaccgtctttgccgtcgagaaggtctgtaacgttgctttgctcggtgttccgtagctggactgctgaaagtgagagcgagccgctaggggggaaaattcgaaagatcttcctgagacgaaattgaaattgtgt

SEQ ID NO: 1407 - DNA, 615 bp, Zea mays
ctaggaacctgtacgcaaaggaatcaggcgcggtgaagactttgtacccagggtattgctcaacggagcaggatctccgccccggtgccgcgattcgccgtgaatcgaagcctccgcgccatcaggtactcccctggccttcgctaccatcttccccctccctgcgtagcagttcgtggtgtccatcttagagcagtagggcatgggtaatcgctcaccggaatacggaagccgccgcagaggcgccatcgacgtggccagcctcggcctccacttcgttgtcggcatggatgcgttcttctattttgccctgtccaccgcttcatataatgctcgtcggtataggaatgttcgaccacaagggcggcactgcggtgatttcctgccggcgcatgaccgtcgcgacaatgggcagcgccgccgtcagtgcggaatcgggcagagtggaggagtcccaggctgttccatttaggcaatgttagttgtgtgctaatttatagggattgagcgagattaaattcagtacaagtcaaaattctctccaatcccttctaattctcctcaatccctatgattttagaatcaaacggaacgtttcagattagatgagaggta

SEQ ID NO: 1408 - DNA, 491 bp, Zea mays
aaaggtttcttcaaactactgtcttcctggcatatatatatagtcgtcgagcgactcaaaccatgcatggtgggtaaggttttcttcttcttcttcttccaagctgcaggcaggagcagctgcggaagaaggcggctgcgcacatgaaccagccataccaggcatctagcaatgacgagctggtcctcctggtgtcgctggattcaatcaccaagattgggtgaattgttcatctgcggataatcatctctagcttgctgtgggtgctagagtattaatcttttttgatttccaactacataatcagtattggactttataacaacgtcatcttaatttgccccctttacaggctgaccattacggtgaacacccacctcgtctctcctaaaatgaaggatgaagttgacaggccctctttctctttgcttgtgtcatcaatatgtaaacactcactagctaataaagctaaaaataagactgcctccatt

SEQ ID NO: 1409 - DNA, 409 bp, Zea mays
tactacactaacagcgttatgcatcgcgtgctcaagcgcaagaccggccggcccgccccgcgcccgccgatggacaaggacgacgggcactgctgggattgagcgcaattaatctgacgtgcgatcgatatatgcctctgctgccccgcaatggccagccagcaggcagcagcacgaacgccggtcagagacgacgaggacgagagagcggaggttgcactgcatgacatgctagctagtggaatatatggactattcgcgtgcgcccgggtgcagacaaaagccattcatcgagcgcctgtcggacgacgactatgtccatgtgatattgtagctacacatgatgtttacttgctcttttagagactacggatttttgttttattagagaaaaaagagaacgaagaat

SEQ ID NO: 1410 - DNA, 1289 bp, Zea mays
  misc_feature (1211)..(1213): n is a, c, g, or t
  misc_feature (1268)..(1270): n is a, c, g, or t
  misc_feature (1273)..(1285): n is a, c, g, or t
tctctgtactcacttttttcttctttggtggagctgcacttggctctggggctggaaccccggatgttccagcatctggcaacagaatctcagaattggatgtggagcttcctatcgcaggtggatccttctcagccttcgccaagggcgccttgcttgtatcttctgtccttttctggcccaggagtggcaacatatccagaagcatggcgtgcaacggatcagccatttgttctatcttctcaccaggcgtgctactcatcgcttcagcagcagttgttgttctctggaaagggctgtcttgtttctcctccacggtgttcaatttgacacctttgacctcttgctcccccaacgtgaaaagctgagcacctggcggtggtccacagtcattatcaatgttatctacttccattttagagatgtaatctgtgtccaacttctgatcatctttcccagtttcacaaggcccagatccgctgtcgcccatttttgtatgctgatttccttttgtagcccctgttctccaggctggttttgaagcaggtgcagggagtcctttgtttttgttggtaataccttcttcaatcttagaggtatcatctgtgtccaaattttcatcatcttggcattcgctggggccactttcttcagattcaacatcacctatttttgctttctggtttcctcttctaggccttattcggcggactgctctaggagcagcccttgcagttcttgaactggttggcctactccttttccttggcatattttccgcatgagatctttcaacctccttgtgttcctcaaacttatgctccggaggctgaacattttcctcactgaaacaaattagaaacagacagaagattgacaaccatatgcattttttttaatattgaaagtgtcgttatgtgggcaatcaccggttacctccttttaatttctagttcttctagtgtatctggtttaaggctgtaagcagtttcagagagcttcatttgtttctccactgaatcttccaaccacttgttactgacaacatgtaatcttttgtcatgtagataacgtctttcagcgggagggaagctgcataaacaaccaatggacgaccataaagtttttctatttgcccttcgctcacaaaagttacaaagcaaatctaaagcaataactcagtacctcttgtacaggttatcaaagttatnnncctgtaaaaccgaaactactaccaaatgagtagctggagcaatactgctgcagannngannnnnnnnnnnnntttt

SEQ ID NO: 1411 - DNA, 418 bp, Zea mays
tcttgtgaagaaaatatcgcaaagattccgatcatcttcggatactgatgtctctctataaattggccagaatttcaccaacaatttttgcatctcataattgagagagaaacagggagaacgttcagagacatggcatggaaggtgggcactaggtgacagcgagcgctcgggatgacaacgtgcgagatccacagatggagttgctagacgacggctcggctatgacaccatcgctatcgaatgtcgtacaccttgccaccctagcacgacgccattgcaggtctcacgcatgcatgaagggcaagggattgagcatgggatccacaggaggctatagaaattaccctggctctgccaaatgttcaataaaaaatttcacaaagaaatagagtactagattgatgctcactatggg

SEQ ID NO: 1412 - DNA, 436 bp, Zea mays
ctgaatattccactttttcaattgtttgaaccgaataagagtcccaagaataacatcccgtggaagtggctctttcctgtttcgctgggtcttcagaatgggtacagctgatccctcctgctctatctctctcatcattctcctccaattcatctgctcggtctcatcagcaccatccttgaaaacttcttctttctttttcctttgcataaactttcttgtagctaacatcccatggcaaaccacctcaagcctacagttgctcttgatcttcacattgtatattgataaactagatgatacttttcctttgctgaaacagtcaaacaggttccaggcagagttagggggggcatcgcagggaaaagcacaatgtaacacattcaaatgcaggttaatttattgaatatacagaagttacatgacgaaactgtct

SEQ ID NO: 1413 - DNA, 308 bp, Zea mays
aataagtctcacaatttatgatgtttgatcatatgaatatttagttatatatgacttgtttgcttgagctatgtgtctgtcgcagcacaagcattcattatcgctcaactggctctcatggtgatcaagttatagattttctgtgtcctggctactgtgacctggctactgtatggtctttgtgagttgatctgttgtcatttccatgttcattagtttggaaaagttggtgctgctggatttttgcctaactggtgaattatctagactagtcggttgcccgtgcgttgtgacggcccataacaata

SEQ ID NO: 1414 - DNA, 681 bp, Zea mays
  misc_feature (677)..(677): n is a, c, g, or t
gtgcttcttctccatcatcatcatcagaggaggaggagctacctacctaccttttgatgcaggttgccatggccaccaccaccagcagcagcttggtcaccggcttgaggtgcaggacaggtgcagcagtggcattgatcagacccactagtgccgctggggatcgccggggctggaggacgacggcgtccggccgtggagcccgcaggggcaaggtcacggtacgttggtcttgaacccagttcagttacagctgacccacgtactatcagcatctctataaataccacaccggtctctgaactgccaagaatcctatttctctcggcttgtttctgcaggtcgctgcggcctgcaagacatgcaaaggaaagggggcagtagaatgcccagggtgcaaggtatgtgccaccatgcttgcttgcctttgattggtgaaccacccagacatgaaatcaaactgaatggtgcagggcaccggcaagaacaagaagaacggcaacatcttcgagagatggaagtagggttttcttcttttccttctatataaatatgtaccaccatgcttgcattgcattttcaagagattcaaattggtaatcccatctccatccaggtgctttgactgccaggggttcgggctcaagagctgccctacctgtggcaaaggaggtctnacac

SEQ ID NO: 1415 - DNA, 302 bp, Zea mays
catgaggcacaagcagtaatacacaagcgaccacacaagcagcagattataatatgaccggtgatgataggatggattagatgtttaatgatttactatcaaaataaaacacagattttaggattcaattgggaaactctcaaatctttagttctctaatgtacttggctagtgcaaagagacccgacatcttatttgttgtgagcaaagaggacatgattgagcttgagaggatgaggacattcgagcttgagagacatctggaatccataatgtccacactttagtcatgagcttcttcg

SEQ ID NO: 1416 - DNA, 348 bp, Zea mays
aggccaggaaccaggcgaggatgctgctcgcggacctccaggcaaggaacgcccggatgaaggcggcggttcccggagcatcgtgctccagagtcgcgcggcctgacgcgttcgccgtcaccggctacgagcacatccagaaccaggcccaggccctcgctcctgccgcgttcgggccgcggggccagcgtgcccgtgcgggaactggctactactgcgttgcgtcgtccagcggcttcggccacaggagcatcgactcgtctctggacacctgcgccgttcagccgtcgctgcttggcttcgcttcctcgagctcgagccaggagcatttcgaccctgacatgttct

SEQ ID NO: 1417 - DNA, 306 bp, Zea mays
ggtagtggcggtgaacatgagggcaacgtgtctcacggaagtagaaaaaagaaagcttaaatattctccactcccacgtaggaatggtaggcactaggaaatggggcggtgatgattctatagggcatggatccggtgcagtgtctactgctactacaaacaaagatactgccacaggagggtgggagcactgtttaagacttaacttgtcaataataagtcgatttgagctagcgatttggttgctgaatgtgtttagaatgtcacatcattgttagggcgaagaccgaatctaacctcaatcaa

SEQ ID NO: 1418 - DNA, 386 bp, Zea mays
  misc_feature (381)..(382): n is a, c, g, or t
ctgcaaagttgtagatgtagtcaagcattataacatttgtttaaggtgtccctccatccaaggttgtttgcgaagtcttaaaaataattttttaaaaaaaaatcataaactttcataattttaatatttttgttggggagaagtctttgccaaaggtcctcaagtagcagatcccagtgtcttgagtctgtttcaggaaccaaatggtacaagctttggtcgtctgcttcggcaagtttggcgaagaagtaagatttcagcagcacgaatgaagagaagcttgtcacatcatctaagccatcttcggagagtagcgtttggataaaacttgggctaactacaaatgtcaaaaagacgagggagctcacgagagaccgtagnncatg

SEQ ID NO: 1419 - DNA, 518 bp, Zea mays
cttgcccttgctctttgctcagctggcgggtaattcagtaattgataactgtgcatcgttctttagcaaatattttaacaatgaaatgggacggttgatgtgtaaccattttgatttgtccttcagtttttttgttttatcaagtttccctggtcggcggaagcatgcaatagacaagattaacaaggctgctgatgaactctctcgaaaagttgatgaagctatccaaaaggatatctcacagagtgctaataacctaatccgcttcgttgaggttatcagcaaaccttaccaggaagcatgtcagcgaaaaatagattggttacagggcgttcagggtgagctatctgctgtcgagcgtaagctccaaactttgaaagttgaaatccaaaatcttaatggatcataaggtttcatttcaacttgtttatttgcaattattttttggatactaatagtttttgttggtttatactgcgttgtgatgctattgagttgacgtagtgcctttcctgtat

SEQ ID NO: 1420 - DNA, 422 bp, Zea mays
cgcgggcaacccgcgcctgaggcgccaccaaggctgtcctgtctcggtgccgtgcggagccgctactcctcggaagaccgtgctgaggaaaagctcctcggacatctccggcggcagcagggccgaccgcgtgagcgccgaagatgcctgctgcaagcccaggagggtctcccggaggaacacgttcgactcgccgatgctgcgctcggacggcgcgctcgtggacgtccggaccccgagtggaggcagggcgaagaagaaggggggcgtgtacggcgtcgagttggtggacgtcaagtgcggtaaccccatgaccagcaggctcaggaagctcggcttctgcaagctgtcggagacgtttgcgtaggtggagcctggcaaggaccatggccagcatctgaataccgtgtgcctgatttagt

SEQ ID NO: 1421 - DNA, 367 bp, Zea mays
cgggcggcgagatgtgctccgtgtgcctcgaggacgtccaggctggcgagatggtgcggcagctgccgccgtgcaagcacctgttccacgtcgagtgcatcgacatgtggctgcactcgcacccgacttgccccgtgtgccggtgcagcctcttgccgccaccgcggagggttggtgccaaagcggctcccgcgccgacagctgacgctagggaaccgccggctgacgaagccctgccaccagtgtagtgtaggtgtctgtgtttcgccataccattctggagacggcacaagaatctctgcacgtacagcacacataaccactttgcacgtcatggattgacaattagtagaaacgcaactctcga

SEQ ID NO: 1422 - DNA, 759 bp, Zea mays
  misc_feature (13)..(14): n is a, c, g, or t
  misc_feature (384)..(388): n is a, c, g, or t
  misc_feature (390)..(394): n is a, c, g, or t
  misc_feature (398)..(399): n is a, c, g, or t
  misc_feature (401)..(405): n is a, c, g, or t
  misc_feature (407)..(407): n is a, c, g, or t
  misc_feature (412)..(412): n is a, c, g, or t
  misc_feature (415)..(416): n is a, c, g, or t
  misc_feature (425)..(425): n is a, c, g, or t
  misc_feature (433)..(435): n is a, c, g, or t
  misc_feature (438)..(439): n is a, c, g, or t
  misc_feature (448)..(451): n is a, c, g, or t
  misc_feature (453)..(453): n is a, c, g, or t
  misc_feature (455)..(455): n is a, c, g, or t
  misc_feature (458)..(463): n is a, c, g, or t
  misc_feature (465)..(465): n is a, c, g, or t
  misc_feature (467)..(470): n is a, c, g, or t
  misc_feature (473)..(474): n is a, c, g, or t
  misc_feature (476)..(480): n is a, c, g, or t
  misc_feature (483)..(489): n is a, c, g, or t
  misc_feature (491)..(508): n is a, c, g, or t
  misc_feature (510)..(515): n is a, c, g, or t
  misc_feature (517)..(528): n is a, c, g, or t
  misc_feature (531)..(531): n is a, c, g, or t
  misc_feature (535)..(549): n is a, c, g, or t
  misc_feature (551)..(573): n is a, c, g, or t
  misc_feature (576)..(576): n is a, c, g, or t
  misc_feature (578)..(594): n is a, c, g, or t
  misc_feature (597)..(597): n is a, c, g, or t
  misc_feature (604)..(619): n is a, c, g, or t
  misc_feature (622)..(641): n is a, c, g, or t
  misc_feature (650)..(650): n is a, c, g, or t
  misc_feature (652)..(665): n is a, c, g, or t
  misc_feature (667)..(669): n is a, c, g, or t
  misc_feature (672)..(674): n is a, c, g, or t
  misc_feature (677)..(691): n is a, c, g, or t
  misc_feature (694)..(696): n is a, c, g, or t
  misc_feature (698)..(700): n is a, c, g, or t
  misc_feature (703)..(704): n is a, c, g, or t
  misc_feature (706)..(711): n is a, c, g, or t
  misc_feature (715)..(718): n is a, c, g, or t
  misc_feature (721)..(727): n is a, c, g, or t
  misc_feature (731)..(731): n is a, c, g, or t
  misc_feature (733)..(753): n is a, c, g, or t
  misc_feature (756)..(756): n is a, c, g, or t
tccgctcggcggnnacggacagcagcttcagctccggcgagacgccgtccaagaagaccacccggaaggagaagcaacaggagcggcggcggcagcaggacgtgcaggaacggcagcagcagctcctggggatggaagaagcgtccctggcgaagcaagacggcggcggcagcggcagcaacagcaacggcgaggttgacgacgacgacgagcttccgcagcccgtgttcgaccgcatcctgcgccggatcgcgttcacggtgggccttcccatggcgtcgggcgtcgcgctgctcaacgtgtacgacgcgctcaagcgcggccagggggtggtggtgccatcgtgggtgccattgctgaccatcctcgtcgccttaaaaaaannnnncnnnnntgcnnannnnngntaagngannaacatgcancggccagnnnggnntctctgtannnngncnctnnnnnngncnnnntgnnannnnngannnnnnnannnnnnnnnnnnnnnnnncnnnnnncnnnnnnnnnnnnccncccnnnnnnnnnnnnnnntnnnnnnnnnnnnnnnnnnnnnnnccntnnnnnnnnnnnnnnnnntantccaccnnnnnnnnnnnnnnnnccnnnnnnnnnnnnnnnnnnnnccccccctncnnnnnnnnnnnnnngnnntcnnnccnnnnnnnnnnnnnnncgnnncnnnctnntnnnnnngttnnnntgnnnnnnntgtntnnnnnnnnnnnnnnnnnnnnntcnccc

SEQ ID NO: 1423 - DNA, 208 bp, Zea mays
gagccgaacgagcaagcaagccaccaacgaaggttgctagggccggagtggatggggttcatgctgcgggtgaggctcgcctccttcttcgtcggcgcggctgccgccgccgcgggcgggggctacttcctctacaaggactacaagctcgccaacgactctctggccctcaaggtacgcactccgcccctcttcctcctcgcttcgc

SEQ ID NO: 1424 - DNA, 343 bp, Zea mays
aaagagcttcgggctatatgacagtaacatattgatgaagtggttcctgatgcaagaacatactgatgaagtggttcctaattcaagagccgaagttactcaaggactggtaccgacatcaatgacaaggattgaagaagtggtgactggagggctggggttgtctcataacagattgctacgacagaagatggtagtactatttcagcaggagcaacgtcgtctccacgcattgttagatgtttagttaaaaatcaccctgaagaagaagaaagtgtaatctggccactgaaattgtaatatgtgaagtgcagtgtgtaccgatacgtgaacttgtttgaaa

SEQ ID NO: 1425 - DNA, 392 bp, Zea mays
gcattattcttggatcaacactgctggcgctcggaagtacctgttcagttcctcttttctggtgctatgagataacagcctggggtttggtagtcttatatggtggcacggccttcttcttgagaaggaaagctgcagttgtccttgacgagagcgattactctacccacaatgtgggtctagagatgctggagtccaaaatggaagtgactccagagatgcagcgccgcatcaccgatggtttcaagcagtggatgggttcgtccctcctatcttctgatgacgaggaggaagcctcggatgactacctcgagcacgatgttcctagcccgactgccttaggtcaacaacaccagcatgagcatgatcgagagacctgactgctgtataaa

SEQ ID NO: 1426 - DNA, 405 bp, Zea mays
ctcccacatgccccagtctcctaaaccctacacatctctctcggccacggtaattgccatcgccatggccgggaggcgcccggcaccggtggccatcctccttctcctcgccgcggcattcgcccccatctcctccgccgttcgcccagtctccgacgcgcacagatccgctgccgtggagcttttcgccccctccgctgacggatccttcggcgagtaagtgtattaccaactctcgagcgccttacgtcttcccgatctcggccaccccgccccgcggacacagtagccatcagctgggcgcagatcgatctgcctgattgaaattcatgcttatgtgtgtttatttcctggtggttttgatctgcgtgcactgtgcaatttggagagtacgtatgaggcgga

SEQ ID NO: 1427 - DNA, 437 bp, Zea mays
tacgattagttctctttagatcggggtttgttgcactaatgcggtgtatgggcgtgcccagtatggccgccgccgcggtaagcgcgcgttccgccgcttgcgcactggcgtggggtggaagacggcgtatgggctgtccgatctttgacgagcgcgtaagattagttcgtgttgtaaggagcctgggccatcggatcggaattgaagggatacgattcgatcgtggggataccaattcgggggcttaatttcgaccattgattgtctatccaatggtttgggttagatatgggcgtggagtgttgcggtacatggatcccggatcaaacggttatcatcgcgtaccggttcatgaagagataatctaatttacaccgccagtttctgatctgacggtgctcgttggccgataccctttcggctagccatctttacat

SEQ ID NO: 1428 - DNA, 463 bp, Zea mays
catttgcctcagttttccatgctggaataggagcagtcttgctgctctacgttctcttctggctcaaggtttgccttgtcccttgtgataaactgtacttgcgaaaactggcgctgatgttcacttctaatttggtgcagttggaccttttcacaactctgaagtaccttggcttcctcggcatcttcctcgtgtttgtgggccataggaccctgtcctacctttcctcggcgtcagcaaaacagaagacggcatgagtggacagtgcaagcagagctttcccgatcatcaattcgttttttgaggtggccattccaggccactgggtgtctttgcttggtactctgaccgcaccctagtttttctttagctaacatgcattttgagggaggactcggtttatttcagttggctttgacgaatactgatactaggacaagtaacaggacctcacatcacagtt

SEQ ID NO: 1429 - DNA, 346 bp, Zea mays
tgcagccgagcgatactgggaatgctgatgttggaagcaggagtcaagaagaaaattacatttcaaaggaagagttggagtgtctagtccatggtggactaccgatggctttgaggggagaggtgcagcctgatcactggagcattttgtttctttcttttactttcgatttgttcagttcattcagcagctgtgtgattttctggtgacagctatggcaagcttttgttggtactggagctcgtagggtagaagggtattatgataatctggcagcagagggtgaattagataacaaacgttcagattctcgaacctcggaaggtgttcacgagaagtggattgg

SEQ ID NO: 1430 - DNA, 307 bp, Zea mays
ggcgcagatgaggctggagggagaagggaggccagatcagttcaccagtcgacgaagcaagcggcaggaggagttggactagggagtggttggcgcgtcgccgtcgcgagccagtgagctgcctaggagcgctcctttttagtcgctgcgacgcccgcgcctgcgtaggcgccgtgtgctcctgccggccgcactgagcgtggcgagctctgggccagactcgagcgatcttatcaggtagttcattgtatttcgccattcgtttttccattctttttgacgtccctgtgtgagacgatgctgtttg

SEQ ID NO: 1431 - DNA, 354 bp, Zea mays
cccggcgcctgcaacgactcctgctttagccccaataatgccagcgccgactcctgctccgacgcctgcaacgactcctcctgcttcagccccaacggcgccagcaccgacaccagcgccaacaccatcatcactgacaccagcgccgactcctgccccggcgccatccgaaaaccggtgtccccctggcttccctaacctaatcaccttaattcaagccattaagaccacctatcctaataagtgcaatattattattgtccccgttccattctcgccggtaaacccagggtcgggctcgggcattccatttccaccctacaaatgcctgtgctactgctttcccattattag

SEQ ID NO: 1432 - DNA, 416 bp, Zea mays
acgccgcggtgcgcgttcccgcccgacgaccccatggcgcgggcgctgcggacggggctgttcgagcgcatccacgtccgcttctacggcgacgccgacaagtgctcgtacaagaacggcgacgtgtccggcgtcgtggaccagtggagcaagtggacggcgaggtaccccaagagccagctttacgtggggctcgccgcggccgagagcggcgtgccggaccacgcgccgccccccgttgaggtctacctcaaatacctctactacgatctgctgcccaaggtgcagaaggcgcccaactatggtggcgtcatggtctggaataggttcaccgacaacaggaccggatacagcggcgccgtcaagggctgggcggcttgcagctatgctggctgtgttaactaagtgcatagcgc

SEQ ID NO: 1433 - DNA, 472 bp, Zea mays
gtctgccacgtgaggaggcaggtgcggtacgacgaggacgacgaggaggaggaggacggcgaggagtggggccacaacgaggacgtcgcgaggatggagcggtacagcgaggacgcccgcgaccaggcgctcctggtgaaggcccgagtggacgacgaggtcgaagtcgtgctcgtcttcagggtaccccgacagacactgaccttactatatgttacaacgttgtgtgccgctgtgactgtggctcaagtcgagacccatgggttcgttcgttctgtcgcagggcttctcgtcgagcttgagcgggggaacggccgcggatccggcgaggagcgtcctgccggagagggcgatcatacagtcggtcgacgtggtgaaggggccgtttgaccccaacaacatcgagtacctggagaagggagtgggatgggaggacttcaggagccgcctgcgatagtaacagcactagcac

SEQ ID NO: 1434 - DNA, 348 bp, Zea mays
cccttccctcccaaaccttctccgcatcttgcgctaaccgaagctgggagccgtgattcgcaccccctccgcacggactcttccaaccggatcttcctccccctcgagcataaatacccatgttgggacccctccagtccatcgcatgggggtcgacaaggaaccacaccaaagcagagggccaccgtgaacgcatgcgggagaactcgtgccaccgctgccatcccttgcctccaccgtcgttcagaggatgcggtgcagtcgaggatgtccgaccgtgcgaatggatcaggcggggaggataattggtgtgcatgagacatcgggatggccggacttcttcgtcgt

SEQ ID NO: 1435 - DNA, 377 bp, Zea mays
agttagttttcgatggttgataggccatcaaaagttaagtaattttttgacggcctgtcaatcagctgtaggaaaatgaactaacttccgatggctggcttggtgttctttcgaagttagtcatgaactgtttacccttttgtcaacactatcatgtggacacgaagcatttaacattccatccatccatctggagctcgtcgctaatatggccacggtggcgccttgcacgccaacgccacttttgacaccgtgcccaccgtcacttgcgggttccatgccgacattgatgctgcccaaccgtcgtgcgtacgtgtcgccgcctaccgtccctgtgctgctccttgcctggtgcacctctgttgaccctaagctat

SEQ ID NO: 1436 - DNA, 359 bp, Zea mays
ggcgagcagcgcggtactgcgggtacatcttgccgtcctcgcagcagtccgggtcgttgctcttctcgcagttgccggagcggcccgggaggtacccgctggcgcggcacgtgccgaggctggcgccagggcggagagaggacgccgtgtggggtgcggagagcgcgaccaggaggaacatgaacatggcggcggctacagctcctacaccggccatctttgcttgcctgcagattttgtgctcgaggatcgagccccttctcactctgttctttttccttccttccttcctttctttctttctttctttctttcttgtgctctgctttgcttgatggttttgttagattacttgtgca

SEQ ID NO: 1437 - DNA, 310 bp, Zea mays
gggagagacggtggtgatggtgagctcaagctgctggggctgtgggcgagcccgttcgtcacgagagcgaagctcgcgctccagatcaagggcctaagctacgagtacgtcgaggaggatctcggcaacaagagcgagctgctgctcagctccaacccggtgcacaagacggtgccggtgctgatccacaacgggacgccggtctgcgagtcgacggtcatcgtccagtacatcgacgaagctttcgccggcactggcccgtccctcctccccgccgacccctaccagcgcgcccttgctcgcttctggg

SEQ ID NO: 1438 - DNA, 733 bp, Zea mays
tttgcccccaccgtcgctgcttccacaagcttcggcttcagccgcttcactatcgtggcatgccccttcccctcgcgcacgcatcttccagcggcctcctccgttggggttcgcaatcagcagcgcgcgtccactgccaccgcctgcctgccgccgccgaatacctcccatggcgccgccaccaggctgtacgtcagcggtaggcgctccgatctcagacttcgctcctagatttggtaatcctatgctaggcgccccgactcagcgcactctcttggctcctagatttggtaatcctaccgtgcattttagggcttcgagccaacgatttcctgacgaaattcggaaaaaaatcttcaggacaaatcttaaagcactcgttctgacggttcccttcctcttcctcgaacaggtctttcgttccgcacaaccgaacggagcctccgggacgcgttcgagaagtttggtgaccttacggaaggtgacagagcccgagatgagcgaatgtctgtgttttaaattcagaattattgaaaatttgctccgtgcttgctactccagtttgtctcgtgatggatagagtagcgaagcgaccgagaggtttcgctttcctttcttacaccggggaggaggaagccaggggcgccatggaagggatgcacgggaaggtgaaagatgtccagatcgtcggatgctcgtgtgatagagatagtctgtggtgcttgtaggctaa

SEQ ID NO: 1439 - DNA, 275 bp, Zea mays
  misc_feature (264)..(266): n is a, c, g, or t
acgaccaagcagcaggccagcaagcgcgcgaggctaggacctgtgaggcggtgactccgtaaggcgcgggcgcgcaaccgtatccggatagccggcggccggccatacggaggcggtggacgtaaagacgagcaggcggccgggcggtgcctgttgtgcgggcacggagggaagcagggaggctacggctgctgggctgaatacctaggttttgctcttttagtgggccgaattgaggtatggcgcgggccatacttagccatnnnggaccctca

SEQ ID NO: 1440 - DNA, 343 bp, Zea mays
gcgtagaggttaagtctggaggaccagacggctgacgacgatgcggagaaggacgaagcccagaggtagtcagcgacgaggccgatgccgagaatggcgacgacggcgagcgccaccaagtgcttcgccgccggccgcaccatcggcgggcgactaggactggagaaggtggacgcagagcgagactggagtgaagcgcgtcggtggcattgacggcggaacggcgcggcgagtagtagcgaatcgaagtgacggtgcgaaatggttccggggtgtttggcacagctacaaggagaaaattgttatagtggatccctttatcgttgcgttctttaagtaaaga

SEQ ID NO: 1441 - DNA, 357 bp, Zea mays
gcgaagtgagagatgccagaaatggagaaaacaatggcactgaagatggtgggaatgaaggaatcaggagtgggaatgttggtagcaatgcagaagctgaagagtcttacggtcatggaaataatgaacgcgcagaacataccgaagatgacaaggctcaggaatgtaaccacaatgagaacagtgcaagtgtaggaatccttggcgatggagacggtgaagctagagaaggcgatataaatgcggaagcagaacaaagtcaagcagacggtggcggcaatagtaaagcggaagatgctgagcacaatgaaaacaccaaaactgacgccaattcaagcaagaatggtactactgctg

SEQ ID NO: 1442 - DNA, 343 bp, Zea mays
agcaggagcaggagcagcgatccatcctatcctaggagccaaaccctagccagctatggagccgcccgccgcctcctcctcgtctgatccccactccccgtctccgtctccttctccctccgcctccccggccaagcgctccgcctggaagcaccccgcccccaacgacaccgccgtcatggacgccaacaactggcccgcgctctccgacgccgccaagggcaacaagctcccggactcctcggctccatcacctgcgcccgtagccgcaccatcggtcagatctcttctactcttgttactattacggatacacttaattattcgatcatatactcgatca

SEQ ID NO: 1443 - DNA, 673 bp, Zea mays
  misc_feature (365)..(368): n is a, c, g, or t
  misc_feature (409)..(411): n is a, c, g, or t
  misc_feature (427)..(429): n is a, c, g, or t
  misc_feature (446)..(450): n is a, c, g, or t
  misc_feature (457)..(461): n is a, c, g, or t
  misc_feature (468)..(471): n is a, c, g, or t
  misc_feature (535)..(539): n is a, c, g, or t
  misc_feature (573)..(577): n is a, c, g, or t
  misc_feature (592)..(602): n is a, c, g, or t
  misc_feature (617)..(617): n is a, c, g, or t
  misc_feature (621)..(625): n is a, c, g, or t
  misc_feature (634)..(670): n is a, c, g, or t
cattaataccacaaaaaacgacataattacatcacactgtatatccacataaaaacaataattatccaggtgttttccttcacacaatcacttcatcatcgcctgaaagggccatcactactcctgccaggagaaaatgcctaaacgaactcggaataggcactgcaccttgtttagactatataacatatcaaagaaattgacaccaataatatctgatcgattctgatcaaatgaaagaaaatacagacatatcagatgagcatagcataaaaactatcttgaaaaaaaaaatcaaagaatgacttaatgttatggaatgactaaaaaataatatggaagacttaaattgtacaacgaaagtnnnnctatgaaaggatgactgaaagcaaacatggatgtcttgggnnnataccatatcaaactnnnatttgtaatccaaattnnnnntcaaaannnnnataaaannnnaactgaataacttgaaaagtatcaaatgacttaaaatcacataaagttttaaactacaaaaggnnnnncaaatcttaaattaactaaataacttcaacctannnnnagagttaaaatcaannnnnnnnnnnacctactaacaaggncaannnnnaactaactnnnnnnnnnnnnnnnnnnnnnnnnnnnnnnnnnnnnnaaa

SEQ ID NO: 1444 - DNA, 447 bp, Zea mays
acctctacttcacccggatcatcgtgtcagcgttcctcgccgtgctcaactacaagtaccggtggggagtcgatgttgcagtcgaggccgcgagctttgccttctacctgttcgtcttctacaacttcaagccggtagagaagaacccgtacttgtacattggcgacgacgagaaggaggccgcccgtggccgtgggcacctcgagacggacgatggggctttgattctgagctctgattcatggggatgcagaaccatctcctgatcctgcctaattttttttggtagatatgatgtactcggtacttgttgttgagtttgtgatccaaattctgaagaaggcggccaagttggcgagcgaagcggaggcccgtcgccgggaggcttgggccggagcgcagcgaggccaactggccttcccacagcccagggacgcctgggggtgc

SEQ ID NO: 1445 - DNA, 328 bp, Zea mays
aacctgtcattgaggaaactgaatagctagatgattcacacacattctggtcgccttacattacaggcaatgcgttcgccggttcagctggaacgagcttcactccgcacatcatcacggcgtctccttcagaggtacgtgtactccctccaccaccctctgaatctttccaagaaacagaatgccgctttgggttcggttcggttcgggcgggcgtactggagctcaccgttggtttcgccaggacgtggcggcgaagatcgtcgcgttcgccacccagtcgtcaagggcggtgtgcgtgctctcggcgatgggctccgtctccagg

SEQ ID NO: 1446 - DNA, 563 bp, Zea mays
  misc_feature (554)..(559): n is a, c, g, or t
taaattgaatgaacacacacacagggagggaatgaaggaaggaagctccggttttgatccgccggccgacagatgctggtaagcagtctcttctttctgcagtcacattcctagattgaggtcctgaatgtcctgggccggatcttattatttctttgcttgcatgcatgattcttcatcagtctgatcaacactacactatgatgagtctatgacatgagtggagtggagggacggtgcacatgcatcttgggcagtctgcagtgtgcagcaaggacgagagcatgcggtttgcttttggcggctctattctacctgcaactgcaactgcaactcatcagcagggagggaaggtagaagaggagcaacatgtaggaggtacagtaacaacaagctagcatgccaagtaacacactactgttcctgtcgcgtacagtacgtccatccattctacgtactgggatctgggaatgggatgctggtgcagcagtacgtagcagagagccagcagcaccggccgggggtccagtccaggggcctgcctaccctcctcnnnnnnaccg

SEQ ID NO: 1447 - DNA, 721 bp, Zea mays
ggatgcgccccacgacctcccgtgactctcccagtcccaggctcccagccccgccttcctcccgcctccgcgagaccgcgatggcagtcttgctgtggcggtgcatatgcgggccccaacaatccttcagtaagaatcgaggcgcatccaccccttctcctcctggtaagccttcgaaccactccctctcctcccgtcctccgtatgcctccttcatttcttcttgctgcctctcgaattctcagctcctatgcatttttttctttctttctctaagttatgttcagttcttggatatccttataactcgctgaggattccgatccctaacatcgacaattcttgctcttgcttcatgcacagcaggcaggagatccaaatactcgggacaatctgtggtaaggagcgcacgcattgagctttccctgctacaccgatgcatttggttcatttctcctgaaaaaaaagtacactggaggcaaaagcttgaaaaaaaaacatgtcttgtgaaaccaagagcttgtgtgctccggttctactaataattcgtgtagcctcagctttctgatcctgatgtctgtatttccatgtccgcagaaagcaatgcccatgcgtttgttaacggttggaaagaagaggtctcgggggacacaactccttgttgaagaatacaaggagaagctcggtcactattgcgagttcgaggacactcttatcaggc

SEQ ID NO: 1448 - DNA, 1402 bp, Zea mays
  misc_feature (878)..(885): n is a, c, g, or t
  misc_feature (890)..(951): n is a, c, g, or t
  misc_feature (954)..(960): n is a, c, g, or t
  misc_feature (964)..(979): n is a, c, g, or t
  misc_feature (981)..(992): n is a, c, g, or t
  misc_feature (995)..(997): n is a, c, g, or t
  misc_feature (1002)..(1008): n is a, c, g, or t
  misc_feature (1010)..(1011): n is a, c, g, or t
  misc_feature (1013)..(1013): n is a, c, g, or t
  misc_feature (1015)..(1015): n is a, c, g, or t
  misc_feature (1018)..(1022): n is a, c, g, or t
  misc_feature (1026)..(1040): n is a, c, g, or t
  misc_feature (1043)..(1044): n is a, c, g, or t
  misc_feature (1046)..(1055): n is a, c, g, or t
  misc_feature (1058)..(1059): n is a, c, g, or t
  misc_feature (1063)..(1063): n is a, c, g, or t
  misc_feature (1069)..(1086): n is a, c, g, or t
  misc_feature (1091)..(1107): n is a, c, g, or t
  misc_feature (1110)..(1114): n is a, c, g, or t
  misc_feature (1120)..(1125): n is a, c, g, or t
  misc_feature (1127)..(1131): n is a, c, g, or t
  misc_feature (1138)..(1150): n is a, c, g, or t
  misc_feature (1153)..(1158): n is a, c, g, or t
  misc_feature (1160)..(1170): n is a, c, g, or t
  misc_feature (1173)..(1173): n is a, c, g, or t
  misc_feature (1176)..(1179): n is a, c, g, or t
  misc_feature (1182)..(1188): n is a, c, g, or t
  misc_feature (1190)..(1199): n is a, c, g, or t
  misc_feature (1208)..(1214): n is a, c, g, or t
  misc_feature (1216)..(1218): n is a, c, g, or t
  misc_feature (1220)..(1224): n is a, c, g, or t
  misc_feature (1228)..(1228): n is a, c, g, or t
  misc_feature (1230)..(1234): n is a, c, g, or t
  misc_feature (1236)..(1238): n is a, c, g, or t
  misc_feature (1241)..(1249): n is a, c, g, or t
  misc_feature (1251)..(1255): n is a, c, g, or t
  misc_feature (1257)..(1268): n is a, c, g, or t
  misc_feature (1270)..(1270): n is a, c, g, or t
  misc_feature (1272)..(1274): n is a, c, g, or t
  misc_feature (1282)..(1284): n is a, c, g, or t
  misc_feature (1287)..(1296): n is a, c, g, or t
  misc_feature (1299)..(1300): n is a, c, g, or t
  misc_feature (1304)..(1305): n is a, c, g, or t
  misc_feature (1311)..(1329): n is a, c, g, or t
  misc_feature (1331)..(1331): n is a, c, g, or t
  misc_feature (1334)..(1339): n is a, c, g, or t
  misc_feature (1349)..(1354): n is a, c, g, or t
  misc_feature (1360)..(1364): n is a, c, g, or t
  misc_feature (1367)..(1370): n is a, c, g, or t
  misc_feature (1372)..(1388): n is a, c, g, or t
  misc_feature (1390)..(1394): n is a, c, g, or t
  misc_feature (1396)..(1397): n is a, c, g, or t
catgctgccatgcaagacactagacgatgaggccggtgaggccgccaccaaggagaatttcgttgctatcgggactatccatacgaaggtgatcagactctggaattagaattttggaaaaaccttatggtccattatattttttgtctgagccatactggtgggttagatggaatctactaagacatgattttgactcagcatccaccaactaatttactaagaaatgggattcgtcattcgaggtgtttgtttttacttgtgtttcgatttaaaatggtatatctacgttgtttgtttgtttgttttatgtaccctatatagttactccctccatcctacaataggtgcacatcttagacctcacattttgagaagccagacattctcaactttgactagatttttagaaaaatagtattaatatttttatcttaaaatatatttactacacgcaatgtgactcacctaatgatgtctattcgatatcatatatattaatgttttttcatatacttaatcaaatatagaatccgtcgactcgaagtgcaagatatacacctattttaggacggatgaagtatccaacgagaaatttatagctctactctacatataaataaatcacatgcattctataatttgtccctaggtgaagttttaattgctacgggtggccaatgtacctgttgttgatcaattcttgtgcaaaggaaatcctaatttctaaacacatgttaaatggactggtatggttacttaatgactttagatactatattcttctttctcttttttttctctttagatattgatgctttgacctatattgatgtatttttgtctactaagttttagaacgtggatcgaagtgtctnnnnnnnngttannnnnnnnnnnnnnnnnnnnnnnnnnnnnnnnnnnnnnnnnnnnnnnnnnnnnnnnnnnnnnccnnnnnnncccnnnnnnnnnnnnnnnncnnnnnnnnnnnnccnnncctcnnnnnnncnntntntcnnnnntaannnnnnnnnnnnnnnctnntnnnnnnnnnnttnnaaanacaatnnnnnnnnnnnnnnnnnnatcannnnnnnnnnnnnnnnncannnnncccccnnnnnnannnnnccaatcnnnnnnnnnnnnnccnnnnnntnnnnnnnnnnntcnctnnnnctnnnnnnncnnnnnnnnnnttttctcannnnnnnannncnnnnncctncnnnnntnnnatnnnnnnnnnannnnnannnnnnnnnnnncnannntcccccannnttnnnnnnnnnntcnnctcnnttcatnnnnnnnnnnnnnnnnnnncnccnnnnnnacctcctatnnnnnnactccnnnnntcnnnncnnnnnnnnnnnnnnnnntnnnnncnnttccc

SEQ ID NO: 1449 - DNA, 410 bp, Zea mays
cgcttcatgcccatgccagatcactctgtcgcggagatgagagaagatcaggcggcggccatagatgatcatcgtcatcatgaagatggcgacagctggcggtcagcctcagccgcgaaaaagaggaggcgtctggatcatccgttggcaacggcggcggcgcttctgatctttgtgcagccagcaccaaaggccgctaccaatgttgcagcatgtgaatcacaaggaggagctgatcatgagacaaaggtaccgcacacgacaaccctaacaagccctagctctagttcccctcttcttctggatcaacgacatgaattggatctagagctaaggcttgggactacaccaaaagttacgtacatacatggcaacgatacacgaagctagctagctagttcgtctgcacg

SEQ ID NO: 1450 - DNA, 381 bp, Zea mays
cgctggcgacgcccgtctactacgccgacctcgcggcgtaccgtggcaggctctactacgaggcggccatgatgccgtcccaccagcgagggacggggtcggcttcttcttcttcggcgtcctcgggctcctccgctgggacttttggcgtcactaacttcccgaggctgcacaaggatgtggaggacaacatgttcttcatctgacaccagtatttttcttttgtgtgtacgcgtcttgccttttcttttgtgtggttatcagtttttataaaaagcttcagtacgctcgctgcagtgtgcaaagttcgtactggatatacgctgcatgactgtagatgaaggaaaagaagcaggtttgagttgtgaagaactgaagata

SEQ ID NO: 1451 - DNA, 272 bp, Zea mays
caatctttttagttaatagatggctaacaactatctctactactaattaagtacctattgtaggcgtccacaattcccagtggcgcacggttctgccgtctctccgccctcccgcgctccctccgtgctgcatcaaccgacaaagctaatttaaccaaacaattacaatagcagatttaaaaaaatctatatattaagtaggtgtaggtgactcacacagtttgattatttgctggactctgtaccatggtttgtagtttgtactacatccg

SEQ ID NO: 1452 - DNA, 329 bp, Zea mays
tcctctcatggtgtccagcctgtgggaaccgcccgagtgcgctgtgtactcgtcttccagccacatgcaaagatcgatcgggcggtaacttgaacctcgtcggagtttggaatttcaaccacgccactctgtgccttggatggttcagcttcgccttcatcgtcgtcaagccatggctgcgaagacgctatggtccgtgggatttacttgccggcgtcagagactgctgctagccgcactatgccatcgacccgcgatatcggaacccgatccctggtatgaactcacttccgctaatggtacgtgattagaggattctctagcacata

SEQ ID NO: 1453 - DNA, 349 bp, Zea mays
aatctgaggttagaggatcttctgacccaactaaatcaaacagctccctctgactacataatgaagttcgatcgactaggttagcaaacatagctcgtagaggaatcagcattctttgtccaccaaaagtctcggaaccagccaagaatattattgtagttggtgggtaacctaatgcttgaagtagaagtccagcctggaatcacaggattgtttacatcacagcattagcaataaaaatgaatcagtaagctggtatggtgaatcaggcatagtatcaagcagattatatcgtgcagctcaatgtgtgccacaagaccaaggaatggaaagaagagacgaagtcttt

SEQ ID NO: 1454 - DNA, 176 bp, Zea mays
tctccacggtgaggcttgagcgatccgagcaaaaaaaaaatcatccgcgacgcagcgacgcaggtttgttctctgatctctctggttcttcttttagcagcagggacgcacaacacaagaaaaggtccggttcaagaggctcttctgttgggtttttttagaatcctcaagagaag

SEQ ID NO: 1455 - DNA, 677 bp, Zea mays
  misc_feature (668)..(672): n is a, c, g, or t
cctcatccacatctacgtcaccccgataaagcgcttcctccaggcgctgtgggcggccggggcgctcggctccgtcgggacctacctcgtcgccgcccgcccgctggatgagggcctcgtgcagtacgtgctggaccaccccgccgcgctgtggttcgtcggccccacgttcgccgcgctcactggcctcgtcttcaaagaaggtatgcggatgctgctgctgctgctgcttgttcaaggaaggaagatgttggcagtaacattccacccacaggtctctgctatgggaaactggaagctggcatcttgacgtttcttatccctgggcttcttcttgggcatttggtaactcagaaaccaaccactagcatttatctcctcaaactgttggtatctgcttctgttgtcttacaatctttgtgcagtctggtttaatggataacagcacaaaggcaggtcttttaggactgtggatgcttcttttcacaatcttcgccgctagaaaattccagcagcccatcaaggtaaacaatctctccaaatgacagcttcctgattcgaacctgacctgacaatgtcaccaatcaggatgacgtcggagacaaatctgttttcatgttcaacgctctccctgaagaggaaaagaaggcttggatccagaaactcgnnnnncaaaa

SEQ ID NO: 1456 - DNA, 410 bp, Zea mays
tcgttaacaaggagaggagagaacgggtttcgtggaccgggccggtcttccactatgggcttgttaggacatacaaagacacagccgaaatttgctgttggtctcgagcaaggccacggcccacaggtctgcttgggtttgggtctaggaaaggaaaagaactactctcactaaaatgagagaaaggtgcggtaaaaaatgagagaaaggtgcggtaaaaaaaaccaaaaagagagaaagatgaaaaagaagacttcaaacgcactggcatagacgccacggcagtccagtggcaaccgcatcagtgcgtatttacggagcaaaacagatctccccgtcgacctggtacacagccgcagttggtatcaggacgtcgcacggcaggtcacgagtcttcagagttcagagag

SEQ ID NO: 1457 - DNA, 353 bp, Zea mays
  misc_feature (300)..(300): n is a, c, g, or t
  misc_feature (345)..(349): n is a, c, g, or t
atagggggaagagcttcaagattggttcactgcagatgttcatggacaacaatggaagcactgaagatatgggtcctcgatcttttcctgtcaaggaggttcataaaatagcagtactagatattaggttagctaatgctgatcgtcatgctgggaatattctagtgtgcaaggagagagaaggtggcaactacaagctgattccaattgatcatggttattgcttgccagagaaggtcattatttctctattacattatgtatttggttcatttggctgattaataactcatgttgtcntatgctatgcagtttgaagatgttacatttgagtggctctactgnnnnnaagc

SEQ ID NO: 1458 - DNA, 483 bp, Zea mays
tctcttctcatatttctcattcgccacatatgttttatatggaaatagtttagtagagttcatttagccgtgttgtctgctggtgcctgctggtttgggtacatggctcttcgtctacaggtacgttccctgtaatttagttttggtcctaagtttgtattatgatgtccttccatcaatatttttttaacttttgcagtgcctacttttcttgtgcaggtctacacatgtgcgagaagatttctgtgtcaaataagatgtctggttctgagatcaaaatagaacatgcgttgtccaattgttcgttcttaggggtttcactttcatccggtgtttgaaagggattctctgtaaatgcatgagctgttacggaattggcctttgtatccctcttcggcaacgtgtgaagttgatggcgatgagaacagcagtgcatcatgtaaatttgacaatgtcattcagggctaacaaacatctcgtgct

SEQ ID NO: 1459 - DNA, 364 bp, Zea mays
tgttgttaatgacagcggcacaccggcgaaaccaggggaagagattgatgtctacatattttcattgttcaatgagaacaggaaacctggcatcgagtcggagaggaactggggactgttttttcctgataagagctctatctacagccttgattggacgggccgaggcaatgtggatgttatgactggagcaaacattacaagtgctaatggtacctggtgtattgcttcaactaatgcatcagaaactgatctgcagaatgccctcaactgggcatgtggtccaggcaacgtagattgttctgccatacagccaagccaaccctgctaccagccggacactttaacttcccatgcttcatat

SEQ ID NO: 1460 - DNA, 343 bp, Zea mays
tggggaatgtatttgtgatgctctttagtttgatccaaatatgtactaattatgagtttgtgttgtgtagggaaattgtaatccaagtgaatatgttgattgggattcaatcgaagttgaagacaggtggaccgaggaaggaagacagaatgttactagtgaacaagcattgtatatccagctgggtttgcataatgaggatgtgtttgaatctgctcaaagggaagaagaatcagctcgtcatgttagatggagtaatagagactttttggatggtgaagcatcagctgccattccatgttctgattctgtggtagatgaggaacggattgtttatgacatg

SEQ ID NO: 1461 - DNA, 310 bp, Zea mays
ctgcgctagtgctctactgctctgctctttagggagagagagacgggagtgagagagcagagatggcagctgagagctagactgagcacgcacgtaacgtaacaagctcttctcccatctccgtctctctctctctctctccgctgctcacagaatcacacaggcaagagagagagagagcgcagaagatgatgtggtcgcacgagccggcagcggagcagaaggcggcggcctcggcgccgcctacccggcagcggagctccgtggccaagctgacgacggcctcctcgtccttggccaacctcctctc

SEQ ID NO: 1462 - DNA, 571 bp, Zea mays
tgtgtgcctagttcaggtatggtggctatttgcacttttgcagcctgagttcagatactgatgttttatgatactccagatattctgcaacggtccagggacgtgctttcctctatgcatctcggctttcgttctgaaggtagccctcacagtcacagcctagcttagcttctgtcattaaaaagaacagccagcctagcatctatgcttgcttacctgatgcagtatgccgtatgcggcttaagcccagatttcaagtcgatgccatgttttgcgctagtgcctaactggtttaggggttgctgtatttctgtaggtgcttggcttgggatggtcatccattttctacattgaaagcatcgcaagagtgaagaaactgtcattgagtggtttactgttgtacaagctacggatcgctgaccagttcttcgtgcagtggccccagctgcagcatgagtatcctcgagcgtgctatgcaggtcgtttgatgtgaaggcttggccaaatctggctctgtcatgcagtgttttccatctcagagattcagaatacggtggcaatctatgcacac

SEQ ID NO: 1463 - DNA, 533 bp, Zea mays
gatagtgactgtacaatcgctctgattttatcactgagtacaaggatgccaaattctttgtaataaagtcctacaccgaggaccatgtacataggagcattaagtataatgtttgggctagcacagccagcggaaacaggaagctggattctgcttaccgtgcggccagagagaaagaagagcattgccctattttcttgtttttctcggtaaggatagctcatctcctttagtttggttttctcttcaaggaaaaaaagaatagcagtatatatggatgtttgatcctttatcagcatgtgctaaggtgttttcagttttggtaatttcttttatgaataattgtaccttttataggttaatggaagtggccaattctgtggcgtggctgagatgattggacctgtcgatttcgacagaagtgttaattactggcagcaggataagtggagcggccagttcccagtgaagtggcacataattaaggatgtaccgaacaaccttctgcggcacatcattcttgagaacaatga

SEQ ID NO: 1464 - DNA, 558 bp, Zea mays
atcctacttacgggaccaggaaaggtaggtgcctcttcgcttggctacaagtgttgttttctcactgttcctgcagcacaactgtgttagcttaaaatttctgtgcactgtattcaggttggacaagctctgggcctatccactgactggtcgagccatcctctctacgcgcctggtatgcttgcttgagcttgactgaccttcaccacggcctgaaactgctgcgctggtttatccatttcacccaaacgatggatttgtttttcctccctccatctcaatctctcaggtgggttggaggtactggacgggccagagccggagagcgttttggttggtccccgcgttggcatcgagtacgcgtctcccgagcatgtcgcggcgccgtggaggttcgcgattgccggcacgccgtggatcagcgcccccaaaaacacgctacggccacgctactgaccggtgtctgagcaggaaccgttcgagtcccgttccaacccgaattgccatgtgtttgtatttgcttgacacttcggaatgctgcctataactggctcctgt

SEQ ID NO: 1465 - DNA, 343 bp, Zea mays
tccttttccttattcttctgatcactcacgtgtttcagtgaatatatgtgatttggttgacactactgctatgaaatatgtttaaatagtacatttgtggaaatcataatagcaatcaaggcctgttgtttaaaatctgactatcagcatggaaaccaatggggatgcagtttaagtcgaaatttggctatcgtcataatatagaacacatttgaccattttggatgcttgggcacaaggtttggactggttgtttttttacatttgattatgctttatgggaactatatccttatgctctgaaacacagatgcttgtaatgatggtgcttgcagcttctcac

SEQ ID NO: 1466 - DNA, 813 bp, Zea mays
aaattcctgtttttattatatatacttaaatacgaacatggttttaacttcaaaatgcataacagcataaggtaaatgattaatttaagatagtgcatatgcagagatggtcagaaaaaatattagatattgcaagtttgcaacttatgggtttgaaaatacaagtttgattaaacaatgtacgatggacaaaattattctgttgcactatgaccagatatgattgctggatatacatattgcatatcaagcatgaaagatgaggtctagctgtgtagcatctaattagtgatctactcttagtttgatagcagtatgtttaaattatatgtattggaagtacaacagtttacctttgttaataagcttgtctaggaattgcctatttttacttacagccttcacgagtttgtcttgatcaacatatagatgatggtctctaaatgacacaagttttatgtttctttttttggtatgtaactcactttagaccaatctccttgatatttatcgacttttaggtaatgaatgaaggcccgggtcacatcccaatgcataaaattcctgaaaacatggagaaacagttggagtggtgtaatgaagcgcctttctatacattgggtcctttgacaactgatattgcacctggttatgatcacatcacttcagccattggtgctgccaacattggagctcttggcactgcacttctttgctatgtaacaccaaaggagcaccttgggttgcccaatcgtgatgatgtcaagactggtgtaatatcctacaaaatttctgctcatgctgctgatttgg

SEQ ID NO: 1467 - DNA, 297 bp, Zea mays
tcactcgcccttgttaaaggattcattgtccaattgcggtagctcgcgcggcaagattcggtttttgagtcggtgcgcgacggtagtggtccagattgctgagcccggctcgacgttctggcctgagacctaattcggtggcattgtggtgtggtgatggagcaggggaggaatcaacagcacccgcagcagttgtcgagtccgcctgttttggccgccgcgagcgagataaaggcccctgcggtgccttcgcaacagcccaagccggcggcccccgtgatgtcggtgcctagacag

SEQ ID NO: 1468 - DNA, 328 bp, Zea mays
atccgaaggccacggctccggagcctcatcagcggcagtccgtcgccgtgacgtcgccaccgcggccggtggcggggcttggagacgtgaagcgcctcgcttcgcggcgttggccagagaccatggcgcgggagacggtttgaatgtcctccccgtgcttcgtgactcgtgaggcacacgggcacggcggcagacttgtacgacgtccacggacaacggttgccgatgcagcgccagggaaactcctcggacctgctcctgaccgttctagtgttggagtcctgtggctgtggtgtgtgtgcatgtgtcacttttttttctgtttgtt

SEQ ID NO: 1469 - DNA, 345 bp, Zea mays
aatgaggttgatgagggctctgaaggctccagctctgctgagtctgatgaactgaagcctaacaagagaggtgcctatggtaagcctgggcttgcagcaccaatgcctgtgcacatggaatcgaggccggttgctggtgaaaggagatgacttgtcatcggcatcatgccatgccatttcaggtttataatcttgtggtttgtcatcttgctgctacatttccactgatgtttcatgatggaagtttttttcccctcaaattgtagaagatgtacaactgtggactctagaactagggcagttgtatattcagacgacctctcgggtaattgcactttgttgcag

SEQ ID NO: 1470 - DNA, 878 bp, Zea mays
tcctgatgctcagaatattcagttcgtgctcaacccaagtgctattcagcagtagcttcaacatttattgcctacactatcagtgatttgggggcaagtcgcttttcaagcaggggggaatccggaatgtcagcagaagatacgcacaagtggcggccagggagctcaagagatggccgagaagacagcaacaaatggagaagcctgtcagcaagcgatgaacttcagcgataagtgaggcacggcaacgcggcttgagtgggccaaatgggctgtgtaatagatgttgggctgggcctcgtacgctaaatgatataagcgtcactgaggaaatagtaggggtatggaaaatcatcagaatacgaaaccaattatcgctttcctccgctctcccgttctcttcttccccaaagcttcttctctactctctcgacctattatctctctctagaagcatccgtgatgctaacaagcgtgttccctgcacggtcggttctgtatgctggaactgctcaccgaaggagtccctgttcatcgcatccgaggcattatcatcctgtgcctctccagttgtcagcctcagcgctgtgcttgaccccagcagctcctctagcggctcgtagccgatctctatgttgctgtggctcgaaggctgctcggcgaaatgtctaacaaggaattaaagcgtgttcgaccatggcgtctcgcctgtcctcgttgttgaaccctcgcgctcgcctcacctcgcctctatctacggtgtcgcgtcgtctgcctctcctggtgtgggtgttgacgttctcggctgtcccaccatgtcgggctcctcgctgctcacgctctgtttcctccacactcgacagtgcccatggaaggtc

SEQ ID NO: 1471 - DNA, 385 bp, Zea mays
aatgcaaacaatgtcatttctgccaagcagtctgatgcagccaatcatgaagcccacagcaaccaaggttatctcgagggcttcaaaagatgttcatcagctggattcagggcatacatatttgttgccctttttgtggttggagttgctgctctagtgctgcattatcaccgctccaatgccaacctatgaatttgaatcatggaacatcagcatgcttgattgtagctctagtggtcagtggcagcattggcttcgtccttggagtagttcgctagcgttgcttgcattggaaatggaatagaaatcgagttcctcagcttatctcactgggattactggaaatacatttttgcgaccactgattcccagttatctccacttg

SEQ ID NO: 1472 - DNA, 351 bp, Zea mays
ctctaaatccatttcaggtgttccgatggaatagtgaagaccacctttgtctcgacaacacatgcgaaggcgaagctaagggctttggcttcatggtctgggcgcgaagtgatgaacggcctaaggcgaaggaagaacccggaagcttgataagcgttgctatgaaggaaggaagacgatggtgcccttagaaaatcttgtagtttatatgtatagtaactgaggacatatttgtaattttatacaaaatgtactccgactcatcactaaaaatagaggtacagtgtcatgcagagagagaggcggtcagaggggaaaatgagagtgatccgcctccgaagctatattatt

SEQ ID NO: 1473 - DNA, 527 bp, Zea mays
gcgcttcaacttcagagtaatatcttcggaggattgcttaacaaccccagcaaggctaaattcgcatgacaatgacacacttaaaattctatatcaacataaggtagcatcagctcatagtgcagcagttaaaggtttgtcgccattaaaaccaatgtagttcatattttcccattctttcagtctgttttgttggagttatgcaagcatatgcatgttttccactaggaatctggacagacggcacttggtcgttctctactggccttgatcagagagtaagatgctggaagatgggattagccggccaattcacggaatactcccatgctatcattagcgtgcccgagcctgaaactctagatgttttccatgaccggtgagcaagtctttggcgatgtgtgtttacccccctttttttatgtttctgatagtggcgatgcttgccttgctagggcaaagaggaagtaccacattgctgttgctggaaggggtatgcaaatggtcgagttctcaccacctgaaga

SEQ ID NO: 1474 - DNA, 357 bp, Zea mays
ctccttggcctctttgcttttcttagcataggggaaagtaagtatggtcttgttatagttgatgattattctcaaattacttgtgtattctttctgcatgataaaagacacccaagagacgttacaacggttcttaaaaccatcgtcccctccccctcactcatgccgccgctgtcggctcctcccccataaaaaccatcgtcccctccccctcccttgtgtcgtagctagtccctccctctctctaggaccatagtgttagcatatgcaataagctagtggaggagttaatcgctcatcatgatgtataggtgggctagttttgccacttgagtaggttaatggaggagttaatcg

SEQ ID NO: 1475 - DNA, 1007 bp, Zea mays
  misc_feature (911)..(911): n is a, c, g, or t
  misc_feature (983)..(997): n is a, c, g, or t
tgccggagggctgctgacgaagatgcggaagctggtgaagggcctcgccaggcccgagcccaggtggctcagggccatggaagagtcagtgctctctctctcttttccggtcccttgctgctgtgtgtttggattctgtgaatatagctctacgagaaaaccgcataggtttgattgctcatccatggacaatagatctataatatttttcttagtgatgtataacatggttctgtgttgaaacccctgtcaactgttctctaagtaggaccctgagccctaccgagaaatttggaatagtgccattatcaaacttagactgtaagatcttcgctagttcaccattctcacacgctgtttacagacaaaatgccattcgatacatcaacagagaaaagatcacctgcttggtcttttttgccccttttcgaaatcagaacgtagctgacaccgttcgtggagatctcccattcacttgacggctcgagcctgcgtcgagtctgccgctcctcttccaccgccgccgctcctcccgttccatctgcgttcgatctgctcctcctcccccgcctccgctcgctattcctccatcaccgtcattctgctcagtgtttggttgcatatatagatgtcatttcgtttggttcagttgtgctgcatttgtatcgtcgtatgtataaaccgaagatgcctggtgtgtctatgtatgcttatactaaataatttgtttaatagtgtcatgtcatttgtcttccgtaacaattgttctccatgctgctttctggcttactgaaacaagcgcgcttgtgcattagggcagcaccagtgacatttcctcgcatgatgggaagattaaggggtgtttgtttgggattataatctgtccagattatatagtccaacaacttgancaccccctaagaagatcgagtttctgatgatgtgtatgttaggaagctaaacaaaaagaacatccggattcnnnnnnnnnnnnnnnaatcaagtaa

SEQ ID NO: 1476 - DNA, 263 bp, Zea mays
tccaaatagacaagctcacacgtcttgtcatcttcaactcggatttaataagccagagacgtcaccattagcggccgtcaccgcagacattttcaggtgagttcttacttcttagcctcgaagttcctcttcccatcgtttgttcatcttgtccccggcgcccatgaagggtagcagctccgcgtggcgtatcagggcatcccgggcgcctacagctatgccaaggactacccgctgcgacgctatcccctgcgatccatttg

SEQ ID NO: 1477 - DNA, 752 bp, Zea mays
  misc_feature (631)..(635): n is a, c, g, or t
  misc_feature (637)..(645): n is a, c, g, or t
  misc_feature (650)..(668): n is a, c, g, or t
  misc_feature (674)..(700): n is a, c, g, or t
  misc_feature (702)..(708): n is a, c, g, or t
  misc_feature (712)..(712): n is a, c, g, or t
  misc_feature (714)..(729): n is a, c, g, or t
  misc_feature (739)..(740): n is a, c, g, or t
  misc_feature (744)..(744): n is a, c, g, or t
actctagtgaccgagggccaatcggcaccacctgggtcttctcgtggcctgtcaccgacgggcccgccggcgccgacgcgaacgtcgtcggccatcttcagggcaccggcgttcaagtcgccacttaccccgactacatgtggcactactcccttgggctggtgttcggccagggaagcaggtcagtccccgcgaggtcgttcggaaattgtagattttaaatatttaaaaactaagaagtcagaatagaaaatatttaaattcatcttcatccaacgtcatatgaaaatttttagattattctttataatgcaactgtttttagaggtaggtaggcctattgcaacttgtaattgtttttttataggtggacgaccccttagaatacccgcctacctttgttaatttaatcaactaacaaaggcagttgtttgtttttgttcacgacacaggttcaatgggtccacactacaaatacaagggacttccaaaataaatggcgagtggagcattgttggagggacaggagaacttgctatggcaaagggcacggtcagacgcacagaagtttcgtatacgggaaatataaggatttcagaactcaatatacatgtgctttacactccaatgnnnnntnnnnnnnnncccannnnnnnnnnnnnnnnnnnctcccnnnnnnnnnnnnnnnnnnnnnnnnnnncnnnnnnncccncnnnnnnnnnnnnnnnnccccccttcnncccnccctcccc

SEQ ID NO: 1478 - DNA, 351 bp, Zea mays
tgctcctcccgaccgccaccatcctggccttcgccatcttcgcccctctcctgaccgacgacggcaagtgcagcacccggttgaaccgcatcctgacggcggccttcgtggccctctgcgccgcgtcctgcgtcttcttcacgctcaccgacagcttccgctccgcctcgggccggctccggtacggcgtggcgacgccggcgggcatccgcacgttctgcggcggccaccggaggaggaggaaggggccgagggagccggagctgtacaggctgcggtggtcggacctgttccacagcgcgctggcgctggtggcgttcgtgacgttcgccgcgtcgcaccacgacatgg

SEQ ID NO: 1479 - DNA, 418 bp, Zea mays
tctccggcgacgactggcgacagccgctgccggcctactccaggtccccaggtctacgtcggacccttcgccgcggcgagcaccaccaggtaacgtaacccttattctctccctgctgtgcgaaaccgagcacccaaaccctaatttaagctatttgtattcggatctgatctaattactacaagtggatatgtattatgcctactaactttgattttttggggaaaaatatcgggtgtacagagatctgtcactgattttgcagtcctcttgtcagatggcgagcacggggcggtcgatgctgctgtcactgctcctcttcgcagtgacgctgtcgctgctggagatgtacagggccaagttcgcctcgtcggagctcatgaccatcgccggtggattcgtctgctccctcctattc

SEQ ID NO: 1480 - DNA, 496 bp, Zea mays
cctctcgagcatcaaattgcacttgaatgaactgaagaactacacgtacgggaagcacatcgtagcacgtgtggagaagctaatcgttacaggaggtaagcagacggcaagtaatctgtatgtggcgatgcataataatccggcgcacttttcctgagccaaaacacctgttggtttctgattttcagagaatcgagcaaggatggcgtccatgagtggccagcatcagcagcagcaacctaacaactgtacagctgtagacgaacactagtcctgtgtatgcgttggcgtcaaatacggactgcacactaatcccttgttaggcattggcgtcagatacgacgagcaggtggtataagtgactccggaggaatctggtttttaatacatggtttatttaatagggtacttgcagataaccagggatttatgttacctgtatctaaccaggcgtggtgtttttcgggaactcaggttgttagatgagagcagctgt

SEQ ID NO: 1481 - DNA, 754 bp, Zea mays
cggtggtctcgcttccggccttccgcgcctgtcgcgcgtcgaccgcttcttggacaaccgcgtcatgggttgcatgtgctcatcggaagcgtcgtggctggacaaactgtcggtaaggaaccacctcggattcaccttctctcgcttcgttgtcgatgcacgcatgggacgggacggggtaggagcagtggcctgctcggcgtatcatgtagtgccgtgtcagcctagtatcgagcctggctgggcgcaagggcacgggcacactgtgttggggggacgactgctagcatttcttgccgccgttgtggaccatgggaccttcggggcgcgccgtcggcttggatagaggtaggagaaagatggctagctgttgatctggtgttggacgagtaagattagaaccctgcgtaaccctttgctctattagattcagaccgtccaatttagatcctacggcccgcatggcgtaacggttcgattggagtctaatataatctggtgcgtctgtagcagatcggacggatcgagatgaatctgagtatttagaatctaggcggtcgcatctggatcctacggctggattgacactgagtacctggcgtgatccgcagccgtccaatcctaatccgatggatggggtcacccgataccccttcgcggatacattttgttaaagagccctggaaaatctgttaataaacccgccgtccttgagggagtagcttgagtgtggtagggttttgcaaatttaacc

SEQ ID NO: 1482 - DNA, 430 bp, Zea mays
  misc_feature (422)..(427): n is a, c, g, or t
gctctccatcttctgtgtgcttcattattccggttgcctctgagtcggtccatggcgtcagcactaatgtccacctgatgttccattcttaattcatctgcgtgtatggcattggcaagagcacgggatcaccagaagcttgtgtgtgccgttctcctcatcttcgccctgcagatcccgttgctgctcagttcctgttccgcgcacgccattgctgtcgtcgaccctgcgacggccgggcggcgtcttctatccgtgcgcacggtacaggcggcgcagtccgtggaggcgaaggagacggtggtgcggcatccacggagcatggagagaagagcaagaagcaacagcagcggctcggcgccattcatgaacgcagtgagcaaacatcaggtgccgagcggagccaacccggactcaaactnnnnnnagc

SEQ ID NO: 1483 - DNA, 768 bp, Zea mays
  misc_feature (381)..(383): n is a, c, g, or t
  misc_feature (765)..(765): n is a, c, g, or t
tccctgcccctcttcttccttctctcttgcctgcttatcggccatgctctctgcagccaagcccacaatggcagaacatcaggtattcaggcccttcccctccttacacacaaaccctgacttgtttatttcctctttccttgcacgagactagtcccttctttcttttggcccttgctttttgtttgctttcactgcttattcactcatttcaatctaatttgagttgaagatgctgactatgtggtgcaatttcctcaccaagaattgactactaagcatataattttgccgaaggtcatcaaggtacctctctatctctctctctcaactgtagctaagtagtgttctgcagggttctcaagattcaaaggcttgcgnnncttttttattcttttacacatgtatgcaacgaaaacattagaaggagaaaatgccaaccacttgcctccaagattactcctgtaatatcactagaagaaccttagaatagaaacaaggaatggaactaatgtttttttttaaaaaaaaaagtgcaataaaaccttgtattaagttaacccacaaagtgctcagtgaccttaaagcaagtatagttagcgtgatattttcacgtgccttgatattagggtctaaacaagggcatactgtcaaagtatgcaaggagaatgttgatcggctcaattgctccaatatgtacatacaacgagtgcagggggtgtcgattcaagtgtactgctgagcaagtcccagtggatgcaaatnacc

SEQ ID NO: 1484 - DNA, 348 bp, Zea mays
atcacatatatctaatacatctatagaagggtcggctgatacctctcaagcaagtgtagcttcagatagcacagatggcaggccagtgaagtacaagctggtagccgatttgctatggcggttgagcaaaaaaatttatacagatgaagaagcacttctcacagagatagaagaaccaacaagctactgtgaagcctcatactatcggaagaacagaaagctgatatcctaacaaagtcattaccagcagcgaagctggctatgaagctgcacttgataggtgttcatgatttgggaccacacctagattggggaggagattgttagagttaggtcccgtttaaatct

SEQ ID NO: 1485 - DNA, 873 bp, Zea mays
atagcttagcggactctaatctgaacaacggcctccagcccgggcgctgcgaggtgttcttggagccgcagtccgaggagatcaggctgttccggctgagggagttcggcagccgggacggtagcgaggagctgagccaggcgagctggaggagccggagagacctgtgaacagacacactcggtacaaggtcattaacattctttttttttggggggccattctttacatgtaattatctcgtttacatgattctttcttccttcttacttttcgtttgttactttactcctccctgaggcaattcttgttcctggtggaatagattttgcattttcgttcgggagataagtaaatgaatcctctgtcttgttttttctttctctccagtgaatagtacacagaaagtttggttcctggcattctttctctgataagcactccagtgaacaatcttgatatgcttcgtcgctgcttttggagcaggacagttgctgaacttgcactgcaagtctctatacaaggattagggcagcaggtgcaggtcactgtacgcttaagtgacaactatactatactatacatacaggcgctgcgttggacgggcacaagtacaatgattagcgggtgctaatttgtattcgcggattgcatgcatgcatgaatgcatcctacgcgcaattattcctgccctccgttttgtcaaaaggctgggcgggcgcatatcattgagatttgcatagatccctcgcgcgtcggtcggtcggtcaggatcggtggatcgccttgacgcggcggcaataattcggagccggcagccacatgatggagagccggtggcggatggcaatgtcttaccaagaaatacgcgta

SEQ ID NO: 1486 - DNA, 370 bp, Zea mays
ctcttgccaacaggaaggaatcggaatgtgtttggctccaaaaattcattgatatcaagctggaagcatgattggaggtgacatagattgcagctacctttacatctcaagtaaaattccagttacccctttttgagcctgtaaagttaattttccacaaggaaagatctgacgaacatcagaattgggatggctgtagattggaacattgaatgggccttgctcctgctgctatgctcgctattgtatctcttttatgagctaatggagtagcagtgaatgtgtgccttcaacttcactgttttctctccacagtcattgactctgatgttactgctgtaaaacaagtaggactaaggcatagtttcag

SEQ ID NO: 1487 - DNA, 509 bp, Zea mays
ccacataaccacacgggcgcaagggaaggaagcttgagaaggcaagggggaggaggaaaacctctgcttccacctcggaagagaagcaacgaaacaacgaagagatgaaagagaatagcatcaaagaggggtgactgggtgagtgcaacatatatatatatatggccgtattttttgtattttaaccttttattaaaaaatgctcacgtttagacctctaaataacttaattttgtttttggatcttttgctcggtgtcaaaggctgtggcaccgaggtaacacggctcggcgtcatagatcttggcgttgaggtgcgtccttcgctggcaacaacagactgacgtggcgtcgacgtggccgagctcaagtcatgattcatggcactgaggtccagtcaaaatcggcacctgggcatgcatgttacgacgttacgtatgtagcgagcatgcatttggacttttggagcctcgtcgttttcgtactctagccatgcacctactaatgttg

SEQ ID NO: 1488 - DNA, 409 bp, Zea mays
catccgagctgtggcaatggtgatccatcgtccttcgcgcttccccggtgaagtcggctgagccgtcctcgctctctctgttgtgtggtcgtgcgtctacccccgcagcccctccctacaatgccccttcacggccatggttgaccgaaccgccagcctcggcacgacggcacagccggcctgctgcccggtgcaatggccagggcagagcccctgcgcgccgaacccaacgtgcccaatcgccaccgtaagccccgctcgccggcgagcccacccagccgtgccctgcctcccatgcgacccccgtgctttgcaaccactcgttccgtcaaaggtgtaggagagaggaaaatatgtgttcgtgagttgaagaagccagaaaagtgaaccgttagtctattcccatgat

SEQ ID NO: 1489 - DNA, 668 bp, Zea mays
ttaaggtctgttctttcatacttgatatatatgctagacaccatagtcatgttttgttcatgttgttatagagagttgctacttgtgtatacctctaactactcatgcagctgactctagactttgatctgcatctagagggcttcacttatgtgcattgacctgacagatttccaaactatgtcaccttctgaaagttggagaagaatgcttgcaactaacaaatttaactcgcctcactcctcacttgtttatctacggctctaggtttaggtgcggcaatggcggtggtgatccactccctttgcaatcatcgagagaccgggaccgacaagttcatggctgttgggggccttcctcttccgaaggtcctcaaaggtacgactaaccttttgtttttagtatattattaaatattacaggagcttcgtcataagaaaaacttcgtcatgaatatctttttccccgccgaaggtcctcgatacgaagacattgtttgaaaacgataacaacgaatgccgaagctacaactgaaggataacagcttcaacttaggatagcaacgaaggtcaagcataatgccgagccgaagaagaaaagactagttgatccctggtgatttatgttacgattatgtgtatatattaaggtcataaatgtattgttat

SEQ ID NO: 1490 - DNA, 262 bp, Zea mays
ggagagagcatgtaaaagacagaatttgcagcaagaggattggagcccataacagtttgtttagtggtattctgctgctggcacacatgcatgcctttgtggtgccgcaaagtgacaaattcatttaagtgaacggctgtccagtagcattcactgacaacgactgttcgtttagcatccaacagtgctagctacatgcatgttgtagttctctgctgttgctgcgatttttaactgaatctaagctctggaatagtagaat

SEQ ID NO: 1491 - DNA, 388 bp, Zea mays
gttttgatctgcagcgctcaaagtccgctgtcgtcgtctcaatcctcgtagagtcgaagtcatagaagaatcaaacagcgcgccggtcctctctcggatctaggcgaggcgagctgcggcgccggggggtcgcgggagggacgaggatgaactggatcgggcgcaagatccacctctacaatgtcaccatcggcctctacatgctcgattggtgggagcgctacctcttcagtatccttctcccgattgcttctctggcggtcgtgccccctatcctcctgaaatcagttggttaattcagcgccgggctcagtcccgttgtcttttttttactggttttgctttgctagatctgagcaagctgtgaggattgggatgtatcgaatct

SEQ ID NO: 1492 - DNA, 355 bp, Zea mays
atgcgatgctcgttttgttcgtccgcggaaaggtatatatccgttgcttagcgggggtgtgtgtcgttgaatttggctcgtttttttggtgtgtcacggcagcttgcccggccggtgttctcaaagcgggggaaaaaaaaacggaatcgtatccatgcttatcgcgtatcggagtcctgtattattgtcctcctcttttggaaacagaaaaataaaaagagtaagaatagcttcgggaatgcttgagccacggcagctcaggtctacagctcttcacccaaggtgagtaacaggaagaacaactgtttgtttaagcaaaatgaatagatatcatcaccaagcgcctgtagctcag

SEQ ID NO: 1493 - DNA, 370 bp, Zea mays
agtttgtggactctattcgtccaactgttgcaattgttagaggatcttttgctaaggaagagagtttaccaaagctgcctcacagacgaaccccaaaccgtaaggtcaaaaggaaaagattggaaggcgaaacaactacaacggaaactacagagaaagacgttgtcgcgaatgactccccccctgtatgttctgcatcgggtattacaaggaattccgataatatgaagccgccaaagctggagtccaagtgcaactgtataattatgtgagtaactcggtcacatccaagattgaaattcctacatgcttggttaaccccgtcatcagcagcgatggagttcaacacagtggatcttccgctagatta

SEQ ID NO: 1494 - DNA, 432 bp, Zea mays
tcgattcttgccaccattccataaaacccccttcacaagaatgaggggccaaatgttgaaggttcacttgaagaaacagcttgaactaaaattctctagcaaaaacacaacccaacagcatatggttcaaggtttcatgatcctgatcacataatgaacacctctcaagatgatccaaacctcttctttgcaacctatcagctgcccaaacattcttacgagcgaccagccacgtgaaaaacttagatttcggaggagctaagtcttccatattctgtaaaatggctcaaactcaattgacccaataaagaaacccctataaccttcctttgaagaaagttttacattgacagcttggcgaaagaaatgcttgtcttcaacatgaggtcttagctgaaccaaatcaattaaatcccacaggagaagatactc

SEQ ID NO: 1495 - DNA, 517 bp, Zea mays
caggccccaggctcagcggcaacgtttgcatgcctttcgcctccgggctccggcgctcgcgcaggcagccgttcctgcacccgacgagccacggccaccgggcgcgaagaaacaggtaagcgtgctggagacgctgggtacatttctctcatcttatcttggacaaaatgctgccttttgcacgcgccagtccatggatgtgcagaagttattgttgattttcttttctgacagctatcgggctcgaaaatctaccgtcaccagctgggctgaaatatccagtcaaacaaagcgcgctggcgatctccagagcttccttctctggtctgccaacaagcaacggccgttctccgaaaaccgccagttgacctgaccaccagccacccccccaccccctcttctgcggcaactgcaacagatctacagcaggtcgggcgtgtcagagcctctctgtctctgcgctttgggcggccaggaatccagcgagaactgcatgcactctgctctgcatctgcat

SEQ ID NO: 1496 - DNA, 547 bp, Zea mays
tcttgctgctgcattgattgctggttcatcagcaaagccgccgccgccgacgattggtactacaagcagtgctagtgccaaaggtaactcgagcacgcccggaactcccaatctcccatcacgtggtttttaaaacaaggtaaggtaaggtaaggtgctattgctgtggatgcgtgacaggaatggacccttgcgtctacgacatgatgaagaatctgcgggcggcaaaggccgcgcaggcgtcgggagtgacggtgaagactgagcccagcagcgatacgccgtcgtcctgcaaaaagaggaaggtggtggaggatgccacgaaacaggatccgccgcgccccgagccaccgcattattcccctccgggcttcttctccgcgcacaagtcaccgaaggttacccgtgagcctgacggcggcgccacctccgactgggagcgggcgcggcggatgctacagagcatcgtcacgccggcgctagagcagacgttctcggtggcgaagccctccgacgtcatcgcctcgagctacacgacagcgctaca

SEQ ID NO: 1497 - DNA, 494 bp, Zea mays
gatgatggcagtgttgttgctccctcccctgcactgcctcttccctggctcctccgatcccccaccgttgcccatccatcatctccctctcgctctcgtttatgctgttgcctgcattctttttcacagtaggcatgcagtactacttttggttctctttgcaatatatatacctgcaggtttgctaatcaagcctaagaatcttccgcctggagtggactgtactttcaggaaaatcgttctaaaatatccggtctgcatcttcggggaggacgagtgggcggcatcacgtcgcgacgagccgacgatgcctcggtactccaagaaacaggatcccatcgatcggtgctcaagctcgccagcaaccaaagaaaagatgcctccaagaaaaataatttccagctttcccaattcaacacatgtggattagcacaaactctcttgtttagctttgatttagatctagttcctctgaattggttccacctaactct

SEQ ID NO: 1498 - DNA, 715 bp, Zea mays
  misc_feature (687)..(689): n is a, c, g, or t
  misc_feature (699)..(705): n is a, c, g, or t
tgctgggaatcggccgatgggaatgttcaccaaaactggttggaaaaatcttagaactaagcatgaagaaaaaacaggccagaagctaaccaaaaaacaattaaagaataagttggacaatatgaaaaaggaatatacatggttcatggagttcaagaattatgccactgggcttggacaatatgaaaaaggaatatacatgacacacggatcctcaatcacgcgttagcaaattttccttcttttcccttgcctcctaaaggtatgcataattctttactatgtaaccaatacttgttttattatttttctttgctgatttcattttacaggaaaatattatcttgtggattccggttatccaaaccgaacaggatatcttgccccttttaaaggaagtgcataccatataccagaatttcagcttcgttctgggcgtcctcctcaggggaagtacgagatgttcaatttcttgcattcatccctacggaatgtcattgagcggtcttttggagtcttgaagcagaagtggcgtattttgaagggcatacctagtttctctactcgtactcagaagcatattattattgcttgtatggcgttgcataattttattcgtgatagcaatttgcatgatagggagttcgatagatgtgatgctgatgaggagtacctactagaacagannnatgccacaannnnnnnacaaggagat

SEQ ID NO: 1499 - DNA, 353 bp, Zea mays
  misc_feature (342)..(348): n is a, c, g, or t
ctatggcaaccacgaccataccaaccaaaacagaaaggaccgctctcaccttccgcgaatcgtctcgcgccgagatgcgattcgaaggcgccgacgtcggcagaggatggatgagaccgtggggtgccggtgtaacgggtcgcgacgacgtcgacatcaaagtccgagtaaggcggcagcggcggcggcgcaccgtcgccgcctgggaaggctccacggtagtacgggttgtaagggtccgacatcgtcggctcctcggcggctagggtttcagcacgcggtaagctggggaggaagcttaacggaccggcatgcgtagtgatggcggtgggtacgaacatnnnnnnntaacc

SEQ ID NO: 1500 - DNA, 384 bp, Zea mays
ttgccgtcctgttgcggcagagggcgctctcgtcgccccacgcggtctcatgccgaaatggttcgtactgccttgagcggttggatccttgggcgttgcgtatgatagctggttggtttgtttgttcttttggttggggtcgggtgccatgtgttcggtagaatgccaaaaccaagcgcgcctactgcagacattaccgaacagtggtggtatagtctctattcgcaggttatcagtagcataactatgttgtgtttcatatctgattgcataaatgagcagttggaaaaggcgatacttttcctgctgggttgtgattgttgttttcttttctcttttgatgaatataccatagctctggagaaatttataatactaggaaca

SEQ ID NO: 1501 - DNA, 486 bp, Zea mays
cagcgcgacgtcatctccgtccgcctggggaagacgatcaggtaggcagcagcaggatttcggtttttaacttgttggcgtgatctgttgtgaattcaacgcgaatgggtagcagaaagcaggagaagggctggacgacgcgcgtcgggggcgaccgccacctgatgtgcatcgaggatccgttcgagaccggccatgacctcggccgcgtcgtcgacaggcagaccatctggatcatcagggaggagatggagcgagccgccaccgtgctgcagaacgacgacgacccctgcgcgactctcttcgagccctatggttatgacttatgagaaatgactgactgattgatcgatcgatcgatcggggctctagtgctggctgctgcagaaacgaggctctagtgtttgttgatagctcagatgacagttctctggacagtgtgacgatattaataaaattccggagacagaagaaacgatatgggaa

SEQ ID NO: 1502 - DNA, 1016 bp, Zea mays
gcatcgccaggtacctcctctgcctcccccaatttctgttgatgatcagcgtccttccagtgtagaaaggggaactgaacctaattataacccaggccagaattttagtacgttgtccaatgtcccattgattcaagaaccactaaggtcaacccaatcacaaaggccaacccatggggtagcaagtgtagagcctatccaggatggctgcgatttaatcatagaacaacgctgtaatcaacataatcaggatggtcccacttccttcgcagtacatatcaatgaaccactcctagtcggtcagccatccgcgcacaagcagggggactgctctgatgcgcagcttcaagaatttgttgcacatattgctttaccaaaagatcaaccgctaatccattcacctcctattgataccccagacagttttagtgcattattggggcaatccactgaatctgctgctgttttgtctaatcagactactaccttcaaaaagagatccagtattagactagctgccaagaaaaagactatgatggggcgttccagggatgccatatccaaagcccaggacatcctgatagctaagctcaataatactgcaacaaatcagaaacaaaaccaaaactctattgcttcatgttcctctaaccaagataattcttttgaacagattgctcgccttttctcaaggccgctaaccaaagagcagatggaggcaatcatggaattggtcaaccaaggggtagagaagacagggcataagaggaggggacgcaaggtgactcccattgcttccccaaccatcagggctgtgggggatgcctgagatctcttcgcggtggcagtttttattcttatgatgcatgtgatctgctgctcctggttccctcagtggagtgttttagttctgtctgtagctgttccatttgaagtggcgtggtcttggctgtattggcctgggcgtcctgtgcttttgtgtcggctgtcctccattctgttgtgtggggagagct

SEQ ID NO: 1503 - DNA, 1326 bp, Zea mays
tgcaccataactgtgtttccacatcagaggaaataagcgactcaaatcactatgctcccccatggtaagcccattaccgccatgagttccgttctctgaatatgctgcagctttactttaatctctgttatatactgcatgcactaaaagctggcgtaggaaacaggagtatgctacaactcactccgtctatctgatccccaatcacaacaactcgcaccttgttcctgctagtgtaaattgtaatgaggaaacaactatcatgacttcatgagccctttgtgttgttttctcttccaaaaaaggaagaagcaacggcggtgagcgaaaatgtcgtggagacgagaaagcaggagcagtgaaaaccgagagcagaaaagctaaaccctaacgcgggcaacacctttttataggtcacagccccaaaaatataaaataagggaaaagtaacatcaatcaaccgtcatttccacaacagtcagtttttcatgtccccagaaaacactcaactgatgatcgagatcagcgttcggaccatcccctagactttggttcccacctgtcagaacccaacatgcagttatgttgtatcgcggtttgcggagtagattaacattatttttgtccaggaactacaatcccaaggatgggcggagcggtaaacccataaccaaagaggaggccatgaaagaactaattgaagtcgtaagtaaatatgtgcatgatggcacacatagaagcattgtaccggtgttaccgccttggagtcatatatttttctgcagcatcatcttgtatttggttggaaccaggtcacgaagacaaagccggacaacttcactcctcgcatagtagagaaaaaagatgattatatccgagttgaatatgagagtcctatatttggggtaggcggcggcgggtagcaccttgttttcctttttgtgggcgttactagatgtgcgtaaatgtggtggccatttgatatcatttgtcgatgctgaagtttgtagatgatgtggagttctggttccctcctggcaacaagaccatggttcagtatcggtcggcgtctcgatcaggatttatcgatttcaatgccaacaagaagagagtaaaggtatgcgtgcttgtatcttggtaccggtttagctctgtatactagtggatgacactcgtgattggtttcgtgtgcgtcttaggagctgagattggctttggaaaagaagggctgggcttcagaaagcaacttctgaattgaagtgagaagggtggaagaggtgcaggtgcatgctactcagacgagccagcacaactgggaactggatg

SEQ ID NO: 1504 - DNA, 351 bp, Zea mays
gtatcaatggccgccatgaagcaccggtcgccgtttctctcccctctccctctataaaacgcccggactctctccctctcttcctcccgagttctctctctcacgctctcctctctctccctgaccgcgccgtactcagcttgccgtcggagctcgtcgccgtggtcctgtccgccgtccgtggagcctcgccagagcagtcgtgcccgtcgccgtcaaatgccctcgctggagccccacacgacatcaagaatccctgcccgccattgccgcgtacctatgctgcttgccaccgtgctgcgcaacccctcgccgaacaccttccctgcacgcgattaacccaaggttgaa

SEQ ID NO: 1505 - DNA, 1042 bp, Zea mays
atctaaagaactttacaataataaggtctgattttaccctatgttattatgttaccagttccgtcctagttttgattgtttttccgtaattttcctcattgtattgttcccttgtttcttctcagatcaaagcacattctagtgttgctgggcatatgctctatgatctagaagaagtcactagatcttcttcaacagaaccaactattgtactcattgacactacagggtgattactatctgatgtttcttgctgtttcagaacactattgtaattatatttgttgagctgttcatacatagagattttactacccccctgctttatatgctaagtacacctttacaaaaagaaaatgagattattattttctttgtagaaatcgtatttgaagaaaatagttaggaagtgtgtggtgactcttttgttgttcgaaaaagatgcttgcttttttccctgagagatgaaccctctggatgcttttcacataatgtttctaacattttcaaatactcttaggtgtgatatggaagaagtaaaagatgaagaggagagcaccatgaatgagggcgaggcagcagtatccattgcccatgccaagttgcttgttgagagtggcgttaatgcttctgatattggaataattacgccttacgctgcacaggtttttggtcccttagactccctatgcatattcaagataatagctaattttaccagtcatgcactcatgcctgcagcacatgatcttctggtgaataatcatgctttatacttcctgtattgtcgtcatgactccctatgcatatgtctacattcatttgaatgtagacggaagaaaatagggctagaaaatatgtctacattttcttgcaactgagctttcaattcatctggttgttttgcatttatttatggttggcttcttgagggcttcacctagttctgaaggcctgaattattgaatggctcaataccataggtaacctgcttgaagatgatgagaaacaaagatgccaagttgaaagatttagagatatc

SEQ ID NO: 1506 - DNA, 354 bp, Zea mays
ggggcgtgcttccccagccttgaggacgctgatggcatggagttcctcgacagccaggaggcgatgacgtatcacagtcccaccaacgcggccgagcaaaccattagcgacgttgctcaaggcgtgcttcttcggcctagagatggttgctgcatctgtgtagtaccatgctttcgtgcaaagaagcagctgctagaggaaagggaacagatgagtggagtgtgggtcccacacaactgaaggataggcttgatgcagtggtgagagctgtctcactgagtcaccaggtcgtaggttgcgggggaaggcttgcctcacctagacccctcatgtgggagcatccggcactctagg

SEQ ID NO: 1507 - DNA, 298 bp, Zea mays
  misc_feature (288)..(293): n is a, c, g, or t
aggcggcggaggagcgggagcccctctcccggacgccggcggcggcagtagcggtcgagggtagcggcagaaggaccgccacggcggtgatcgacctcagcagcagcgactctgattccgacggcgagggtgcggtcggaagcggtaagagggtgaggggcgttggaggagacggctccgcgactaagcgggctagggtttcagcggtcgtcgatctgcccccgggtttcctcgagccaatcccgccgccgccggtgccggtgccattggcagcttgtgcgacgaagnnnnnntggaa

SEQ ID NO: 1508 - DNA, 372 bp, Zea mays
ccttcaatctcgcgttgttgctggtcatctcggattttaacgatgaactggagatctgatcgacgaaccggaagcgcggtaacgaagctctcgccaaactggtcacgatgatgttttgggttgccccgaaagatgaacaaacggagagaaattcctcaccggagttgtcgctatagtttgggcaagagtcaaacttcgacgagctggttatggaggcttatggctgcgagcttagttggcggcggactgctatggcttggatggcggcggcgctgctgcgaggctattgaggatgagtctataattgatggcttgaggtgttatggtggcatatatttatataggctgggagatgggtggttacatgataga

SEQ ID NO: 1509 - DNA, 396 bp, Zea mays
aaggatgaagccactgatctgtgcttgcttagcaaaggagccagagaaggtgctagttgtcggggtatgtgggaagccaaggcttggggctgtccaggggaatgcgtttggtaatgctttcaggtatgcggcagaggagattggtgcggactatttccatgacatgtttgagtcatcgtggattgttctggatgttgttgctgtcagttctttcatgattcgattaacagagaagctatgatcagatggcacgaggtttatacaacgtggatcattctttcagttcccaggacgggagagtcaggcatgatcctctccaaataaaggtgctggagatcaggtgctagacgatatgcattttcctaaataccagtccacctgccatttcactaacct

SEQ ID NO: 1510 - DNA, 372 bp, Zea mays
gatgtttaccgaagaacaagatttgcttccattgcatttatggttgtaccattcaccagcttatggtggcacgtaggatggcattgtcatgcactcatgctaaaacgatgaagactgtttaagtagacctagatgatctttgcggatgggagaaaagtggcagtttgcaaacttataccccaggaaaggagaagtggtttaagaaatcgtttggattcaacatattggatttatggtgagaccgtcacatgatttttatttgtatgtgggcaactactcgtgttagtgttgaggaaaactcatacattcggatgtttcaaatacgtctttaaggattttgataagggccctatttggtttggatacttcgaa

SEQ ID NO: 1511 - DNA, 362 bp, Zea mays
cgtgctctgcagtcctcctcctcgtcggccgtggctgtgttctgcaggtacacctccttctcctcctcgtcggcgtgctctgcaggtacacctccttccgtcatcacgtcgccgcacagcgagtcaagctttgcgccatcgtcgccgtttactgcaaacggtgcccgcttcggactactgtttcgtttgagcttgcggaaggagtctttgggtcagtcagcattgtaaaaagagaagaaaaaagaaatcaagatattgcagataagatacctggttaataattaaaacaaggacgaaatagcaccatggggcaagaccttgaaaggcaattcgtatgaaactgtcaaaatcgtagctctatg

SEQ ID NO: 1512 - DNA, 595 bp, Zea mays
  misc_feature (66)..(67): n is a, c, g, or t
  misc_feature (120)..(120): n is a, c, g, or t
  misc_feature (136)..(137): n is a, c, g, or t
  misc_feature (431)..(451): n is a, c, g, or t
acgctgttgcgtcatgccctccgcacggcaagaacgcatcctggtgcggcctcagccttggcctgnngtttcccagcgccgatgcagccctgactccgacgagcgcgaccccggccctgncgcaacgtgtcaccgnngaggggtgcgtccccagccaccgcgacatcgcttcttgacgcgggcgtaacttgcctcagcagcgaccgcgaaggcgctctctcgcaagtcgcctacggccacggccacctgctatccgtggtgggaactggcggtgcctgtgacggcctccgggcctcgtcggcgagggaccccgccaggcacgaattttcgtgtagggatgggacagcgggacagcagcatcctggccacaccgtcgtaccatgatccggtacctgacatcgttttttttaacacaaatgctcttcgttgtnnnnnnnnnnnnnnnnnnnnngtcggcgagggaccccgccaggcacgaattttcgtgtacggatgggacagcgggacagcagcatcctggccacaccgtcgtaccatgatccggtacctgacatcgttttttttaacacaaatgctcttcgttgtcctattcttg

SEQ ID NO: 1513 - DNA, 266 bp, Zea mays
gcgagagaagcataggagcgtgggctacggacatggcgaggaagttgtggccaccgtaggcggaggccggagggacgcgttgagtcgttgacgcagcatctacaccatcgcaggtggggctggccggacacagtggctgcgttgacgtgagtactcaccactggtccactgcagacgcgaaatcgagcaattaggagctcgggttgcggcggaactttgcgcggtgaagaggatgtttttcgcctccgcaagtttgggagtgctag

SEQ ID NO: 1514 - DNA, 410 bp, Zea mays
  misc_feature (356)..(357): n is a, c, g, or t
tattgagtttgttgccaccataaacctgcaccaagatatgaaacaaatatcacaatgaaaggagacttactgattgtccaagcaagactaaaaaaggctaggagaaagggagccagtgcaatcttgtacgagtttcttctaaacatgcaaaagctaggagaaatggagcgaggtgcaaccttttatgtgtttattctaaacttgcaaaagttatctatattttcgtatagagtgagtcaggtagcattgaggatacatcatagcataaataactttgcattggaattaactatctcttttgtattggattagaaagtaacgacaatttagccttcatcagctattaggttcataanntcttggtgcaggtttatggtggcaacaaactcaatatgcaccatgtgcaaact

SEQ ID NO: 1515 - DNA, 410 bp, Zea mays
  misc_feature (322)..(322): n is a, c, g, or t
  misc_feature (325)..(325): n is a, c, g, or t
  misc_feature (356)..(357): n is a, c, g, or t
  misc_feature (359)..(360): n is a, c, g, or t
  misc_feature (370)..(372): n is a, c, g, or t
tattgagtttgttgccaccataaacctgcaccaagatatgaaacaaatatcacaatgaaaggagacttactgattgtccaagcaagactaaaaaaggctaggagaaagggagccagtgcaatcttgtacgagtttcttctaaacatgcaaaagctaggagaaatggagcgaggtgcaaccttttatgtgtttattctaaacttgcaaaagttatctatattttcgtatagagtgagtcaggtagcattgaggatacatcatagcataaataactttgcattggaattaactatctcttttgtattggattagaaagtaacgncantttagccttcatcagctattaggttcataanntnntggtgcaggnnnatggtggcaacaaactcaatatgcaccatgtgcaaact

SEQ ID NO: 1516 - DNA, 506 bp, Zea mays
ctggccggcctcaccggctaccgctgcagcgcctgcgacttcgacatccacgaggcttgcgccaattacttcaaggagacaatctccttcttcgcgcacccctggcacaccctcacgctaagccgcatgcccagttcctgcgacggatggtcctgcgacctctgctgggagggctgtccgccgggagacttggtgtatcgctgcaccgattgcctcttcgatgtgcaccctctctgcaccatgctcccgcataccatccgtagccccctccacccacggcacgaccttcgcctggtcccttcaatcggcacgtgcatgtgcggctgcgaggaactgtccgtgtggaactacggacatgtttggatcgcagcctcacttgccacactttgcctaacttttctgtctaaggttagttcttcaattcgaacgactaaccttagtcaaagtgtggcatagttagccacgaaccaaacaggccatacgtctgctcttgtccgttgaaagta

SEQ ID NO: 1517 - DNA, 498 bp, Zea mays
atgggaagcatatcgtggcacgtgttgagaagcttattgctgcaggaggtaaataaatcctaacacccaaagctatatactgatagccattgttccttgtttgacctttcctggcctctgaaccgcttgcgttttgcttgtgttttttatcgtgtttcagaacggcgcattggtgccccatcctcttgctgagatggcaataaagctatatacaggtcgcagaataacacctgtacagacagacagggatagcgaggcctagctttttaccattaccagtagtcggtaatattgagcgacggagaggttaaaaaaggctcccaaatcctttgatgtaaataaaggatagccgctggaaataaataaaaagaatgagaaaagatgaagagattttgcttgtccttgagggaagagttgtatatttgtgtggtttattttcccctcttgaagcagatggataaatgttttaggatcatagatgatgggaagcaagggcag

SEQ ID NO: 1518 - DNA, 359 bp, Zea mays
attctgagctcgaccctggcgcagctactgtcaagaaacatgaaggagctgctgcagcaccagtaaactcgctgagtgatatcaagtgtcgcttactgaactagggcagctcagcgactactaacaagtcaacccaacccgtgttatgctgaactgcgtataggaatatagaaccatagaacatactgctgctgtggataggcctggcgcggtggtgagaagccttctactgagccaaaggtcttgggtttaacacaacctttctgcaaaaatgtagagataaaggctgactctgttatttcttctctagaacctcactcatgtggaagtcgtcatcactgggttcgtctttagaacgt

SEQ ID NO: 1519 - DNA, 360 bp, Zea mays
acagatgcagagattcggtgctttcctgtaaagctgacaaggggggaggacagcagcagggggagggcattgacgtacctgggggtggcctctggccagcagggcacagccgtgtggtcagccagcaagctgtgatgctcgctcgagcaagagacaaccaattgtcgcgacatgcggagagggattgctggagatgggttgccaggaggtgaggtccgccaccctgcaattgatgctggtgacatgcgcgagcaccggcgccaccctcaatcctagcgcacgaggataggactcatggtctcatgaagaagggaagagtcaagctgatacgaaacaaaagaacaaaggaggaggtcttaa

SEQ ID NO: 1520 - DNA, 390 bp, Zea mays
cccccagcgcccctcctcgccggcgggcttgctgggtctcgcgatcttcctcctcctcggctgtgccttctggggcggcggcggcgggaactaggtaaggggagggaagggaagggaagggaaggggaggtttgaggtagagcggagccgccagcggcgatgccgtcgcacgcggatctggaccaccagatctcgcagctgcgggattgcaagttcctgccggaggtggaggtcaagacgctatgcgagaaggcaaaggcgatcctcatggaggagtggaatgtacagcccgtgcgctgccccgtcactgtgtgcggcgacatccacggccagttctacgacctcatcgagctcttccgcatcggcggcgacgcgccagacacaaactac

SEQ ID NO: 1521 - DNA, 370 bp, Zea mays
atcacacgacacttgacatgtcattacaatattcaatagaaaattgcacaacgaactaaagaactcaccaatgccatgctctttcagtgctttcagatggtgctcctggtctcttcgcgcaagaataccaccatgtatactggggtgcaatgtttttactcttccatcaagctgaaacaacacaaaaaataagttagtggatatgaaaatatggaatttatgctgttacttaaagctctcaacatgatagtcaacccaacaatgtttctgcttttaacaatcagtgaaagggaaaaaggttagactcaaatggaacaagagcatctagtaagcatggaattacaaagttaaatgcagtgctctgaccagt

SEQ ID NO: 1522 - DNA, 458 bp, Zea mays
gtcaaaatggaagactttgtacatgaatattactctgtgcagaagtttagaaatgcatatgcaagaatgattgagccaattcctcacaaggacaagtggcctaaattagacttgccaattgagattgctgcaccacttagtaaaaggagtgttgggaggcaaaagaaaaataggataaaaggttgtctcgaaggtggaagtggtggatcaaaatctggtccaaataaatctgaaaatgagaatgagaagactaaaaaaatgattagaggcaaagcacgatgttctggttgtggagagtttggacataggaaatctagctacaaatgttcgctcaatggaactaagaaaaggtaactttttcattattttcttaagcttgtttatttttattaagtatttctaccaatgcaggaagagaaagataagaaaaaacacaaccaaaggatggacacctaaag

SEQ ID NO: 1523 - DNA, 540 bp, Zea mays
gtttcagctgattgtatcttcttatttgagtggaagttgtgacttttcattctggtgttgtagggctgttgcacttttctttaaggatcatgcgtcttcaccctcagatgatcagcctggaaaattcagtttgaacaaaattttggaagggaaaacaaggaaacaggctgcaaggatgttctttgagacaacggtaacatacctggcatgcaatttctatatttacatgttatatctgcagtttgtctctcttttgttatttggagctttattttgaagatctatttgtttttcctataggttctgaagagttataattacattgatgtgcaacaagaggatccatatggagccattgaaattttagttaaacccttgctgtcagctgccaaactgacataagttacttggaatcatctgcaggacctcttgtccatctgcaaaaagatagaatccccaaaggctacctgaatattgtttccgggtgatcctggagaaggggtcaaatgggcgtaaacttctgttaaatgtcggctaggg

SEQ ID NO: 1524 - DNA, 580 bp, Zea mays
  misc_feature (64)..(64): n is a, c, g, or t
tggtgttgtggctgaattatccagtgttcagcctgtagtagcattagtagttgtacagcctgtngagagccgacaaggcagagacgcccaatgaaatgaaattttcatccaaagttccaaacaagcaataagtatagtgtgctggatgcaattctgttatgtcactggattatgcagatggcgtgaaagcgataagtatagtgtgttgcgtgcgactaaagaaatcaaagacttttctgaacctaaaataaaatgatactgattagggtggtagtctgattggtgaagacccataaaagctcatacctatacaaatccatctatacccatgggtataaaccattttgacccgcaatataaaataaactcacccaacccaacatgttcataattaaaactcatcacaacccaccaaaaacaaactcatttcttaaaccacctaaaatacctatttacatccgccctattcgcaggccaaggcaggtggtgggaggatgggatgtccatgaggggaggtaggcatcacgccggaggtttcagcactgatgtccatgatgttatttgagccactccatccatc

SEQ ID NO: 1525 - DNA, 374 bp, Zea mays
ccgactgcgacggctcgcctgaggcggcgacgaggaggcaggagctgatccctccccaggtgctggtcccccggtccatgaaatctttgacggcggcaaccgtgcagccaccgaagaggagcagagaaggaagggtagtcaccgtccccgaggggagggtgcacggtggtggcctcctatcgttgcttggcgggagcttcaggatcgtcgacaagctctgaagcagtcagcgcttggggctcgatttgacgatttctacctctacaacgctttttcttaccttagaaaaaagtgagaaaatgccactttttctattagagctgtcagattattgtctgtgcataaaaatattttctcgtctacagatcgaactt

SEQ ID NO: 1526 - DNA, 766 bp, Zea mays
attgtctactacactccaaaatgtgcttttaaccaggcggccagacctgctgtctattgtacctcagttggggatttgccagtagaccagggatgctgatttaacatttttagtgtttcatgcaaagatagtataggatatatgcaattaattacaacgatgtgttctattatgccaataaccacttagcgtttcaaaattttaaacaaatatatctctggtagtcattatatcatgtagttttcttgttgagcaggtctggtttatgggggagctttctcatatctcatcagagtttgacaatgtaagtaatatgcaagtgagctctttttcttgtgttacttcttgcaaggaaggttcattgcttatgttcattttgttactaccaaactgtcacttttgcaagcagattgcaaccacaaatgattcactagctctgttttttctattgtatcttttaggttgttcaagttgtgctggaaaactataaaccttagaagatacaaaatgatgatcagggtaccaatgatgctgacagccagttggtgcaggaagaccagaaggctaagcacccccttcccctttcattatcactgcgtccccctcttgggagagcatagttaatgttaagggagaagtcagcctaccagagtaatataatcttagttttgctcttttattgactgtattttcttcatatacaataagtgggtgattcctaaccatactcccgtgatgcagggaagatgctagagatcccaaattt

SEQ ID NO: 1527 - DNA, 374 bp, Zea mays
cttcttcgtccatccgttcgtggtgcgccattgcagggaggaatcagagagagagaaagaaatcgaggtgagagaatgaggggatcaacaaattgggggggagagtccccggacccgcgtgcgtccttcaccggagtccacgcaaccgttggcaccctcatcgtgtggagttgcggtcggtcctagggtcaattgctcgccgataattgtgagcaccgcggaaacacaacctgccgcggtcgactcatgcttgcagcgccaccccaccgtcggcggatggccagggtcaacccctggagttcaaggagcatctttgtggctgttgagggagcgatggacaaccatggagactgggattctccaccgcggattca

SEQ ID NO: 1528 - DNA, 259 bp, Zea mays
aatcgcctggtggtgggttaggggctggctggtgcatgctgttggcgccgtggtggtgctttgggctgtgacgggcttcttccggtggagtcgatgcagagggaagaggaggagcgggctactggcttgggcaagaacatgtggcagacatggtgctgagtcgggcgtaagtcttcactgacgtctatgtcaatggcgatggtggtgacacccttgtggcgttgagtcgggcgtaagtcttcactgacgtctatgtcaa

SEQ ID NO: 1529 - DNA, 396 bp, Zea mays
ggggcgacggtgacccaagtctggtaaagcccccacatgctggcccaaggtttctgcaccccatctcagcaatcgaagcaagttgggactacctgccatggcagtaccaagaacaaacgccccgtgacgaccatcggggataccctactctctgtgattacagaggctacttgccataggaagcgcactcagctgccaagctaccttttgcagccaccgttacaagatcgtgtggacgattgatgtggaatggcaacatgtagtagtagctgccgtcccgtaccttctctatctaggactaggagccgagtaatggctgccattcatcgaggggacgacgtgggtcgcttgtatgaaaaagattgaacaaactagcaactgcactagattgtttcg

SEQ ID NO: 1530 - DNA, 410 bp, Zea mays
ctacctcagcgtcattggcgccgggagcttcctgagcagcctggtgatcacggcggcggaccgcgccagctcccgcggagggcgcgccggctggttcgccaaggacctcaaccgcagcaggctggacctcttctactggctgctggcgtgcatcagcgccgtcaacctggcattctacgcgctggtcgccaccaagtgctcgtacaagcagaccgtcagggccggcagggtcggcgacgaggtcgagtgcgccgccgcgtagctgctgctgtacgtggtggtcatgaaaccaaccatgcatcagccgcacgaccatgtgtattattattattataggggctagtagtaactaagctagctactcgtttgatcgtgttgttgctctagctagcttgggtacaagtagtaca

SEQ ID NO: 1531 - DNA, 330 bp, Zea mays
  misc_feature (139)..(139): n is a, c, g, or t
  misc_feature (171)..(171): n is a, c, g, or t
  misc_feature (257)..(257): n is a, c, g, or t
gacaaatttacttgcttaggaaccttacctttattacataccttggatagatgaccctgctcaccacacttgtagcagaagcgtcgcttaacctgacatgacgcttgctgtttgtcttctttcttggtgagagtcatcncggagagtgcacgtgcttgatttatcattagnggacaagaagtgatcgtatggttcttgtcattgcatccgaagcatctccttatcccttcatccttgtcgttgtatggacacgacgnaatgaggtgtcctgacttattgcacttaaagcacctccttttcccttttctctttttgttcttggatgacata

SEQ ID NO: 1532 - DNA, 356 bp, Zea mays
tgcaagccaggccggaagctacggttccttcgccatctccgccattggcagctccatctttccatcaacggagaatggaggaggggaacagcggcgtcgcaacgctgcggcggtaaccggcctacacacgtatcggcgtcgcggcatacaagggcaggccaggcattcgatttcgttcgtacactacttactcccggttgcagcaagcaatcgttttctttctcttgcttagtttttttttattttttgggctccctcgcctgcaatcgtttcctgcgtttcgtaggagtactacattactctcagctgcagagggctgtggataatctcgcagccttcagatggtggtttgtgcg

SEQ ID NO: 1533 - DNA, 518 bp, Zea mays
  misc_feature (374)..(374): n is a, c, g, or t
  misc_feature (397)..(411): n is a, c, g, or t
cgcgacgacgacgacgacagcgctcctgctgtcactagccgccgcgccagcgctagcctcctgctaccggcactggcacgagcgtcctcgggcgaggacgaccggattctgggcctgccagggcagcccaacggcgtggcgttcgacatgttcgggggctacgtgacggtcgacgagcaggccggccgcgcgctctactactggttgcaggaggccgacaggacggcggtcaaggacccggacgccgcgccgctcctcctctggctcaacggcgggcctggctgctcctccgtcgggtccggcgcgctggagaagctcggcgcattccgtgtccacaacgacggcgagaggctgctgctgaacgagtacgcatngaacagaggtaacgtatgaatgnnnnnnnnnnnnnnncctcttgtccatctgcaaaaagatagaatccccaaaggctacctgaatattgtttccgggtgatcctggagaaggggtcaaatgggcgtaaacttctgttaaatgtc

SEQ ID NO: 1534 - DNA, 388 bp, Zea mays
ggtgattcgagttccctaggagtctcggccatgattgtgacctgggggaagtccacggaacacgacgggtgtgttcgcgaagaaatcaagggcagagcatctgggcggcgtggcggattcctcatcggcgtgcgctgctcgtcgctgggccgccattcctcgtcggtggagcatgacacttcacaatccgaggtattatggggggaatgtgtttggggtgttcaccacatcccgcaacaaggtttagatcgagttgcggggcactaggggtcgggaatctctcgcaccggcggatgctccgctgttaggggaggttgcgccgccgtcgggcacaccataggatgacgacggtcgcttgaccgtagatctccatacggacaactttcat

SEQ ID NO: 1535 - DNA, 211 bp, Zea mays
tctttttttttcgaatttacaggagagatctaggctttattaggcgctcaggctctttgctcccgccatgaaaccacagtagtattgtaacattgaattagtagacaggtctgttcgtcctcaagagaaatgaaagaaacatgaggtaattcatttcttcacgcagaattttgttgtaattcttatatggtaaaaatatagaagcatgttg

SEQ ID NO: 1536 - DNA, 375 bp, Zea mays
agcaaaccaggttttggatgagatggttttcaagggttttgcgccaagcaacgatggtgcacagaagtttgtccaggggattgagaaggaaggagatgtggtattgctagagtcagtgttgtgccgactagcgaaggtgaatgctttggtgccaagtggatgggaaaaagctgtaagtggtgcgctgaatgatcccacagagttgaggctagagaagcagcttgactctttaagaattgcttgattagacaccatagtggatttgatcaatacagtttgagtagcaaaaaaatggcaagcatgatttttaaagaaatcaatttgttcatctgttatacaaggctgccttgcaggagtcttacccaattcaggtta

SEQ ID NO: 1537 - DNA, 362 bp, Zea mays
cgcggtcgccgctaggacgccaccaatctcaggttcccatctctttggccgtcgtcagcaaccggctagcgccgtccgccctctaccagtccagctccgcgcccggcgccacatcctagcctcgcgcacagacagaacttctacggtcctagcattggctaccacgcttggtcgcgacaccgcctccccgcccgagctcggccgcatgggccacactttctggctcgccggtcgccgcctcgtcacctccccgcgtgggcgtgaccaccctcgccctctggcgtctggctgacgcctcaccgattggtgattggtgattggtcattgcttcagtgcttgtctgttgtctgctactgctactt

SEQ ID NO: 1538 - DNA, 477 bp, Zea mays
gcccgcccttgccttgggagtgagattggcattccgagaaggaggaggttcatggatcgccatcttgtcgatcgaaaacgagccctcagcttctacgatctccctcagctctttctctgatggcccatacaccggtatgtagaaagagtcgagtctctcctcgtcgatcaaaccctgtcagttaatagccagttaattattaataattctaaaaaagacattttcatatcataatttacatatctatcagaccttggacgccatttcgtgtaggacggcatttataaattcgaaaagctggagggcgttctccggtttgtcgtcggggcgctgcccaaggagggagaacaccagctttcctccgggaaccatctcctgagctcgcaggcgcaggatctgggtgaagtcgctgcgaaactgccgggcataggcctggatgactgcaggacgccgagcacgcctcgccgactcgtccct

SEQ ID NO: 1539 - DNA, 480 bp, Zea mays
tggctgagaatctgggcaaggtggtccttcaagcggggtggaaggagttcgtcgctgcgcatggcttgagcatgggggacgtcctggttttcaagcacgacgggactcctcggctgaaggttttcatgttcgaccatagctgctgcgagaaagtgccgccgccatgccctgtcaagatcaagcgagagcatcatgtctgtggcggagagagaagggagacgcaccctgaagttccaagcagcagctgtggagatgcttccatgacttttgtcaccgctagctcgtcgtcagcctccccctccgacgacgcgtcaggttatgagagagaactttgtgcaggagagatttagtctacagatcatgacctcacgcttctcttcctcttgatctgtttatgtgtaggagagtggatattatctccagaagaccagaaaccacgttacgttccaggttacataacactgcttgtgactagccctc

SEQ ID NO: 1540 - DNA, 203 bp, Zea mays
tgcaggcgttggcgaagtcgatgagccagtacggctcgtagaagccgaagccggtgagcaggttgcccggcgcagcgttgccgaaggcggcgtacccgaagcaccccacggcgaggtagaagaacgtggtggccaggaccgcgagcacgttccccttctgcatcgtctcgctctctggtggcggcgatttgagcgtgtcctgc

SEQ ID NO: 1541 - DNA, 627 bp, Zea mays
  misc_feature (470)..(472): n is a, c, g, or t
ccggtgttcctcccgccagtcaccatgaccacgttgccgacgtcaaacttgatgaagtccatgatcttgttggtctccagatcgatcttgaccagcgcctccattgcttcgtatagttgcagatacactttcttttcttccatctttttagctctttcctgccttctctgcatcaattcagagttcagactatatatcgaacaaaggtttcaaaccacaacgagcattggcctggccattggttagagaacatcctatacagtccctggtgaaaaacagacaaactatggattcaacgggctaagactctgagcagacacactgaaacccagtacaatactgagaccaatcatcacagagaactcaccgtatcagcttcgacaagagactcgagcagctcctgttcctgcactcataaacaaatattatgagtgcagtaatcagctggaaagatgaaaaggcagtacctnnngtacctgaagtacctgaagtgccagatttagcaatcgttccaaggttcttaataagatcttccttggtcataccaatacccctatcccgaatggagaggattttcttctctttgtccaacttaatctgcataagcatagaccagatgccttgagg

SEQ ID NO: 1542 - DNA, 559 bp, Zea mays
cttataacgaggatgcatgcctacttgattttgacgtgctattgatggagcctcgcaagctggagaaaaccctgattacttccatcatgtggtgggctgatgccattcgtttagccaatcaaaggtaagctaaactcacgacctctatttcacgtgtagtacactaacatcggaacacgaatgcatgtccttgaaaccatttcgaagttcagccactgtatactcagctgtctgggtcatgttaaaattctattttcagggacctgattagactggccgtaactctgtccttcaatggcaagtacacgaggctaccttcaaactggaagcgcgcagatgatgacaacgctgatatcctcaacttcgatggacccaagaacgtctgttctgaagatgggcgccagcatgagcaaccaggctacggcgcaacctggcagcaataccttcatcagaaatctgaagccatactgagcacctaaataacggcacttcgccggacacaaattttccactgtcaccgagtggaagctgactgttggtattgacctgtaaaccctca

SEQ ID NO: 1543 - DNA, 354 bp, Zea mays
tctaggcgttgcgaaagcaaggggaggagtcagcaagacgacgcgccaagcgaatggccgtggccgtggccgtgctgttgcttcagtaaatagtgggcagatccacggctctcctttggaaccaagctgctgctaccaggcttcgttgctcgatctctcgacggcagtgctatcaaatgctcggttagcggggcgcgtggagatccgcgagaagatttcttccaatctccacagcagataagggagcggctagtttccaccacgtttttttttggcgaacagtatagtggactgatcgagtttaggatgagaggcagagtgtggtttgactgtgtaaggctgggtagtgtgtac

SEQ ID NO: 1544 - DNA, 333 bp, Zea mays
tctagcctgacttgcccaaaggcctaccttctagcactaatcacctcaaagacatccataggtcttcgttcatccaatcaccaacagttaccgagagtcacaagagccctctcccttgcaccactgagcatgttgttcatgaaattgatgacctcgacaacaactccaaagtccatctgcaactgagaagcctccgcatgagaaacagacacctatagaaatagagggaggccatggcagccaagaggaagagaaacgacgcgcaagacaagattaagcaactaatctagtaggaggaagaaagatcaagggcattgcagcaaaagagatcgt

SEQ ID NO: 1545 - DNA, 421 bp, Zea mays
gtcggaatccacccccactcgcgctgtgtcctgcgggagatggccacggccgcgaggctgcctacggttccaccgtcggctgcggcgggagatgtctccgaggtggagctctcggaggcgggatcgccggacctcggcagccggagcagcggtagcggtagcgggggcagcggccggagcacggcggagtactccgggtgggtgtaccacctcggcgtaaactccatcggccacgagtactgccacctccgcttcctcgtcatccgcgccaaattcgtcgccatgtacaagcgggacccgcacgacaacccgggactcgtcggtttccccgatccattgcactcttccctccctctgttttgtttctgatgcgtgtgatggctgcgccgcatctcgtggattatgcgttgaagcttgacag

SEQ ID NO: 1546 - DNA, 340 bp, Zea mays
tttaagaccttccaggagagtgattggcatcccctacccttactgatgaatcaaattcccaagggcaattctcctcaaaagaaaccagtccactcacactgagtggtgagtgtgagtggagtccatttaggtgccaaaggagttctacttatttgggcatcctgccaaaggagccgcttttccttgttgccaccttttttcatcttttgtcaaaggtggaggtgacttttttattctattttatttttgttgcttcgaccatgacttacaactaggcaaaggcacaagcactatgcgcagcaaaaggaatgcatactcaagcagcaattggctctgatga

SEQ ID NO: 1547 - DNA, 492 bp, Zea mays
  misc_feature (374)..(412): n is a, c, g, or t
  misc_feature (415)..(421): n is a, c, g, or t
  misc_feature (430)..(438): n is a, c, g, or t
  misc_feature (443)..(461): n is a, c, g, or t
  misc_feature (465)..(469): n is a, c, g, or t
atgatcccatcccatccctcttcatccttcctcgtccctccatccaaacattgagtctttaaaaatttcactttctaaattatcatttagagagtcatgcatgcataaaatctattttgtatatctttgcaatctccaacagattttctatatgttcgttgcactttagagagttatttacattttctatccttggttagccacaaattcgaaatataatatgtccatatatagaaaactatttaaataagttattgaagggtatttttttcaaaaaaaactctattcctatcaactgaaaatattatagtctcttataacatgattggatgcttgcacccgtccattagaactgacggtatgcgttgaccaannnnnnnnnnnnnnnnnnnnnnnnnnnnnnnnnnnnnnngtnnnnnnngacgggtgnnnnnnnnntcatnnnnnnnnnnnnnnnnnnntttnnnnngataggaatagagttttttttga

SEQ ID NO: 1548 - DNA, 1185 bp, Zea mays
  misc_feature (59)..(61): n is a, c, g, or t
  misc_feature (1132)..(1132): n is a, c, g, or t
tggtcgccaatggtggacaggattacacaagaaagagtcacgcgagtaattaaggtatnnnaattagatactatgttatggttctctaagcactagatatatttaaaaaaatttctacatataattcaacatatgtaaacattgtatcttattcacaagaacattttaagatatgattcatttatgtggattatatgggtaaacctgtatcttatagattagagaaccatattaaagacgttatttttatcaaaatatgtctcttgtgttttcttagacgtatcccttacggattatttatatgatttgtatgttgtttaactattcgaacaagaacacgtcgcggaatccgattaattaagcatgctgagagcattcattactgaacatacatgtggtctgtataaacgcgggaaactggccggacgcaatttgcctttaaggaatcttacgattactaactggagttaccgaacatgctagagaaaaatatataaccatcaataagtcacgagatctataattcttttctgaaaagtgtattaactttcacataaaaaacataaagtaacacttaaatttgcactggcattattacaaataaaccaacacatccctcaattaagttgactaccaaaattacccgctaattgtacaaaaatacatatatttctaattactcacattatttctatatttcagcggccatgagaactgtaactttaatgacgcatatacttacaatccacatttttatgccacaataatatccttgacaacaatttgtctaaggtgttacattttacgtattgttataagttttgacccaattatcatgaccaatatatttgttggggtcttcctcttctgaagatcctcaaaaatataattaaccatttgtttttagcataatctattacaggaagcttcgtcttcaggaagcaagccccttcctcatgatgaacgcacacgagacgaagacagatctaaagatgataagagtaaacaccgaagctatcgctagatggacagcttcggctcataacggagacgaagtataatgatgatgctgatcgaaagagaaaaagactgcttagtccttaatgacttgtattacggtcataccaggatntgtggggcataaatgtacttttactcgggctacgtcccgtgcttataaataga

SEQ ID NO: 1549 - DNA, 403 bp, Zea mays
cccgcctttagcttttgctactatttttttttatttcgcaaacagttatcgaagaatggcgcaggcgccaggcggaagccgttcggccccacatgtcggtgagtggttgggccggtggcagctagcgtccggcgtggatgtagccggcggctcggccattaactgggccgggcccggcgggcaagcacctggaggtcacgtgggtggggtgggtcttgcgagcgagacagaggacgggacgtgacacgacacgaggctgaaggtgcacggccaacatgggccccaaatgggcccggtctgcttgaaggtgtacatgcacgggccaccccactctctgtagagtagggacgtacgagtagagtctcgctctagctctccatgcactgttgagacttgagacagg

SEQ ID NO: 1550 - DNA, 384 bp, Zea mays
accccgcttccggagacgacggcgcagcccgggacggcgacggacgcagcaggcgggttctactacgacttcggtaacggcggcggcgagcctgctgcagccgcctccgtagtagcgccgcagcagcatcagctgagcccactcaagaggcggtcttccgtggacgaggatcactccaacggtggcattactgacatgctgcacgcttcgtcgtcgtccagcagcaagagggtgatgggcgatcatcacgcatcgtcgtcgtccatggctgcaaacagctccgtgtttgagcccggacagacttcttctcatcagctgcacgacagaatatgacgcagcagcatgcatgcatgggtggtcgctccctcgctgctgattatgcta

SEQ ID NO: 1551 - DNA, 709 bp, Zea mays
  misc_feature (681)..(681): n is a, c, g, or t
  misc_feature (683)..(683): n is a, c, g, or t
  misc_feature (698)..(699): n is a, c, g, or t
  misc_feature (701)..(701): n is a, c, g, or t
  misc_feature (703)..(706): n is a, c, g, or t
cgccactactatttccttccataggatacgatacgttcttgttgtttaaaagctgaatcttctcgaccgactgataaacatgttagaatctatgatgcctaggatcaattcctaagttgccgtctttgtatcgttgcactgcaggaaccagcagccatcggatcagagccgccgtgggttgtagcgtttccggtcactccgatgtttagatgatgggagcctctgtggttagggttttagtgcgaggtactagcgttcgtctttcctgcgacctcttagtcctatttatataagtatataacgtcgtgtgtctgagagctccaaccaaagttagcgtggactctcctaatcaagagcctgattaaaggaacgatagttggctctattgactagctacagagaacacacctaacaaaacaaacaaacaaaaaatctaatgcggcgcagcttggtagaggacaagaggaactactccaagtccaaggagccgtctcagcaggaccaccaggcggagccagcagcggcatcggcggaggcggccaacaaggccgtgccaacaccggcagaagctggagcgagggcagaggcgcagccggagatgagcagtaacccggaggcggctccggttccgggagcaggacgaaagggcggcttgttctcatgcttcccctgctgctgaangntgataagcgagcaanntncnnnngcc

SEQ ID NO: 1552 - DNA, 284 bp, Zea mays
aaccacctcctatcgctaccaaactagcagcgccaatggggtcagggtgagaccgccgacgccgttcctcaacttcgccatcggtcggagtctgccaggcggccgggtttgggaacgccaatgctgggagagaaattaagatcgacctgtgtggatcttcctcaagcgcgagatgtagggatggatggcctcggccatggtgttcccttgccggtgcgggtctcgccgcggtgccgcaaccccgacgtggaccgatctcgtctcaaccttgtcgctgacgaagg

SEQ ID NO: 1553 - DNA, 512 bp, Zea mays
cattcgaggatagtttttcgccgggggcggcctagaaatcagccgtcaggtgaaccgggaggggtggttgcctgaggaggaagagatgatcacgcgagcgaagctggtggagcagctgcgggagcaccagatccggtcggcccagtcctactccgccgcgctcgccgtcttctcgcccaacccccacatcgcctccaggtcaggctcccatcaacccgctgacatctgattcccaatttggtccgcttcactgaatcactgttgacttgatgcgtagggagtaggattcgatttagattcgcgctgtaaagattgtgttgataacttgatatcatctcgtgggtcttggcaggttcgcatgggccttgattgcatcttttctgctctgttagttccggttcggggaagcaggaaaaggcagggatgcacgagatggacatgagtagttagagaattatcgcttaagaatattagaaaactaatcaattcatggcttaattggagaaacagaa

SEQ ID NO: 1554 - DNA, 859 bp, Zea mays
gtgagcaccattagctttagcctcattttacattacaacgatttaccagatgtgcgtcacatctgatatatattttggccagttcaaggtgagtgatatcattagttattatctataggtgatttcatgttctgtaattgtagtattgttttactttttatggaagtaagggcaggaattgtagtaccattttactatttaatactggtattagactgctggtataaacggatgttttctccaaacatcttaacatatgaatggatgttttttctttgtggggaaaaaaactttgagcattctctgaaactaagttttcatgcaaaataataggctgtattgccatgtattgcatcgactattgacttgggtgcatttttcctctttacctgttcacagtggggacacggatgctgtagttcctgtaactgcgacaaggtactcaatagatgctctcaagcttccaacactggtaaattggtacccttggtatgaccatgggaaggtcagtacaagaacggttcgctctaataaaattctgcaacataatgaaaattttaacttgatcttaattcctatttttttcccgatgtcacaggttggaggttggagccaagtttacaaaggactaacccttataaccatagcaggtgcaggacatgaagtgccactgcaccggcctcgacaagctttgatcatgttcagacacttcttgcagaacaaaccgatgccagcacaatagccagtcgaagcagaaatatagtgtaaactaccacagtcatgtttaatattttttaaattcttttttacttgatttgattgttattgttacaacatattgttcaattatctcgatgaa

SEQ ID NO: 1555 - DNA, 493 bp, Zea mays
agacgacatcgccggccggggaggaagaggggatgtcaggcgtgggttcctgagctaaatcccacgcacgggccacggcagcagagcagccgatgccgagcaggagcagcactcgctccacgtgaattaagaaacgccagctagggggtgggtgatggtgccaaatcttcgttccgttcgagtattttgctattacagtagtcgtttaagcagcttttttttatctacaaatctaacttctctagaggagtatgtactttttctagttttcaccgtggttcctttaaaaaaaatcctcatacttattttaaatcgtcgtatatgcacgtaggttcgtttctctctcctacttctgtccttctagtggactgttatttatggaccgtgatataaaagaggacgagtaccgagcgagttatataacagtaagtcgtatgtagcgcaacattccatatgatacctaaaagaggacgagtaccgagcgagttataaa

SEQ ID NO: 1556 - DNA, 851 bp, Zea mays
gaggtaatgtactttggtgtctttgaaaactttgtgtatacttgcagatctaaatccatatgattctgcttatttagaaccagtcattgaattgtttggttgctgttacatgtactgaatttatttcacatttgccctgaagattgcttgtaacacagtagatgggaaagggcgcggttaagcctgttgcagttaattaaattattttttcttgcttttcacaggtctgggaggtcaaagctgccgatctgagcataagccctgtacatcgtgctgccaatggtatagtcgatccaaataaggtctgtagttctattttgcattgacattcctccccatctcgattgtatacttctggtatagtatgttggaaggctaatgctgaaattgaaccagggtatctctctaagattccctcgtctattgagattacgtgacgataaaagcccagaacaagccaccacgtctgaccaagtaagggggtgtttggttttatggactaatttttagtccctctattttattccactttagttcataaattgtcaaatatggaaactaaaatgtagttatagtttccgtatttagtaatttatagactaaagtggaataaaatagagagactaaaaattagtccctagtaaccaaacactcactaagttcactgcccctttttctattttcgatagtttgctgttttgcgtgtctcaactcagattgtgtccaaatttggcaggtcgctgacatgtaccggtctcaaaagatcaaccacggttataaccaggaggatgaggacgatgactgatgttgacttaattcttgttgctggatgggatggttcactgtgtaaa

SEQ ID NO: 1557 - DNA, 392 bp, Zea mays
ttgtagtgatcacactgtcacgagagctgagcaaactacagcctgcaagagctacacgttgtagcctatactcctgccttgctataattttcttaattttcttttgttaatgagtgcagtttctctggctaatggtaaaaataatctgttctacaggcatgcttgaccacatcatggtggagaatgcaagtgttaaagttgcattgaatcgcattgccgttgtgtctgtcctggatgcacataccctgtcagtgatgtcttatgaagcttggaggctcatacatctgtttctgttggctcactctagctatatgcagtggagctgctaatatgcatgaagtttgggctaggtgagcttcctctttcacttgtcaggaacaacttgaacccat

SEQ ID NO: 1558 - DNA, 207 bp, Zea mays
aggctcggatctgatgagaccattgtgggagtgaaaccgagcctgtgtctaaccttgtggcgcgccctcttgtttctttgtccaggaagcgcacccgatgcttgtataggctggggccgctggggatcttcggatgcccagtctgcaatgtatcttgagtgctcagttacacaggacacccgttgcccaggttgtgaatattgtatc

SEQ ID NO: 1559 - DNA, 259 bp, Zea mays
tctacaaagttaaatcggtttaggttacaggaaaaccttagccagatgtaggatagcacatggtgagatttttttagttctttgattgcaggtctgcagcaactgaaagagaaagggggagaggcttaatagcctgaaaagtatctttgttaatgtttagctatcctttggtaactagtgctgtaatccctcttgatttacagctgttcggctgctcagttgagagacattctgatcatccagtacatatgataccttg

SEQ ID NO: 1560 - DNA, 381 bp, Zea mays
ttccgtggaggcctggaagcgctgcgcgtcccgatgctcaggagcttcaacgtgtcagggaacaggctcgccggggagatctccggcgacctgtccaggttcccgagctccgctttcggtgacaatcttgctctctgtggtccgcctctgccacaatgtgtccatgcgtacgatgctctaggccggtcatcaggtaactcgagcactagtgctactgccgctgaatctccggacgccagtagtgtgggtgtttcttctagcaacgggggattcaataagattagcctgactgcgctcatggccacgggcattggcaacgcggtgctcgtcacggtctcgctggccatcacggtggccatgttcgtctacatgaggagaaaa

SEQ ID NO: 1561 - DNA, 383 bp, Zea mays
tgtcaacgacataacttttttaggtcccaactcgggcaattactatggtgttggatcaaagatgctttgaagtttgaagcgcatccaaaacaaatacagtgagacgaattttctagggtttgcgaatgccaagagaaaagatgggaccctttgggtaccatgcctgacaagaaatgattggttttcttcgtaatctgattagtctatctggcagttgacgattttttacagcaacaaaagttgattgtgcaaagggaaaggtcatcagggtggaaaattttctactgtgattgcaaggaagccagaggcaactccgattgaataatcttcaaatcattgtatcctctgtaatagtggtacttagtttgtgatgtgcactgtta

SEQ ID NO: 1562 - DNA, 892 bp, Zea mays
gattccttcctttgtctcttagctttgctgcgtcggcatgtcatcagtgatctgaccatttgtttctgtggtttctaggggtgcaaaagatggccatgcaagaggatggtcagataccatcggttcaaagcagcattctacagccaaaggtaataccacacactgttgactacttgcctttttcgagcaaaggcaaccaacttgattcttgacccatcttcgccgactactggatcttcaccatttagaagaaattaaagtaggagtctcgcgaatggaagatttcctagctagaagttcacacgaaattattctagagtttagatctagtttgtgaactctatttttccacaggatttttatttttccaagagaaattatttcattttctcttgaaaaaataggaatcctgtagtgaaatgaggttcccaaacttccaagtgatttctattttcttaagagaaaatgaactaatttctttggaaaaatgaaaatcccgtgaaaaattggaggattcccacaccgtgaaaacaaagccatgcagaagctatctggttttgagagggttcttttactttattatgctttcgagaacacgtacttgatcaattttcatgcatcgtctgtttcagatgaaaaatgagaagtttgtgccagaggatgatgaatccgtgatcaccgcgaggatggccttcgagacacaggactacgctcccccggggcccaacaaccaccacaagccacctgcaggctggagatgaactcggggctcacttttgatcagtgtgtcgtgctcttggctcacgaaacttggagagccagcgcccgttgcaatgttgtttgtcctagctataatagaatctacctattcattatgtcacgaagagaaatg

SEQ ID NO: 1563 - DNA, 351 bp, Zea mays
tgctggcggcgcgggaggcgaataagcggccgcgcgcagcgccgacgacgaccctccccattgccttctcactggtaagacgctgccctctcttcctatcctcgcgttacgcgttacttctgcgtcgcgtgcctgcgcgagcgcctccacgatctcgaggcgtccgccgctgccgcctccgcgctggggcgcaagtccacatcggccatgtggtccctgttcgccaggctgttcgccgccggcagctcttctgcgtccgaccccgcggagttctcgtgcggccgcggtggacaccacacacttacgacatgaattgccgagatctgagtcaggaccgggctacagcaatac

SEQ ID NO: 1564 - DNA, 433 bp, Zea mays
tatctgcagcaatcaaggaagaagaagaagaagaaggacagcgagttctggtacgatgtttgtggatgggtgatccttggcgcgggcatttgtgcttgggttggattggcaagagcaagcatgcctcccccaccggcaccagccacgtgaagctgatcgagtgccaagaatgctttgcaaatgttgttaacatgcccccatgttaaggtgcctcaggcatgggatctttccaggtgttagttttccatggagaggagagagtggtgtttccatacgggttggatcaatttttcatgcttgttcttttcggagcctcgatgaggtttcccttataatcggcatatgctgctggataattttgtacttgcttataccgttttgagccttaaaaaccgtcacgacgttgcgattgttacagctgtgttcgctatga

SEQ ID NO: 1565 - DNA, 611 bp, Zea mays
gggagctcaacgtcagtgtcatcgtctccactgtgccacgagacttctcgtaagttcactcagtttctcacttgccgtttattccttccaaagatcatgtgaactgtctatttgatttcttctatatgcgagatacgcatatattgttgtattaacaagccagagctaagtttgttcgctctattcagaaaacatcttcagtatatggagcttatgaaagcgtttcttgaccaaataattattctgccggcaatatggtttccattccactaacggagcagttgtttgaatcgtttcgaacaggatcgagacgttcggcagcccaaaagacgtgggggaagtggtgctcagaaggatcgcgaggacgaggcgaagcccggacatcaacgctacccttatcgacgccgccgtgagagaggacgcgggcagggtgaagtactacaagctggagttccgagtcgagagcccttctttccggcggcacaacgtcgcggtctgctgcgtgagggacggcaggctctacaccatgaacgcgcaggcaccggagtcggcgtggaaggcggtccagaaggagttcttggcaatggcggactcgttcggcttagttagcg

SEQ ID NO: 1566 - DNA, 431 bp, Zea mays
tgtaccaaaaatgtgcattattagtttattacctacctgtactaggagtcagttgattgtaagagaatttcagcatcatgacaatttggggaaatgggaaatctttctgcaagaaatgtatggggactatttttgctctcacatccatttgcagccatgaaaaaatcttcccttttttagttttctgagcaggccacactcagcagatggttaagcacacaatgtttctgttacagtgatttagataatgcttattagttctttacttatttttaattattattttgcccttctagactgttaaccttttgaccatttttaataatgtaactggtcaagtttgttgctcttgttcatgtttggtttcagctctagtgtaccccaactttcttggcagttggcactaaaaggctgtgttgttgattgtaaca

SEQ ID NO: 1567 - DNA, 1059 bp, Zea mays
  misc_feature (1036)..(1049): n is a, c, g, or t
caatatttatgagtagcttaagtagaagaaaagaaacattgaagaaacaagaaaaattgtgtgtcttaatgaagcaaagcagaaacaaagaaatcttagtaaccatggctagttgacataacatttttctgctataatgccagtaacaaaacaagaaaaagtaaaataaagtgacagagttgatcgatgaggtaaatactagccagtgagtcgtctagataatattagtgtaagccgaaatcaacagagtcttttgttatagaactgatccatgtaatattgtaatataatttcattctatttcaaaaaaggtatcagttcttagttacgtcgggataactcaatctaattattttctcataataatcaagatcatcagtatatgaaaaagtaactgcaaaggtgcgctgagcactgagaactggactcatgcaaagatcacctctcccaactactggattaaaagcagaaataagatatgtaactactagagcaaaacattaacaccataatacaaagagaaatagtttaagagttacctgattaatatattgttccgggaatgttgctagtgttagcaagcccttcactgcaaaccatttataaccataaattagaatgtataacttaattcataatgcaacaaatacagacactaacacaaaataggtaaagtggaaaagagttgacaccatgtgcatttagtatttgtgaatttgtaactttggcaacatggagttatatgaagggatcacacatgtgcataaatgtagtgtagacaaatgtgacgacaccaatcaggtccataagatgttaacttactagcacaagagacatattcttgtctgaaatttggctgcatagattgagaagctatagtaaaaatggatcgaaagagatggattaactgctccagctttttctgcaagataagccaccaggaaccctttgctaatttaacagaagaaaaatcttcataagataccaaagccacttctctacaggatgaaagcaattgaacagataaatagagtgnnnnnnnnnnnnnnaggagcagaa

SEQ ID NO: 1568 - DNA, 764 bp, Zea mays
ttgctcctgcatccttgttcttgttcctatcctacctatcggctagcgtattagcctttgcacatctttccatggcgactccacttacgagagctagcaagagcaacgcgcccaggggagaagcgcacctggctctgcggcctgttccagtacctcaacatgtacgggaccgcaatcgcctacaccatcaccacggcgacctgtctcaggtacggtaccgtaccctacgtacgtacgccgctctcttcgttcgatctgctggccatgctggatggtaatggtgacacgcgctactgttgtgttgccgcagggcgatcgtgagggccaactgctaccacagccagggccacagcgctccctgcggcgccggcggcgaccacctctacatgctgctcttcggggcggcccaggcggtgctgtccctcatacccaacttccacagcatggcctggctctccgccgtcgccgccgtcatgtccttcacctacgccaccatcggcctcggcctcggcctcgccaagaccataggtgatttcgcattggtagatcgagcgagattcagtcaacgttgttattattgacgtacgcgcgggccctggatgcgaatgatcttggttggtgcgtgtatatcgaattaatccaccagaaaatggggcgatcaaaggaagcgtcgccggagttccgatgagcaccgcgccgcagaaagtctggcgagtcgcgcaggccatcggcgacatcgcgttcgcctacccgtacaccattgt

SEQ ID NO: 1569 - DNA, 394 bp, Zea mays
ggcccaatctttccctccctcatcaacaagcttagcacggcacaccttggtatgatgttcctctccaagctataccctataatcgcaggttgctccattacttcgcttagttcaaccttcagcacatccaggaagaaccggatcttcttctttatgatctcatcagagaagttaactatattcggctgtttcttgaacgctctctgcagctcaccctcggacaccccgaagctccggtaaagggccaccctatgcagccacttctccctactaatgcagcacaaggcgcggatgccgtaaggaaagcgcttctccgttacgcccaagccgagctccttgagggcctcgaagatctggcatatgcggtcgggcgacatcatgagcacgcccatct

SEQ ID NO: 1570 - DNA, 832 bp, Zea mays
cataaaatgtcttgtattgaatctttggtttcagttccattatgtcttacacgtgtaactttgtaaagctatgaattttatctttttgctaatattcttatttgtgcatggtcctcagcaaagaaggtctgactagccttgttgagtacaacgaaaagaagatgtttgaggttaaacttaaggagataaagtcaacactgactgctatgataaatgatgaggctgcaatatctgaagtgattgagactgtcaagcagcaagttaaggatgctaaatttcctgatttagaggttattcgcatgttgtgggatgtgctcatggaggctgttcagtggtctgggaagaaccagcagcaaaattccaatgcagcacttaggcaggtagtgttgttaaacttttgctttctttacaagtacattgagtacctaacatgaactcttgttgatgtatgacttacattacttgttttagtacttttaaaacttgatttaacatggtgtcttaaggttatgaatataaaacttgaaaatctggtttttagcaaggatacttgtggtgtttacttagttttgtatggtttaagtgtacgagctttgtgttttgtgagttgtaagctcaaactgcactagcagtagaaactgatacaatctaagtaaaaggattttaaaatttcaagaggactgcaatggctgatttccatttttctatggttgtaattttctgtggatctatattactcttatcaagatgttcaaagttttttctccatttgcactcaggtgaaagcttggactgagcttttgaatgctttttgcacgagtggcagactcga

SEQ ID NO: 1571 - DNA, 547 bp, Zea mays
gcccgcagcagctctagcgcaagctaaggacgactgcagctacactgtttgtttgttgtttgttcaagaaagcctgtaggatcgatcggatcggatcggatcggatcggacagagcgagctatagctagctagggctagctagctagatggcgaggctacgcctggcggtggtcgccgtcgccctggccttgtgctgctgctgctgcctcatgatccacgcgccgacgataggtgccgctgctgccgccgacgccgccagctcgtttcctcctggtaagtatggtgtggttgtcgtcgttgtctcgctcccaggatttctgtagctacttaattagccagtttctcacgcatgcaccttataaacaatctgatcgtcgagcaggactggaggtggcggcgcagcagcaggatacccgagtggcggctccgccgccgccgtcgtcgtcgccgggcgcacaacaccatcaggtggtggtggctaattcatcgatctagctgtataataatagttaaatacactctactggatcggagtgacaacttcaa

SEQ ID NO: 1572 - DNA, 636 bp, Zea mays
  misc_feature (631)..(633): n is a, c, g, or t
tcttcagcgaacagaggtatgcaatttctgccctcctggccgctgtttgtcttttagttttgtagttgtcccatctcatgacatgaactacaactgtttcagatggtgggaaaattaaattccaaggtatgcggttggttgctatacgtacagtaagatgtttaacaaatgttgaagcttttgtactcagagcaagtgatctggaagaagtcacctcgcagtttgctcgattcctgcgtaatccacgagtgcagggagcgatcaggtaggcacatattggtttacattattatattattatcacatccctgcccgccagaatagttagggctgttcttatcattgtttttgctaattcatggcaaaatacgatattttttttgataaccatgtatcactgcgatttaagacttgttaaattcagttccttccaactaacctctgtccataggtatgaatccccctactggcgaaccattgctgcaactcgtattcaggttgcatggaggtatcgtaaaaggcggctgaagcgagctgagaagtcgaggttgagcgaagagacttatgcctcacttggatcttgacacatgattcttttcagcgtagacggaggggatgattgatcgctacnnnact

SEQ ID NO: 1573 - DNA, 1299 bp, Zea mays
tgttatcattttgacacatcgaatattactacagcaataggtattaagtttcctgtcatttgactctttaaccacagggctatgaataatcatcttgacagttacactttattatttggttgagtgaatcccttttttatgaggaagccattctgcagtcacaccactaaacattataatattcttttagggttgatgaagtatcaatttccatggagcgatttttctatattttatgattgaaataatataaaaaactcgacctgcggggggtaagacaatccttgggtattgtattaagaagaagacctcacataggtcaagaaaactcctgaacccctacctcacccatatgcagcagcaccgtagtccatgtgagaacgagtgaacgactgaggctgagtcttagacctgtgctttggcgtgagacagacatgagaagtgccattgctgcctaaccaagtcagctagaggcccttttgctgaatgaaataatataatagctaacttataaatatattcttgccatcaaaatacaaataatgtgtgctctgtagaatttctttctcttggatcgactacactcagatgctttccttgtaatttgatctctcagtttgtttctgagaatactctgtataaggacttctgtaattacctaatgcttacagtctactggcagatattgcatttgttgacagggcagacattaaggcatatgtcggaccccctacgcttcaagcacgatacgagatcttgaggtcatgcatacaggaactcttaagagttggtattcttacatatcctcaggtatgtcctgcattgccagcttcgtgctcaacgtgccaactttttcatacagtattactgtcactgtatcaacctaccagagctcacgatggttgctttgatcatgcagcactatgagcatttttttttatcgatctcagtggtagcactttgcttttcaattttatttattgcaactactgtctactggtaaccttaaaattctccaattgtagggtagtagtgtgccatgtattctgaactattcgaccctgaatgagaagaaacactgtcctgaggctgcagaaccccatggtgcgcttcatctatccaatctactctatgaagcctcaaaactgtgtgaggtaaataatgaagctgactcgcgtgctgtttttttgtaaccaaggcttctccacctctctggttaaatggtggtggttcatctctctttgcagggacttagtggccggtcattgaggaaactccctttcctggcacatgcctctg

SEQ ID NO: 1574 - DNA, 799 bp, Zea mays
ccaggggtctctccttcttggtagcccctcttcttgaggcctgacccccctcacccccatggagttttagttggtagtgtgagtgtttattcatggatgttgtcatttatgcgtgctgtcggcctccataggaaggtttctatcttgtaacccaggtcttctttagacctttcttttctttttaaatatatttaaagcgcagctccctgtgcttccgagaaaaagaagactagaaccttttgattactcacagagctgagcttgttgtttaatccatcctataactttacggtataccatgcttactagcaaattttatcatgagttctgtaatgtattttgggtgctcgaaaaccatttgctgtttagacttttagagtgtccgcttccgttttcagatattacgccaatgtttcaatcatagtgtgcttactgcaaaagttgcagtgtgccactgtgtgtgcaactacaatttgttttagcttcaggcagatagtgaccgtactctttcacttgtacacatgtccacaagtgacaaagtcactaacctgatttttgttatctgttaacaggaactgcaaatcagaaggggcaccttaagagaaaatctgctgcacactagtatgcaaattccctggtagttctaattagaatgcaatactactaatgatgacggttttctaggagagaatgtatatctgcatttgatgggagcttcctgcatgacgacttctctaggagagaatgtgtatcagcatttgacgggagcttcctgcatgacgacacatcaggcctatga

SEQ ID NO: 1575 - DNA, 377 bp, Zea mays
gcgtcaaggagtgcctggtaaccgagggaagcttttttgaccgtggcttcaagaaatacctggtgcgaatcgagatcataggagaagatcgggaggcatccaccataagatcaactattgagtacgaagttgatcaggagcatgcaggcaacccccctgttgccagtgccagtggcttggctatcgctaagccgctaaggccatcgtagaatatatcatcaagcagaagaagaaaggtcctcctgagtcctgagtaattaagctcacatcacatgtaatcaactccgggaagaaaggatattatattatatcgtgtatatgtttgatcagtgaagaaccgaagttaatttgtgtctaccaatgaacaaatagaatac

SEQ ID NO: 1576 - DNA, 378 bp, Zea mays
gtttgcctgttcatgcatgctcctcgtgacactcatatgtctttgctgaaacgcatccttcgctatgtccgtggtaccttggactatggtttgcatatctatcgtagttccagtcttgatctgttggcatactctgatgctgactgggctggatgtcctgacacccgacgatctacatctggttattgtgtttttctgggtgccaatcttgttgcttggtcgtctaagcggcaacatacagtatcccggtccagtgccgaggcagaatatcgaggtgtggccaatgctgtggctgaaatttgttggcttcgccaattgttgactgagctttgtcatcctcctcgtcgtgctgctgtggtcttctgtgataatgtcagc

SEQ ID NO: 1577 - DNA, 415 bp, Zea mays
gtgctgttttgctgcatggtggtggtggagaggaagatgcagccattgccgccgcctgagcgccggagggtcgttcgtttcgtggtcttcatggccgtctccctcctggccctgttctgctgggctctcgtcaattccaggatcaacgtcgccatgccttactctgctttcgtgatgcgcgatgtcgacaagacgcccgcattcacaggcctagaagacaggcagaggcaccccgccggcgacccagcgtggacctcggcggcgccgcaggccgtgccggtgaccagtaacgtcacggcgggctcggtgaaattgggtgatccggtgctccgggagccgctggcaggagaagcggaacgggaacggagcgagaggtgcgacgcggacagcgcggcgctcagggtgtatatgtacg

SEQ ID NO: 1578 - DNA, 215 bp, Zea mays
gctttcagtcgtttgttgcagctgaaacactgcatgcagtctgcagcatactagtaccgttaccgtccgtaccggctctgcacagtttgtaaatactcgagtaattattatcgtcgccgcagcagcattgtgttctgggtaaatcatgcaatcagatcagcttagctcgcctgggacgtgaatgcgaaagcgaatgtgaatcccgagaaatgtat

SEQ ID NO: 1579 - DNA, 447 bp, Zea mays
aggagcataccgctgcactagcgacattggtctcctggtcgttcggtctgttcgtttctggcgttgggctaatatataggccccggccagccgagcgtgagccttggtgtggcgtgcgtgcaaaacgttagatcgcccgtcccgctgtccatgtcctccgtctaccgtctaccatcgacaccacctcgccaggcagcgcgcaaaacctctcccatccgatcctgctctccgctgtcttctcgaccgtacgaggtaggaggtactagtactaccaccatccaatgctgacgcacgcgtagggcatggctcttgttgtgacgcggcgcagtgcgtgcatggaccagcggccgccggagcgcaatgcgaagcgcgcgagggaggaggagatccatgccgcgcccgcgcagccggacttccccttcgaggaggaggaggaggaggaggagg

SEQ ID NO: 1580 - DNA, 401 bp, Zea mays
caggtcgatatcacagcggaaccgtccccatcaagtgagcgtggaagctgatgccaacggccactgtggcgaagacactgatgatgaccaccaccacagggacacaggtcgctacggtgtggtttaccacctacatcttgaaggcatcgatgtgtcgtataggatcgatcagggctccaacatcttcgtcgaggacgccgcccttcttccagacgccgtccagaaacggcatggttatttggcgtggagggacaaacttcttggcagcagcgttttgtagcgtggccatggcgctgcgttttgttatcgttttcaggagtgctgcagtatggtgtaggatgtcagtagtgaactagtgatgccaatgaatttgaatgtggtggcgtctagtatctgaattg

SEQ ID NO: 1581 - DNA, 444 bp, Zea mays
cgtccgcccgtccgtgtggagcagcaggggcggcgtcggatgggatggcccaagttccggcgtcatcctctgccgcggcggcggagttttcggcttctgatacagtgattatttacactttttaggacaagcgtggaaaacgcctttaattagattgctagtgcggataaaaaatggtgaaaaaggtcgagagcagccgtctcctgtccatcgatcggccacgacgtgttaatttgcttgcaaggtctcccatcactcatactggagtactcatcttgtggttgtgacattgtgtggttaaatgcagtcatgaagagagtccacgcaactacgcaagggcaagggcctctgggccagttgtttcgacgtaaaccaaacagaagaaagggctattcctaaatcctactcgtctagccatcttgtctatgtgctcggaagccaaat

SEQ ID NO: 1582 - DNA, 813 bp, Zea mays
atctctcgctctgcttttcttcttacacatgttcattcttttgatcagttcaactcacaagtccaggataagccaagccagcttgactcttctctgccctttgaattttgctactctataaggtatcttcatctattaactaacagcctctcatagttatatctacacttactgtatgctgtacccaatggattcgttgctgcacactccagtccaaaggcttctaccaatcctccgaacataagcttcacggcggaaggtggaagcgtgtttcctgtcaatgatccaataattaccattacggactctgtatctgtaagatacaactgtcactctatgctatttggttatatcgctatccatgtacatgattttgttaatttgcaactacctctctctctctctcacacacacacacacacgcacacacacacacagaatccgatggcatattgcttggctgttatgaagagcgaaggtgttaacttaatagggggtaagcgccttctgcattcaaactcttcaaccttctgtttcaactaaactcttcaacattcgtaccttggctggtcattttatatgcagagaattttatgtctgggctgaaggtcgtgtttgatcgagagaggaaggtcttgggctggaaaaactttgattgtaagcaccatcatatccatctagacgtttttttacagattaaatttacaagagcttcaaactagagcaatgccgttacatgttgtggctgctgacatgccatgccaggttacagtgtgggcaactcaagaagcaaccttccagtgaacccaaatc

SEQ ID NO: 1583 - DNA, 776 bp, Zea mays
  misc_feature (769)..(772): n is a, c, g, or t
acgatgctttctcttactagaagcacatgccacctgtcgcaattaccagttcattatgtgaaagtatttatattgtatagcacggtaaaatttgttaatagaatagggatgtacatgtactagagctgtggagggtatttaatctagggttccctaactggcagttattttacttatgcaaattaggcacggcagattcacaggagaatacgtgtggtccgcttggagaccacgactgagaacaaacggtttgttgggcttatcattccaaattctgcagtggagtctgtactcgaaggtcagttgtagcgttacctttttcaaagaagaattcccatctgctgcttgcacttttatctgcactcctaacaaccggtgttgaatttgcatgcatggctagaaaataatgtcagcagactatagatgctactagctgttgctccctccagtcacaaattagtgtcattgtatgaaaaacagagtaaataacacaccctctttagtattgagtctcggcgtctggggcaggcggcctaaccctagtgccaccacccctctcatcactccactccacctcactgctgctggaagcagttggggtctcattcgctggtggaaagtgcaatggtgtacggcaggcaagtcctgtatggatgttgtttgtgccggcgacattggtggtctagcactgcaccgggcgtccgcatgagtcaaaacacccaaagtttatttataattttgctttctgaggttatgatgacatccaggnnnnaatg

SEQ ID NO: 1584 - DNA, 441 bp, Zea mays
ttctgaccgggaactggatcattctagtcgtgaccgtgacagagcccgggatcgttcaaaccgggatcggtatcattcaagccgagaccttgaccgtgacaaggatgccagagattatcatcggcatgagcgtgatagcagggatcgtgagtactacaggtccaggcattcagaagaaagacgggacgacagaagagatcatgaaagtagcaggcacaggcgctctagctctcgccacaggagcaggagtaggagccgaagcaggagcaggagtaggagcaggagaagccgcagccgaagcacgagcaggaggagcctgaatgagcagcgatccagcccattcagggatgcaaataaagagaaggcagccaccgtgtcgagcaacctagcaaagctgaaggacttgtacggtgacataactgcaaagaaggaagacagtga

SEQ ID NO: 1585 - DNA, 358 bp, Zea mays
cggcatggcagaactcctgcttcgtggattggccacagcttcagtggacagcaccacgggcgatatattcaagagcgcatcttctgtagctgctgctgtgaagactgagctagaaaattatatgcttgtgagaactgaatcgcttatccgtgagtttgtcgatggagcccaggatcattcagatcaattgatgaaagcctccacaaggccaaccgagttcctatcagacttgattggcgacttcgtggcatccaaaaggaacttgctgagccatgtgtctgggtttttgtccagtgaaagccgcttgaacagaattaaagattttatgcagaagatggagatggagaatgtgtggaca

SEQ ID NO: 1586 - DNA, 390 bp, Zea mays
gttctctctgcaaatctacagaagtgctttttagtctgacaatgaccacatatgttgctacctgcaacttgttataacagtacgagtgtttggtggagggttgtggtatgaaattgaagagttacaagagtcggcagcagcatctcatcgataagcatcagtttcccaaatcatttgagttcttcaaaaaggcacgggactcccagcgtcagcggcagaagtccaagaggaggcagattgctcacaagggtgaatagacaagggataattcgatggacgtcgacggaaaaggtgcaaggcaaacaaaacggaggtaccggctgaagcaacatgatcatagcgaaccgaaagagaacaagcagcagcataaggaggccccggatgttaaat

SEQ ID NO: 1587 - DNA, 358 bp, Zea mays
  misc_feature (216)..(218): n is a, c, g, or t
gacgccgggatgatgaagaggtgggccgaggagagaggcgaggtgcagagtccatcgccgatcaagaatcgtagggtatcggattattgactcgtcgatctcgcgcgtgccggtcggttcatgtaaaagtgcatctacgccgtcattgtttcggcgccgttcggttgttacggattgatcggtcggaaaacgatttctaactggattgcttctctnnnatatcagacttgattggcgacttcgtggcatccaaaaggaacttgctgagccatgtgtctgggtttttgtccagtgaaagccgcttgaacagaattaaagattttatgcagaagatggagatggagaatgtgtggacacg

SEQ ID NO: 1588 - DNA, 346 bp, Zea mays
tacatgagagaagaattccatgccattacattatgcaaggcacatgcctgcctccataagaccacagcaaacatgcatgttgtttagggtgcagcacagttcttgcctgatgataacaaagccattatccatgcaatgcattgttacgttgcacgcagagttgtctcgcccaatggccacacagcctcctcttaccttgggataacatatacaggcacatagaatccctgcctgtacgtacacgcagtagccagctactagtagaagtatgcaccaaactctgctgcccaaataccaactgaactgattgatctgatctgatcaacgacacaggcgagatcatttg

SEQ ID NO: 1589 - DNA, 353 bp, Zea mays
ctctcgagcttgttcgcttatgccgaaaaagggtatctactttttctacagtattttgtctgtataaattagtataaattacagctgcaagcctgcgacagtctgaacagctggcttatagccgcacgtcatctgtaagagcaagtttaataatagagtctattattggctctaacttcttactgtgtcatatagagccaacaataaacacactcatgtaataaaactggctttaagattggctcttagatgaatttcttgtctcttatctcttttatctttttgtcttgaaacctgtgtagcacctaactcttgcatgagagctcactacctctatttttttatgtctctct

SEQ ID NO: 1590 - DNA, 316 bp, Zea mays
  misc_feature (13)..(13): n is a, c, g, or t
  misc_feature (206)..(206): n is a, c, g, or t
  misc_feature (209)..(310): n is a, c, g, or t
tcggtctcctganggcatcttctcagttaaatcggcctacagagcacaattcattggctcgtacagtcaccttaatgctaaccttgtctggaaggcacgcgcagaaccaaaatgcaaaatttttgcttggattctcctgcaggaaaaactactcacggccaacaatctcgccacccgtgggtggcctcatcaatcgtcttgtgccnttnnnnnnnnnnnnnnnnnnnnnnnnnnnnnnnnnnnnnnnnnnnnnnnnnnnnnnnnnnnnnnnnnnnnnnnnnnnnnnnnnnnnnnnnnnnnnnnnnnnnnntacctc

SEQ ID NO: 1591 - DNA, 615 bp, Zea mays
ggtctcctccgtgatctttgatctcgacggcactctccttgacacaggtacgtacgcacgtgtatccatccacccagcctcctcgccatcccgctcccgctcccgctccgtgtggagtacgaccgatcagatagctgtgtcgtgtcgctgtgccgtaataactgatttgcatgcactgctcgcgcaaatgcgtgcgttgtcttggcgcacagagagggcgacaagggacgtcctcaccgaattcctggcggcatacgggaaggtccccgatgcgggggaggaggagaagaggctggggcagatgtatttggaatccactaccgggatcatcagagactacggcctgccgctcacggtcgacgagtactccaaggcgatgtatcccctgtacctgaaaaggttcctttttcacttcttacatgtacataacgcttgccagtctaatcgcttagtagtaataggctggctcgctttctcctactgtcctactacaggtggcaaaaggcaaaaccgcttccgggagtgaagaggcttgttaagcatcttcacaagaacggagtgccactcgcacttgcttctaactccattaggagaaatgttgatcacaaacttccg

SEQ ID NO: 1592 - DNA, 611 bp, Zea mays
catgcgccctcctcagctcttccacacaccactatctggatgtcaggtgcgtgcctgctgatcgatcatccatccatcccatgaggccatgatgcatgtgatttatttgtactagcaggatgtgggaggattttgacaagggccatgtcgccggtgctcggaatgttccctactacctctccgtcactccgcatgggaaggagaagaatccccagtttgtggatcaggtttccgcgctctacgccaaggaccaaaacttgattgtggtaatgcctgcctcatactgtgtttacataattaattgatttcatttgccgctaaccaaaccaactaactaacagggttgccgctctggcatccggtccaaactcgccactgcagacctcgtcaacgcggtaagcttaccttaacctagtgctatctcatcttagatttacaactaattgttttttatatatatatttattataagagtgagtttattgtgtacgtgtgctgcatataagcagggcttcaccaacgtgaggaacctacaaggcggatacctttccttgctccgaagcgcaaactagctagcttcctgcttatttgttcgcatgcttgtaataagt

SEQ ID NO: 1593 - DNA, 470 bp, Zea mays
catattcaactgcgtaaggccaccctgtcatgcttgactggtcctcttgtgatatgttcatgttaatagcataatgtcttttgttctattggaaaataaaaagtctccctggactctaaaatcaatgcctgtgaacacatgaactgtttgtgtcacccatgttcctgtgctccttggcactttcttatgcatgctcaaatgtttaagaaagactcatagaagtgactcctattcctatgccaggtcattgagataccaaggggcagcaaggttaaatatgaacttgacaagaaaactggactgatcaaggtaaagcaatgttgttttcctcccgccgaagtcttattgtgaagctatatttcttgccagttctaatatttcctcctttccgtttcaatctgtgtgcatgtgcaggtggaccgtgtgctgtattcatcagttgtttaccctcacaactatggattcattcc

SEQ ID NO: 1594 - DNA, 385 bp, Zea mays
agtagccggtagcgacaagcaggtccttgaaggtgaagctgtgcgcgtagccgttggccacatccggcgcgaccttccttctcgcatcggtccctgtttccccggcaagaatcaagtacagcaatccaagccacaagacccaaccgaatgatgctgcggatgggaatcgagaacgaacctgacgagtcgtcgggcttggagggcttgaggtcctcatccacctccggcgcgaagcacccgaagcaacccaagcccatcagaccggcgcagacagatgctgtccaagaaggggggtttttttgtgctgccgcaacgcaacccgactggcactcccaagaacagagccgacgagcgactgagcgagaggagaggaggtggaagagag

SEQ ID NO: 1595 - DNA, 344 bp, Zea mays
ggcgatcatcggaggcggcacggacgagcagatcgagaggctgcggaagtacgcgaggtcgatcgggctgctgttccaggtagtcgacgacatactcgatgtcaccaagtcgtcagaggagctcggcaagacggcggggaaggacctggcaagcgacaaaacgacgtacccgaagctgctggggctagaaaagtcgcgggagttcgcggaggagttgctctctgatgccgtagagcagcttgcttgcttcgacaaggagaaggcagcgcctctgttgcatctggccaactatatcgcccataggcagaactgagaatttgaggtgactgcgtactctattgtcg

SEQ ID NO: 1596 - DNA, 356 bp, Zea mays
ggtcgcggtggtgatttcgccatgcctcgggacggatcggtgacaaaacccaagtttggccagaaattatggcacctcttgtttgtcttccttgatccggtgtccgtgcactacccaacaaaccccccttctacacctcaatgattggctgaatgcaggtgagatgcagaggagctcgcggtggatcctcctcgctctctctttgttctcaggtcccggctaagtgtgatgctatgggaaatcatggtgccttgctttatagggaggtcagaccctagcaacccgagcacatccaacagacgcgagcaacacagagatctgctatggtgtttgcgggattcagggaggagtttatt

SEQ ID NO: 1597 - DNA, 410 bp, Zea mays
ccgcaggagactccactccacagcacgcggcgccgtgcggcgagacgatgccaccacggagtcagcaggggagggcacatcgtcatcgtcgtcggaaagcctcagggtgagtaagcctaccgcgacgacggctccggcggggttttcgttgcccaaggactaccgccatactctgttcagctcggagtgcctggaggtgctgggcctggtggacctcgagtcactgcggaagcggccgaggctcaccattggggtgacggtgaaagcgtccgtggtgctcccggtgctcgtggtcctggcggtcctttacctctcggacgtgaccaagggtgttgtcgactggacgcatcatcacctggagaacgacgacgacgtgggggactagcttagttaaaggagtccagctctcc

SEQ ID NO: 1598 - DNA, 411 bp, Zea mays
cagtagcttctcttatcggtttatttgcaagcggcgagtggaagactttagagggagagatgcatgccttcagctcagggagggtgtcctatgtgatgacacttctatggactgctgtatcttggcagatagcttccgtaggagtggtgggtttgatctttgttgtgtcatcactcttttcaaatgtgataagcacactggctctacccatcattccgatttttgctgtgattttcttccacgacaagatggatggagtgaagattattgctatgttgatggccatctggggatttgtttcatatggatatcaattatatgtcagtgacaagaaggctaggaagacttcagtcagtgtggaggagaattcctaagcgcttgttggcctgttacatttcgtctttgtggctc

SEQ ID NO: 1599 - DNA, 430 bp, Zea mays
tttgccttaccgtgtgagtagcggcaatccacactccacagatcaaaatcatggtaaatcgtgttagatcgcctccctttgttggagcagcaatcccaatttatatgaatacaattctctatacacagaaaataggcaagtggctgctcgattgcaactctcagatcatccgctctgtcagtccttcagttcgctgtccacctgaagcccggacagcgcactagggggacgcactaggaaccgatgccctagcctccggcaccaaccgcgctccacatagcagccggcgctgcgctccagtcctccagctccaccgcgtctcatatcctctcgtcgaccaccattcccctctatctactctgctcctctgagcccaactacgccggcggcaacgaaaaacctggtcggagtgaaatcgatccagagaaag

SEQ ID NO: 1600 - DNA, 337 bp, Zea mays
  misc_feature (318)..(322): n is a, c, g, or t
gagaggaaaaaggaaatagaaggcatgttcattccagggatcggagtgctaatactgaaactaagaacaataaatctcataagatacctagcaagagatcgagctagacatgtatatatatctcggaccatgacgcctcaattccccggccacgcgcgcacacctcgcaccgtatctcgatctgcacccattcatgctccgcgcgcgccagctagctcgcagcgagaagcatatctgcatatgcagcagcacggcggtgcgagagctcaactaacgcgagctgctcaccggcggcggctcccttggatccccaggcgnnnnnggccaggccgttgca

SEQ ID NO: 1601 - DNA, 425 bp, Zea mays
tcaactccatcgtccggtgcgcgctgcggtgctcgagccgggtggtggtgggtcctgaaccgaaccaggtgacgcggcttgtccagagcgggctgaggaggaaggcgctccgagccatgccggtcctggtctactcgcctgggctgaggatcaatgctgccaacccgacgtgcgcgatctgcctctcggacttcgaggcaggggagcatgtcagggtcctccccaaatgcaaccacggcttccatgtcaggtgcatcgaccggtggctgctggcgcggtcgacgtgcccgacgtgccggcagtccctgttcggagtgccgcagaaggcctccggctgctccgaggcgagccgggctgccgagccagagcctgcgcctgcgcctgcgcctgctcgctctgtccttgtgccgctcagacctgaaggt

SEQ ID NO: 1602 - DNA, 371 bp, Zea mays
ctaatcaggtgcacggcatgattataaagagcgagttgtacttggatcatgttgtcaaggaggctttgatttccacatatgcaaatgctggggctgttcagctctgtgagaaggtgtttcaagaagtagatacagttagcaatagaagcatctggtcggctttcatatctggggttagtaggcatagcgtacaaagatcaattcagctgttaaggaggatgttatttcagtgcctaagaccgaatgacaaatgctatgcttctgttttcagttctgttgactcatctgagcttggcagacagctgcatccattggtcataaaagatgggtttattcatgttgttcttgtggcaagtgcactctccaccatg

SEQ ID NO: 1603 - DNA, 737 bp, Zea mays
  misc_feature (385)..(733): n is a, c, g, or t
tttgtagggcttcttgagttcttctacagtgaggcgtccacggggatgaagtctattggaagctccatcttctactgcatccttggggtgtcagcttggttggggagcctgttgattcaagtggcaaaccgagttacaagacaccgcgatggcacaggaggctggcttgatgggaccaacttgaacaaggggaaacttgaacgattctattggttgctagcagttcttgagctggtgtcgctattagtctacgtcttcttcgcctccaggtatgtttacgggaatgaccaaagggttgtggctgacgaagataataatacggctccatctgatggtaccataaatgttatctgattgttagagcgtagtggtaacgagactgagnnnnnnnnnnnnnnnnnnnnnnnnnnnnnnnnnnnnnnnnnnnnnnnnnnnnnnnnnnnnnnnnnnnnnnnnnnnnnnnnnnnnnnnnnnnnnnnnnnnnnnnnnnnnnnnnnnnnnnnnnnnnnnnnnnnnnnnnnnnnnnnnnnnnnnnnnnnnnnnnnnnnnnnnnnnnnnnnnnnnnnnnnnnnnnnnnnnnnnnnnnnnnnnnnnnnnnnnnnnnnnnnnnnnnnnnnnnnnnnnnnnnnnnnnnnnnnnnnnnnnnnnnnnnnnnnnnnnnnnnnnnnnnnnnnnnnnnnnnnnnnnnnnnnnnnnnnnnnnnnnnnnnnnnnnnnnnnnnnnnnnnnnnnnncccc

SEQ ID NO: 1604 - DNA, 434 bp, Zea mays
tatagcatcctgcatccaatccacagtagctgcggttactagctagctagtctgctccacgctgcagggcttttagcttaatggccgggctaagcgttctcctggagaaccacagcaagagctacaccgggaaggcggcggcggcgcagatcatcagcaaggccaccctcgtgacgacgacccacggccccaaccaccaccagcagcagcagcagaaggtccctgtctctgcggcggctgcgggctccttcctgcagcgctgctgcctgtgccacaaagagcttgccgagggcatggacatctacatgtacaagtaggcggctacatactgcgatctactgacccgtcgtccgcgccgcctcacgcgagcctctctgtctgtgtactcctaatatatacctgtgccctgactggcggtatatgtgatctgcata

SEQ ID NO: 1605 - DNA, 410 bp, Zea mays
gtatgcactaatgaatcatgagagctgtattgaagataacatttcccttcatttacatactgaggtccattgtttttcctttggacaactatgcatcttttcacttcccccgttctaaaaatctatcatcttggttgcaaagtctaatgctttggtgctaggaagaattaagttagttgcatattttgggctgaatcacttagttgattttggtaggatgttttgctgaattacgaatatgctattttctttttaaattacctatatgcttatcgcacaaacatttatatttttttgttatattatatgaataacttacaactcagtttggtattgaaatttgtattttagaccaaagacaaagtaagagtgtgctgaaagaagaaattgacctacttaaggtggaacca

SEQ ID NO: 1606 - DNA, 337 bp, Zea mays
gagctatcatcagccacaactgatgtaatcagccacaactattgtcttcgagacatagacaacagtcttatagcatggccttcaagctgtgtaagttcttttaattctctcataaagacatacactattttacaaactaccgtatttggattaaagttttgtgatttcagttgtagatagaaaaggcagctctttaatctcaaccattgaacatcaacagatcaacatgagggctatgactttgattcttcttaatttggcgttattagtgatgagagctatatgagtcttgtttatgagtcatcctttgttcgtttcatactgtcatagaaaaaat

SEQ ID NO: 1607 - DNA, 442 bp, Zea mays
  misc_feature (433)..(439): n is a, c, g, or t
tttctcttatggagtaatcccagatataacctctccatttttgacatctctttgctctttcaggagttggtgaaatttacacatatactaactaacgttcatttttgcaggtggagaacatttcatttgatttgtcacaatacaacaatgccccaagcttccactggcctgaaagcagcagcaggtctcagctccactgagtaggcagcaatgcaatcgtggatgccttccaaatagactaagttctgacagtcttgtaagggcttgttcggttattcctatcttctgtggattagatgagattggaaaaaaatatgaaagattttgacttgaaagattttgacttgtttgggattaaaacgcacccaattccactcaatctacatggattgagagcaaaaccaacaagccctaatttggaaaaaaaaaaaannnnnnnggg

SEQ ID NO: 1608 - DNA, 377 bp, Zea mays
tgctataactgatgaggtgttgtcctgacccaaacacaggttggcacagttggtggaggcacgcagctggcctcacaatctgcctgcttggacctgcttggcgtcaaaggtgccaacagggaatctccggggtccaacgcgaggctcttggccacggtggttgcgggtgcggtcctagctggggagctgtccctcatctctgcgcaggccgctggccatctggtcaagagccacatgaaatacaacagatccagcaaggatatgtccaagacccttgcagaggaaacagacaaagccaagaaatgctgaataatatgaagtagttgttctatagccctttgggagaaaaggagcagaaagggtcgtacaggatgatt

SEQ ID NO: 1609 - DNA, 412 bp, Zea mays
tgggacgcggtcggtggcgcccccatgcccgagcgcatcatgaagcccttctcggtcagctgcgtcgacagtaggatcgtcgtcgttgggcgaggcctccacgtcgcgattgggcatgtgcgggaggagcccgctggcggcggtcctggtagcaggggagcgccaggctactccgtttgctggcaggacgtggacgctcctaaggagttcagcgacctgacaccttcgagcagtcagattctgcatgcttagctgctcgttgagccagccagccatctgcccactggtaatccgcacaaggacttcaacctggttgggttggttactacgagcggtcagcggtcaactattgcagctgcctgcttccagcgcttttgcctttgatgagatgcgcaatcgagtaggatctttt

SEQ ID NO: 1610 - DNA, 220 bp, Zea mays
ctttgctccatgccgcgataacttcaggaagctcaggatgctgaggaggtcagctggttctgatgcagcatgttcatcgtctcaccaggacacaacacttggagcaagacagtcataggtcgttccaccgtacatacttatattgacaccagaaagctgattgtgatcatctagtttattacagacatgacaatagccaaatcgtgttcccgtcttgatg

SEQ ID NO: 1611 - DNA, 497 bp, Zea mays
ggttcgaggcgactgttgttaaagctgtcggcagcaagttcctcgtggagtatgctacgctgaaggccgatgacgggaccaagcctctgaaagaatctgtagaagcacggcacatcagaccttgccctccagatatccctgccgctgatggattcaaactacttgacgaggtcgatgccttctgcaacgacgcgtggtgggtcggtgtggtatccaaggtcctcggcgaggagaggtgcacggtctacttcaggccttggaaggaagagatggagttcgagcatgcgcagctgaggttgcactgtgactggatgggcgggaggtggatgcgggcttccccggtatgcttttcgattaaccctgttccctgcattggtacggactttttgtttgtgacacgcaagctcatttgcgaactggcaaccctttttcaggcactggagatgtgaaggctgaagagccacgcgatggcgttagacagtagcttggtgattgta

SEQ ID NO: 1612 - DNA, 383 bp, Zea mays
atttataaataaaactttcacgaaaatgaccttatgtctatcttgtagcagctagatggtccttttacaaattaaagctgctagtgcgtgctttgctagaatgctagatcttggctcctccgtgcagttgtgcattgcatcggctgatgcttgatgggcacgcagccaaaagaactcagctagctagctccctgctcccctgtttcggctgttccacacttccactttcctcggtggaatgtaatgtgaggaggtggtgccttttcggcttttcctgctgtgatggtgccgcaatcggttggtgtcacgtgtcagttgcgctgcgcagattacagaagcaccgacctgcacctgctggacgtctctaaagccatagcaacgtg

SEQ ID NO: 1613 - DNA, 312 bp, Zea mays
cgacgccgacgccgccacccaggcctccctccacggacgtgggcctccctcctcctcggacgccagcagctggcgccaagtctccaccctctccttcccccgccataacccccgccgacgtggctaccggtgtcccttccactctccaccctttccctcccttcaacgccaagtccatccacccttccgaatcttcgattgcctccgtccatgtaacgactccaatcaccctagagtccggactctagtctggtcagatccactagcctgcgcttccacgcctagctcacgccttcttggaccctgttccct

SEQ ID NO: 1614 - DNA, 446 bp, Zea mays
atacgagaagaaatgaacggacattgccaagccgtaaatcactcaccatgcatgcatcgcgtcgtgtgtgccatagggactagggaaggggtgggcctgtatatgcttcctgctggggaccccagaaaaagatgcccccgttgtcaaacttgccttccccgtgatcttcttgcgccagccttgctaattgccatgctgcgctgccgccgcccgccttcccttctctcatcagaataatgccacctccgtccatcaatccaatagtataatcacctttcggcaaaggaagaaaaacacacacacacaaaactatgtgatagattagcatttataaacccagggattttttttcataagtagtacatccagaattacctgtaggtacacccagtgcagattctggagtggacgaatgagcacttcttctctggggtgcaaaaaaaaaa

SEQ ID NO: 1615 - DNA, 353 bp, Zea mays
ctctgattgatatgtacaccaagtgcgggcatgttgccagagctcgcgatgtcttccaccggatggaacagaaggtggttattgcttggaactccatgatcagaggccttgcactgaacggctttgcagaagatgcaatcgccttgtacggggaaatggtaggagatggggttcagcccaacgagatcacctttctcgcgctgttgacagcgtgtacccatgctggcttggtagacaaaggcatggcattcttccaagagatgaagaagaacaagcagcatgcctctcctcaagttgagcactgcgcttgcatagtggacctcctctgcaagtctggcaggctgtgggaagcc

SEQ ID NO: 1616 - DNA, 512 bp, Zea mays
  misc_feature (502)..(504): n is a, c, g, or t
  misc_feature (506)..(508): n is a, c, g, or t
tgaatcgtacgtttgtactataccttcaaatctcaactgatgtaacggaattctgacaggatacgaaaaacgctgatgcatggttagcattggaggaaaggagagtgagtaagggcttgttcggttattcccaaaacacatggattggatgggattggaaaaaattgagaagaagtttgacttatttgggattcaaacccatccaatcccgctcaatccacatggattgagagctaaccgaacaaggcctaatatggagaagaaagtggatcttcggcgaagaatgttggagctaagaaagatgagcagatacgaggttaagttacattgttactcgataccgagaaactgactccgttggctcgtcgctactacatcaagaagcgaaagcagatagccgcagcggctggagttaaagttgacgatgaggagtgactgatgtgaagtactagctgttttactattgtttatccttttaccttttatttttagggctagtttnnnannnccta

SEQ ID NO: 1617 - DNA, 302 bp, Zea mays
tctagatcagaaaaacagcttccaactgaaattcaacgaaatcgcatcacgccgaggcaacagagagttgtaatccgataagatctagacctgattgtacaaagcggacctgatgcgcgcatagcgtatttattggagacagcggatgcgaggagggtaggggaacctggggagggctgcgaggaaggcgtggcggtatcgaccaccctgaccggcatccccgacagccgcggcgggtgacgtcggcggcgacgaggaagaggctgccttccgagaaaactgttgccggtcgctggctcgct

SEQ ID NO: 1618 - DNA, 391 bp, Zea mays
cgtcctccatgggcgaccgcgaccgccgccgccgctgcctctagggacgccgggcggggggagtgaaggctgtgctagagaggaagggagcgcgcgagccggagaagggagaagaggtgcggctagaactacaaagcgatcgagtctgcgacgtttggcagcggtgtttgcaacggtcacgcccgtacaggagcccggagctccggagcccggaacgggacggcacgcgtggcgtcggtcgcggtcgcgtctgtactcgccaacctttttggtgcggagcggacgcaggaggtgcggcgcgatcgcgggttcagtgcagccagtgagaagcaagcgacccgtccgagagtccaacagcgcgctggctgctgaccttgctttcactgggaaa

SEQ ID NO: 1619 - DNA, 481 bp, Zea mays
gaactaagcttcggtgcaaaggttctccaagctggcggtattgataaagtcttcagagaatactttgcagttgagaaagatgagaaactacggaaggctttccagtgctatctttcaaccacagctggtccaatagctggaatgcttttcatctcaactaagaagattgctttccatagtgataggcctttgagtttcacgtctcctaaaggaggcagtacaagggtgccttacaaggtaattgaagcaaaatctcttcgtcaatatgcatacctgaagtttatcagatataaaatgtgacctaaagatgtcggacaaagctaataaaatatgtaccttctgcaggtgttaatccccacagagaggatgaaaagtgcttcagtgcgggaaaatttatacaatccagatgagaagtatattgatgtagtcactgttgatggctttgatttttggttcatgggctttgtcagctatgagaagt

SEQ ID NO: 1620 - DNA, 518 bp, Zea mays
gcgttttggatgcagtttaaatgaatccgttcaacatctcttcttggattgttctaatgctagatgcatttggagaggggtacaaatctcctttaacatatcaccacctttaagcatacaacatatgtttggaaattggttgaatggggtggatgatacacttaagtacaaaatctggaaaggagcatgcaccttatgtggggcaatatatatggctatgtcaaaatgatgtgatttttaacaataaactagtttctactcctatgcaggtagtcttcagaggaacccactggacaagacaatggtccgtgttgcaaaaagaggaaaacatgatacaaatcaagtggggatgtcgtgcgcttgagactacaatgatgcaaattttctcatacaacggatgaagttttagtaatcgaattggtttttagagattacgaaatatggttgttcttaagatattaaacatcgtgtgttttggtttgagatgtaataattgaacatccacatgcatctattgg

SEQ ID NO: 1621 - DNA, 380 bp, Zea mays
atgggcatggtagccgttttcatcgtagaggacggatcatcggcggacacctaccttcctccacctcccgcagatttaccaaaatgtggatctaacaaaggaggcctttatttgccagaggaattctacctccaaaaatgaagagagtcacaagagacagtgccaagagcaagcgaaggaacctatgagaggacatgttggttaatagcactagtagtatacaaagtatatttagaaatgattaggtttttatgaggcgtggttttcataatcgcccctacctatgctagtaccctcctcccgaaggtcctctacagtgaatcacatatcactccctgaatcagtatatccatgtcccaccgtgtaatgtgttgtataag

SEQ ID NO: 1622 - DNA, 477 bp, Zea mays
cttggctccaaaaccaagtgggaaagaaaccttcgcctggaatggttctcatggcccccaggtacgaactgaaccagccttcgaatgaaagctattcaagctattcggttttcagtcagctgtttggctgcagtctcaatgttttttttctatttcccgtttcgttgtgtagagctgaggcctgcggaggtgtacttccaaatgcatctgctgtcgaggcagtcgtctgcagctgtttctcagcagaaccagctggtggagacgatccagagccccgagttatggttgcttcgggcgattcacctgaacccgtcctgccccaggtactggaaggctctgctgcagcaaatatatgtgtagccttttgtctcacatgtatcgtccatgcgcattctagcgggtgacacgtccgtcggacggtgatatattagttgagatcgctggggataagttggtggctcgcatgtcgtagtgctt

SEQ ID NO: 1623 - DNA, 268 bp, Zea mays
tgtttgctgtgctgggaatgtttcttttatgtggagtactttttgtatcaagatggaggaagcacaagacgaaagtcatatacgacttagagaaaggccggtacatcataacacacatcagctgatgctgaaccttgtgcagaagaactatatttatacgacaggaatagatgttgtgttgtacaacaatgtaccagttcaattatttgtgttttattttaggtagcagagctgggtgggtagagcatgaaatatagcacaaatgcga

SEQ ID NO: 1624 - DNA, 407 bp, Zea mays
ccggatttcaagaacgcgatggcggtgatcaggccaagcttgcagaagagcaaatgggacgagcttgagaaatggaacgaggaatttggttcgagctgacggcggctcgcactgcctgtgcctgatgatgatcaagcggtcctatttccatctgtatatatgatttatgtctcccacgctgtggctcacaacacaaggggtcacaccatgcgcccattgatgcgtcctcgttgggctaggcagcacaacatcgacagaagcagaatgtaaaggtatacttctggcaacggcctatacagccattgagggctagtttgaaacaccgttcaagggattttcatttttcaaagggaaattagctcattttcccttgtaaaaatgaaaattttttaggaaaatggtgttcc

SEQ ID NO: 1625 - DNA, 1141 bp, Zea mays
  misc_feature (382)..(431): n is a, c, g, or t
  misc_feature (433)..(458): n is a, c, g, or t
  misc_feature (461)..(461): n is a, c, g, or t
  misc_feature (463)..(479): n is a, c, g, or t
  misc_feature (482)..(483): n is a, c, g, or t
  misc_feature (485)..(493): n is a, c, g, or t
  misc_feature (495)..(498): n is a, c, g, or t
  misc_feature (500)..(525): n is a, c, g, or t
  misc_feature (527)..(530): n is a, c, g, or t
  misc_feature (532)..(549): n is a, c, g, or t
  misc_feature (551)..(557): n is a, c, g, or t
  misc_feature (559)..(561): n is a, c, g, or t
  misc_feature (565)..(575): n is a, c, g, or t
  misc_feature (578)..(591): n is a, c, g, or t
  misc_feature (594)..(615): n is a, c, g, or t
  misc_feature (617)..(635): n is a, c, g, or t
  misc_feature (639)..(643): n is a, c, g, or t
  misc_feature (650)..(650): n is a, c, g, or t
  misc_feature (652)..(655): n is a, c, g, or t
  misc_feature (658)..(659): n is a, c, g, or t
  misc_feature (665)..(666): n is a, c, g, or t
  misc_feature (675)..(675): n is a, c, g, or t
  misc_feature (678)..(687): n is a, c, g, or t
  misc_feature (692)..(692): n is a, c, g, or t
  misc_feature (694)..(705): n is a, c, g, or t
  misc_feature (707)..(707): n is a, c, g, or t
  misc_feature (714)..(717): n is a, c, g, or t
  misc_feature (719)..(725): n is a, c, g, or t
  misc_feature (730)..(740): n is a, c, g, or t
  misc_feature (742)..(745): n is a, c, g, or t
  misc_feature (747)..(756): n is a, c, g, or t
  misc_feature (763)..(766): n is a, c, g, or t
  misc_feature (768)..(772): n is a, c, g, or t
  misc_feature (774)..(777): n is a, c, g, or t
  misc_feature (779)..(785): n is a, c, g, or t
  misc_feature (787)..(801): n is a, c, g, or t
  misc_feature (806)..(806): n is a, c, g, or t
  misc_feature (809)..(812): n is a, c, g, or t
  misc_feature (815)..(818): n is a, c, g, or t
  misc_feature (822)..(822): n is a, c, g, or t
  misc_feature (824)..(833): n is a, c, g, or t
  misc_feature (838)..(840): n is a, c, g, or t
  misc_feature (848)..(854): n is a, c, g, or t
  misc_feature (858)..(863): n is a, c, g, or t
  misc_feature (867)..(871): n is a, c, g, or t
  misc_feature (883)..(883): n is a, c, g, or t
  misc_feature (887)..(892): n is a, c, g, or t
  misc_feature (894)..(895): n is a, c, g, or t
  misc_feature (897)..(927): n is a, c, g, or t
  misc_feature (931)..(948): n is a, c, g, or t
  misc_feature (951)..(955): n is a, c, g, or t
  misc_feature (957)..(962): n is a, c, g, or t
  misc_feature (964)..(965): n is a, c, g, or t
  misc_feature (971)..(971): n is a, c, g, or t
  misc_feature (973)..(973): n is a, c, g, or t
  misc_feature (976)..(982): n is a, c, g, or t
  misc_feature (987)..(993): n is a, c, g, or t
  misc_feature (997)..(1006): n is a, c, g, or t
  misc_feature (1009)..(1019): n is a, c, g, or t
  misc_feature (1022)..(1036): n is a, c, g, or t
  misc_feature (1038)..(1039): n is a, c, g, or t
  misc_feature (1041)..(1050): n is a, c, g, or t
  misc_feature (1054)..(1055): n is a, c, g, or t
  misc_feature (1061)..(1061): n is a, c, g, or t
  misc_feature (1063)..(1063): n is a, c, g, or t
  misc_feature (1071)..(1110): n is a, c, g, or t
  misc_feature (1116)..(1127): n is a, c, g, or t
  misc_feature (1130)..(1136): n is a, c, g, or t
tccgctaccacgagctccttccacatgttgacaggtttgtcatccttgaggccaattccaccttcaccggcatccccaagtcactctccttttacgaaaacttcagccgttttgggtttgctggatcaaagattgtctacgacatgctttctattggagagctggataccggttctcgtcgccaaccattccatgtcgaggcctatcaccgtcgctcactcaatatgctgatacgaagatcgggtattgctgccggtgatatcctgatcatggctgatgctgacgagatccctacccccgagaccgtgcagttgctcaagtggtgtgacgggataccaccggtaatgcaccttgggatgaagaactatatgtactccttcannnnnnnnnnnnnnnnnnnnnnnnnnnnnnnnnnnnnnnnnnnnnnnnnnannnnnnnnnnnnnnnnnnnnnnnnnnaangnnnnnnnnnnnnnnnnnaannannnnnnnnnannnngnnnnnnnnnnnnnnnnnnnnnnnnnnannnngnnnnnnnnnnnnnnnnnngnnnnnnngnnngagnnnnnnnnnnngannnnnnnnnnnnnngannnnnnnnnnnnnnnnnnnnnntnnnnnnnnnnnnnnnnnnnatgnnnnntttgttnannnnagnngtgganntggggatgntgnnnnnnnnnnggaantnnnnnnnnnnnnangaaaaannnngnnnnnnngtggnnnnnnnnnnngnnnnannnnnnnnnnagaaatnnnnannnnntnnnntnnnnnnnannnnnnnnnnnnnnnttttntannnnaannnntggngnnnnnnnnnntttannntaagatgnnnnnnnaatnnnnnntttnnnnnttattttatgtngggnnnnnnannannnnnnnnnnnnnnnnnnnnnnnnnnnnnnnatannnnnnnnnnnnnnnnnnaannnnnannnnnntnnaaattnantannnnnnnggggnnnnnnngggnnnnnnnnnnagnnnnnnnnnnnatnnnnnnnnnnnnnnntnntnnnnnnnnnntttnnatgatntnaataaagnnnnnnnnnnnnnnnnnnnnnnnnnnnnnnnnnnnnnnnnggggtnnnnnnnnnnnngtnnnnnnnttttt

SEQ ID NO: 1626 - DNA, 419 bp, Zea mays
tcaaaactaaaggataaattagacatgacaaacttgtcatatggtgaattagcaaaggtaaagttttctttatgttttgcaatatggatttcttgatttttgttgacaatctgtcttttcccctttcaaaggaacttaaatcagttcaagatcaactagcagcagagggttcaagatgccagaagcttgaggtgctaaagttaaacatgcaattgattctctgatcctgaaaatacttattttccggtttccttcttatgcttctgattacttgcctttttatcctgaatctgtcaacttagtcccaaattgctgctgcacggaagagactggaatctgctggttctttggagaatgaactagaagtattgcatcaacatatatctcaggtggaggaaaccattgcaactactcagaga

SEQ ID NO: 1627 - DNA, 929 bp, Zea mays
tgaaacaagtagaattattttttattgcatacatgaaatggagaccaccataatcagtaaccatctgtagaagaagtggtggtttctcatcttccgtatctttcaggaagagatgttttccacttctcccagcaatccaagacaaacgatacgccatcttttctaatttgttggaaccacgaagaagtggtatctgccagtgcataacagaaaccgaatcagtcaaatatgtggattcttcatggctatgcagccatgagacctgtagcattataaacttatactctttgatccgttaccatacgggttatcttagatttttttctgaagtcacagagaataaacgccattatctttactagctcagtgatataaaaggccatggttgaactatagcatttgggattgtaaatacgtgacatttatgaagaagtaacacggggtaatagtattgatatgaggaaacaagtacatgcatttagtacaccagaacaatcatgtcatgtgagtcaaataaaagaaaacaaggacaccttatgttgtagcaccaataggaacaaatttattgaggaaaatgaagcatctaactgattaccttctttatagaactcagtttataattagtacccactcccctgtataaaatatgatcaacaatactattcaaaatcctacaaattcaacatggattatatgattatatcacaactataccacaatacgcaggttacaaaagaaaataattcaacaccaacttccaaatcataagtgcttgaaattttttaacctaacctgtttgtgtgatcttgtaccgaggtgtggtgttgcaaaagtgatgaagttaataggctccaaaccagcaattttccctttgctgtgctggttactagaatagtcaacagcatggttctcaaacttttcatgagaat

SEQ ID NO: 1628 - DNA, 563 bp, Zea mays
gacctagaaagaaccgatatggatccagagtcaagagtgacacggtatatcctagatctcctgattcgattgtgaaaatatctcagtctgacaaatttatttcgaccttgcttttctaacatgttatctcgtactatttaaggcttcattgtgatgtctgactttcaattagccctttgttccgcaactgtaaccagttggtccatttgattcacagttctatattgatccaatcaatggatacgaatttcactctctcaaggatgtacaccgctatcttgaatctggagacatcagtaaatgtattagattgccaaacaagagaaaaattgaggacctgcatactaaagaggaccaatctcatcatgtaagtttcatcttcaagttttggcccacatctgaatttgccctcgatcttgtgttagctgcaacattggattgacaattggattcaaatcaacaaggagttaattcttaaggtagtatgattctttttaaggcaaaggtttatgaatttcatttgaactattttaccatccccccgagaagtactaagaggttac

SEQ ID NO: 1629 - DNA, 381 bp, Zea mays
tcgcacaccaatctcgccggctgctgcccttcttggtgcactcgccctcacctctactccagcggcgctcggcgcacgtgctcggccatggcgtcgggatcccgcactctgtccatgtcgagctccctctacgtcacgccctcagcgcctcgctgtccttaggcgtgtgttcctcagccccatggccacacccctgctcctctccatccatggctgcgctctcccctccgtgctcaagcttgccctcagctcctggccatggagcttgccctggcccctgcgcgctcattgtgggcgctcgcctgccttgttcctctccccaactagagctcgacgtcggcacctaggtaggccgtccctgtttcccctcgtttctcccta

SEQ ID NO: 1630 - DNA, 564 bp, Zea mays
ctgcttgcactaatggggccatcgggctctggcaaaacaactttgctcaatgtgctagcagggcagctcgccgcatcgtcttccttgcacctttccgggtttctgtatatcaatggtcggcctatctcgaagggcggatataagtaagttgtgttcatgcagctggggtcttatttctgctcttgtttgtggaaaggagctaatgactatctccttgtgcagaattgcttttgtcaggcaggaagacctgttcttctcacagcttactgtgcgggagacgctctcacttgctgctgagctccagcttcctgacttgtgggctcctgagagaaaggagagctatgtcaatgatcttttgttacgtatggggttggtgagtgctagaattttgattattgtttctagaaattgaagtgaacggttcggaggacagtcttaatggttggatcgttgagtaggtcaattgtgctgattctattgttggtgatgcaaaagttcgtggaataagtgggggtgagaagaagcgcctctcacttgcatgtgagttgattgctagcccttcag

SEQ ID NO: 1631 - DNA, 382 bp, Zea mays
tctgcggcccgctcgtcgacgacgcctcgctcgtcggcctgcgcaagaagaagcccgcgcgccgcctcatgcagctcctgtaagcggtgcttccacgtgcactacgcccggacggaccgcgcaagcgatggtgtaatacggctggtatgtgttttttggtttggtgtgtgcgtgcgtggtatacgcgtgccgtgcgcgccctgtggctgtggctgcagtggcgtcgcgttgggtgttttcttgttgtgacgaagaaaaaagggtatgggttggggtggtccgctggccggcgcaccgggtaaaagacgagaggttttaatcaacttatattaacctgatggggtgccagactcatcaaggtgaaggtgacacgggattaata

SEQ ID NO: 1632 - DNA, 734 bp, Zea mays
  misc_feature (668)..(676): n is a, c, g, or t
  misc_feature (697)..(698): n is a, c, g, or t
  misc_feature (702)..(730): n is a, c, g, or t
ctctactgtttctttctctgaccttgatgataagggtgatattgaatatgctgataactgtctagattcaaagagagagctacggccccaaagtgtagatcccaataaggactaggaattccgtggtgtgctgagggtatggactatggacataaaaactggacatcctatatcgtttatatgaattctgcctgttgttttgtttttgaggagcactattttacaattataatctgttttgcttttgctaggtggcgaatttggacaagtgcctatgcaaaaaaaattctaggaatgggcatgcagtaactgtttttactgttggtacgagtggcgagtggcatgtttgaccagagggtaattgggcctgaggatttgtcaaagccagcttagtggcaccacattgctgtccataatgaccacataggtgcttagagcaactccagtagttctctaataaactttctaaatcaacaatttaagtagctaacacaaaaatttatctccaacagttctctaaatgaactttctaaatttaacaacttctcatctaaccttatttcctctctacatttggcaaccatttagcaactccctaaacaaaaatgtttactgcattatgtagataatgaaggtaattgatgacatttttgactttatttttttannnnnnnnnatacaaaacataactacaacnnatannnnnnnnnnnnnnnnnnnnnnnnnnnnntttt

SEQ ID NO: 1633 - DNA, 244 bp, Zea mays
acgcgaggaaggtgaaggcatgttggtggtggcgacacaattcttgcgtggtgtcaagaaaggtggtgtgcaggtgaggatcggttgtgtcatggcctttgacctcgtagaacttggctgggtcatgctcatgtcctttgagctcacagagcttggagccaccggtcaacagtgacacgcgtgaaagcagcgttgtcgtgttcatcatagttcgcaatagagttcagatgatataatagttggt

SEQ ID NO: 1634 - DNA, 429 bp, Zea mays
  misc_feature (408)..(408): n is a, c, g, or t
tattgactgcagttctcaatgctgctatttttaatgagaatggtgatacggtctaaagtatctctccttgcagtaaaatacaggaaaatctgaaggacttaactgaagatgaaggcaaccaggggtagtcatatactcatattaatttgtgtcaagatacttgcatattgctgtcactgtttcactttttaatcatgtctaattgtctattattcctgtttaggtggctattccttactgaagatgacatcaaggggttgccctgctttcaggtttgcttacatgttaaagaaatcccaaattatggccttttccaaatttcatattatttctgactattcagagtaaatttcatcctatgtttgactattcaggctgtctttaataccaaaaataactaaggatagntgattctggtgtgaactctga

SEQ ID NO: 1635 - DNA, 334 bp, Zea mays
  misc_feature (303)..(306): n is a, c, g, or t
  misc_feature (320)..(326): n is a, c, g, or t
tggatctgattcttttaggaaaagagacagcaacagctttgcatgcaggtccaagggcgctgggatcttggaaggacatgtgtggagcgcacgtttagtcagattaaatgactgtttgtcctgttttagaatataatcttgctcatcatcaaccaaccaaaatagagcttttcaatcagcgagtcattgagactagttctattgtgtagaaacaagtgtctgaagagcaacacactgtctctttctttgtaaggtgtaagtttttacatgtgagatttttccaggttatatgcatgcatgccnnnnactacctactcgcnnnnnnngtgtgcgt

SEQ ID NO: 1636 - DNA, 516 bp, Zea mays
gcaccgacaacgacgcggacgccgcggcgtccgaggaccccgcggtcgagctccgcgaggcggaggttctgccctcggccgatgccatctctagcttccctgccgccaagcgccgcgtggtcaaccggccgcatgcgtccatcctcgcgctgctcgaggccgaacgatctgcttgttccggcgatgtccctaccgtggcactgccggcgctagagaacatctcgcacgggcagctgcaggtgctgtctggggtgcttccggaccacccatcccttgcgacagaccccgacaagccgtccttgtatgtgtgcacgccgcctcccctcatggagggtcacggggtgcccaagcagttccagggtcgcttccatgtggtgcccaagcactcaggtttgcttttcgtctaaacaaggatagctgagctgtgctggaaaatgtgctaatttaagtaacctatgtattttggtttgtaatttgtagattggttctccccagggacagttcataggctggaaa

SEQ ID NO: 1637 - DNA, 227 bp, Zea mays
ttgtcgagttttgaggataaaagtagagaggatgatcattgggttggtggggaacccagccaggtgaattcctcacatgggaggaggctgggtctggaaggaaaaataagcaaagccacaatggaaaatgaaagatcctggagagattttgaggagcgaagagaaatgccacaagcaaggctctttgatgctacgatatatgcatcaagggaggaagatcatctaaa

SEQ ID NO: 1638 - DNA, 395 bp, Zea mays
ccgccgaggtcaaggagttcctgcgcaagctcgtcggcgccaacgacgacagctgatgatccggcccgcgattcgtttccctttcccaccgtgaccagctccgagcctccgatccgcctgtgtcaagccgctaactcaacctcggctacctacctgctgcaccggcagagggcttccttgttgttgcaactgcatctccatcgagcagcttgctttgggacaagaacagacctagctagtagtacagtagagcccttttgtatcttcgtttcttttttttggtttccatctctcttgttcatcatgcatgcctgctgttgtttaccatttgcctcggctgaaaaggcttgtattttcggcgcccttcccgcgaggcactgtaactagttgctttg

SEQ ID NO: 1639 - DNA, 362 bp, Zea mays
tctgagatcgatctcgattcaaaaatcacattaaagaagctcggccgggatgaattgaacaagaagcccttttctttttcgtaataagatatatacatatgaatcaaataatagcttcaactctttggtttatttttgttgcttttttttctttttttttgtttggatgggaaaaaacgtagactatattgtagcaattaatatctggaggatatgcttctagatggatggatatatgaacgaaagggccggccgccgggaaagctcagctaactttgagttacctctacttttccctatctctgtactgtagagtgtattttggatttcctcgaggtatggtgctgcccgctggaacttga

SEQ ID NO: 1640 - DNA, 455 bp, Zea mays
tcgacaacgcgagtacgcgaccacaaaccggcgggctgcgcctgcgccaatggaaatgccggcggcgacgcagggactgctggcgaccacggtggtggactggaagcttgacgagctatgcgcctgcctcgacgacgcgctgtcgtccaggaagcggagcctctacacggaggagcggctccgcgcggagatcgacgcgaagaccgacttcctccggtcgctcctgtcctccgtggcggagtgcaacggcggggcgctcccggagcacctggccgaggccgaggcacgctttgctatcctcgcggccacgtccgatcgttgggcgcggcgcgcagtcgctgcacctgaaccattgccaggagacggcggaggaggacgccaagcgcgacgctgtggaagcccgcgccaacaaggagggggcgttggatggcatcgccgaggagtcgaggacaacg

SEQ ID NO: 1641 - DNA, 394 bp, Zea mays
agcccgtgttgggttggggccagaaggggcttctgtagttctgttcttgtgcttgtggttaccaccgaccgagctcatcttctgatcgtttcccagttccccaaaccgaacaggatgaattggtacattgcagctggcactactacactcgagtaaggggaggagatggctggacagagcaaaaggggcacgcagtcgcagctggacaacggcgagcaggtccacaacggcaagaaggcgagggcgcaggccatgcccgacggcgtggtcaagcgggagcagcaagagacaggcgaggcagcggatgagggacaagagcaggaggaaggggaggttagccaaggcggcggcgcgggggccatggaggaggcgcagatcagtttgaggttcgggc

SEQ ID NO: 1642 - DNA, 268 bp, Zea mays
acttattagctcctattcaccatcttagcatgaattgccttgcaggtagctcgtggtgctagggagggatcaaatgactcgggtgggaagtgggacaaggagtgaagcgtcgaggaaaatttagataaaaattaaaatttcattagatttaaccatacctactatgtaaaagtttgtttattttgatgtatatatatatatatctaaacctagtataagaggttacaaaattaaggtggggccatagcctaccttgcccacccgttga

SEQ ID NO: 1643 - DNA, 1328 bp, Zea mays
  misc_feature (385)..(387): n is a, c, g, or t
  misc_feature (389)..(400): n is a, c, g, or t
  misc_feature (402)..(403): n is a, c, g, or t
  misc_feature (405)..(406): n is a, c, g, or t
  misc_feature (417)..(417): n is a, c, g, or t
  misc_feature (445)..(456): n is a, c, g, or t
  misc_feature (463)..(466): n is a, c, g, or t
  misc_feature (471)..(476): n is a, c, g, or t
  misc_feature (504)..(505): n is a, c, g, or t
  misc_feature (508)..(516): n is a, c, g, or t
  misc_feature (520)..(523): n is a, c, g, or t
  misc_feature (526)..(527): n is a, c, g, or t
  misc_feature (530)..(533): n is a, c, g, or t
  misc_feature (536)..(537): n is a, c, g, or t
  misc_feature (539)..(540): n is a, c, g, or t
  misc_feature (547)..(558): n is a, c, g, or t
  misc_feature (563)..(591): n is a, c, g, or t
  misc_feature (594)..(594): n is a, c, g, or t
  misc_feature (596)..(611): n is a, c, g, or t
  misc_feature (615)..(616): n is a, c, g, or t
  misc_feature (625)..(626): n is a, c, g, or t
  misc_feature (629)..(637): n is a, c, g, or t
  misc_feature (643)..(664): n is a, c, g, or t
  misc_feature (667)..(679): n is a, c, g, or t
  misc_feature (682)..(684): n is a, c, g, or t
  misc_feature (688)..(688): n is a, c, g, or t
  misc_feature (691)..(700): n is a, c, g, or t
  misc_feature (702)..(704): n is a, c, g, or t
  misc_feature (707)..(707): n is a, c, g, or t
  misc_feature (709)..(715): n is a, c, g, or t
  misc_feature (718)..(721): n is a, c, g, or t
  misc_feature (723)..(733): n is a, c, g, or t
  misc_feature (735)..(735): n is a, c, g, or t
  misc_feature (737)..(739): n is a, c, g, or t
  misc_feature (745)..(754): n is a, c, g, or t
  misc_feature (756)..(760): n is a, c, g, or t
  misc_feature (763)..(793): n is a, c, g, or t
  misc_feature (795)..(795): n is a, c, g, or t
  misc_feature (797)..(799): n is a, c, g, or t
  misc_feature (803)..(814): n is a, c, g, or t
  misc_feature (816)..(819): n is a, c, g, or t
  misc_feature (825)..(854): n is a, c, g, or t
  misc_feature (856)..(861): n is a, c, g, or t
  misc_feature (863)..(870): n is a, c, g, or t
  misc_feature (872)..(873): n is a, c, g, or t
  misc_feature (875)..(875): n is a, c, g, or t
  misc_feature (880)..(881): n is a, c, g, or t
  misc_feature (883)..(886): n is a, c, g, or t
  misc_feature (891)..(894): n is a, c, g, or t
  misc_feature (898)..(904): n is a, c, g, or t
  misc_feature (906)..(914): n is a, c, g, or t
  misc_feature (917)..(920): n is a, c, g, or t
  misc_feature (922)..(924): n is a, c, g, or t
  misc_feature (926)..(932): n is a, c, g, or t
  misc_feature (935)..(939): n is a, c, g, or t
  misc_feature (942)..(965): n is a, c, g, or t
  misc_feature (967)..(977): n is a, c, g, or t
  misc_feature (982)..(987): n is a, c, g, or t
  misc_feature (989)..(991): n is a, c, g, or t
  misc_feature (993)..(993): n is a, c, g, or t
  misc_feature (995)..(996): n is a, c, g, or t
  misc_feature (998)..(1002): n is a, c, g, or t
  misc_feature (1005)..(1014): n is a, c, g, or t
  misc_feature (1016)..(1021): n is a, c, g, or t
  misc_feature (1024)..(1040): n is a, c, g, or t
  misc_feature (1043)..(1043): n is a, c, g, or t
  misc_feature (1046)..(1052): n is a, c, g, or t
  misc_feature (1062)..(1074): n is a, c, g, or t
  misc_feature (1076)..(1076): n is a, c, g, or t
  misc_feature (1078)..(1085): n is a, c, g, or t
  misc_feature (1092)..(1094): n is a, c, g, or t
  misc_feature (1096)..(1099): n is a, c, g, or t
  misc_feature (1105)..(1125): n is a, c, g, or t
  misc_feature (1127)..(1130): n is a, c, g, or t
  misc_feature (1134)..(1136): n is a, c, g, or t
  misc_feature (1142)..(1146): n is a, c, g, or t
  misc_feature (1151)..(1151): n is a, c, g, or t
  misc_feature (1153)..(1157): n is a, c, g, or t
  misc_feature (1159)..(1159): n is a, c, g, or t
  misc_feature (1161)..(1165): n is a, c, g, or t
  misc_feature (1167)..(1175): n is a, c, g, or t
  misc_feature (1180)..(1196): n is a, c, g, or t
  misc_feature (1198)..(1199): n is a, c, g, or t
  misc_feature (1201)..(1207): n is a, c, g, or t
  misc_feature (1209)..(1221): n is a, c, g, or t
  misc_feature (1223)..(1225): n is a, c, g, or t
  misc_feature (1227)..(1231): n is a, c, g, or t
  misc_feature (1233)..(1233): n is a, c, g, or t
  misc_feature (1235)..(1247): n is a, c, g, or t
  misc_feature (1253)..(1264): n is a, c, g, or t
  misc_feature (1268)..(1273): n is a, c, g, or t
  misc_feature (1280)..(1280): n is a, c, g, or t
  misc_feature (1288)..(1306): n is a, c, g, or t
  misc_feature (1308)..(1320): n is a, c, g, or t
atggcgagcttgctttcagcgtgcgcgcagctcgggtcgctagagcaggggaagaaagttcatgacttcattaaccaggagcatatccggaagaaccactttgtgatgaacggtttgatagacatgtatgccaagtgtggtgacctcgcgcacgcccgatacatctttgatagcatgagatggaagaacaacgaatgctggaacaccatgatctcctcacttgcaagccatggtcagagcgatgaagcactccacctgttcttccagatggagcgctctgggcggaagcccaacacgatcactgttcttgccgtgcttggagcttgcacgcacggaggcttcgttgatgaaggattacaaatcttcaacaagctcgatgcacaannngnnnnnnnnnnnngnngnnttcttttaggngatcttctaagaggacgtctatgtgggnnnnnnnnnnnnatctgannnngagannnnnnaatgtctgagcaaatcatggtgacctcnngannnnnnnnnccgnnnnatnngtnnnntcnncnnccaaccnnnnnnnnnnnnctacnnnnnnnnnnnnnnnnnnnnnnnnnnnnnatntnnnnnnnnnnnnnnnncccnnccctcatcnncannnnnnnnncccctnnnnnnnnnnnnnnnnnnnnnncannnnnnnnnnnnnccnnnccanctnnnnnnnnnncnnnaancnnnnnnnccnnnntnnnnnnnnnnncnannncacaannnnnnnnnngnnnnncannnnnnnnnnnnnnnnnnnnnnnnnnnnnnngntnnntcannnnnnnnnnnntnnnntcaacnnnnnnnnnnnnnnnnnnnnnnnnnnnnnntnnnnnncnnnnnnnntnntnacacnnannnncaccnnnncctnnnnnnncnnnnnnnnnacnnnncnnncnnnnnnnccnnnnncgnnnnnnnnnnnnnnnnnnnnnnnncnnnnnnnnnnnctccnnnnnncnnntntnncnnnnncannnnnnnnnncnnnnnntcnnnnnnnnnnnnnnnnntcnaannnnnnngccaaccacnnnnnnnnnnnnncntnnnnnnnnccctctnnntnnnncctcannnnnnnnnnnnnnnnnnnnncnnnnttcnnnttctcnnnnnttctntnnnnntncnnnnntnnnnnnnnnttaannnnnnnnnnnnnnnnncnncnnnnnnncnnnnnnnnnnnnnannntnnnnncncnnnnnnnnnnnnnacgctnnnnnnnnnnnncagnnnnnnactatcnccacctcnnnnnnnnnnnnnnnnnnncnnnnnnnnnnnnntccaccta

SEQ ID NO: 1644 - DNA, 706 bp, Zea mays
  misc_feature (569)..(570): n is a, c, g, or t
  misc_feature (576)..(576): n is a, c, g, or t
  misc_feature (586)..(589): n is a, c, g, or t
  misc_feature (647)..(648): n is a, c, g, or t
  misc_feature (652)..(658): n is a, c, g, or t
  misc_feature (679)..(686): n is a, c, g, or t
  misc_feature (691)..(701): n is a, c, g, or t
tatcctttgcttggatgtatattttatcagttatatattgggcccccacctgaaatataggtccagtaggacattgatattgtctacaacatggcagtttgacgattaatagatatataaaaacatgctatttgaaatagaaagaattattcactccgttccgaattataagatgttttggtttttttcctagatatgttgtttttaatataaagggcgtacccagtgccgtaggcttcatgcactgtgcggagtctgtggaagggtatctttaagcgccaagccttacccgcataatatgcagaggctggggctcgaacccgggatcttcgggttacagacggtagactctaccgctacaccagtcccgcccttccatatgttgtttttaatatgcacttagaaattagacgtcggtgttcttccttaaacgctgcctttaagatacgttgttgtcaagattcatgactcttgggaccacttctgtgattatttcatgaaacaggtgatgatggattatccattcttcggtatatttaactgccgattacttttcagcatgatcacgnncttttngccccattannnnggagataaaaggctgttggcgttcaccaaaagaggcacacacatccattcagtaagtnnccgnnnnnnncttcaagtaggactgtagtannnnnnnnccgtnnnnnnnnnnnaaaac

SEQ ID NO: 1645 - DNA, 300 bp, Zea mays
ctccaggttgacttgcgaatccgaggcttggatttagcggtaatttaggttgcttcactagcggttggcctgttgccttgagggttgtcgtgatttagcttagttgttattaggcctataacggcttttgaaagcagggacaacatcaaaggttcggacctttgggtcttgttcttcccattcaggtcacaccttgtgttaagtactgagtacttccctagagcaaatttagaaaaaaatgggagcttcatctcgtgtgatgcaaatttaaaattcctatgacccaacttgtcaaatttc

SEQ ID NO: 1646 - DNA, 283 bp, Zea mays
gcctcccctcctgcacctcgccattcttcccctcccacacctcgagaagcactacaggtttcacctgcccgttctcctgccccaggaaccgctagatctggggggtactacaacggtttggcggtggtggaggagggcgacgaccacagtatgagttgtgatgattctaattgttcctttgctggatccaaattatacactataagtatgtattgtgatgattctatgttgtcttaaagaataaacatcatatgagttgtccccaaatggtaaccaaactcag

SEQ ID NO: 1647 - DNA, 358 bp, Zea mays
tgtgagttggttgtggtgtgcttggttcttcaattgaagtgagcacccaaaccgcttgccgcacaaggttgatccgatccgaggcctaggaggaagatgaatgtgccccgaagaatacaaagtgggcatcaagccaagtcaataggtttaatatgaataatatgtgttattatactacacagaggatgtggtcaccgagtatgaagtccatagtgcctaactcgtgcaaaatgctggcaacttcaacctcttgttgagacacatatgtaaaatgctagcagcttcattctcttcttcagactagcggcagttcctcttgattcatctttggcgtggtatcgagctatcaatgttcatc

SEQ ID NO: 1648 - DNA, 413 bp, Zea mays
tgatagtgggcaactgtgagcacaatgtaggacatgggcatattcctgctacatggaacatacaagaagagatacctgttgcagtgaacatagaagaagagatgcttgatgcaatggataataatttggaggaagcagatggaggatttgcatgggcagaaatacctgaatatggggaaacaactgcagggccaccaatggctaaagaggaagaaaaggagcactttatcactgttgggtgcgatcctaatggagatgagccagctggaataaatgaagaatggaggtactttaaaagtgttgatcatgtagctattgatccactgcaaaatcttaaagttgagggacagaaaagaaagagggcaagacctgttttagaaataagagactttgatactgaagctgttcctgag

SEQ ID NO: 1649 - DNA, 368 bp, Zea mays
  misc_feature (14)..(14): n is a, c, g, or t
  misc_feature (19)..(19): n is a, c, g, or t
  misc_feature (26)..(26): n is a, c, g, or t
tgaaggagcaccancaccnccggcancagatgttgcttcaggaccaccacctgtaacggcagcagcaccaacaccgcggccaactactgtggcgccaccaaccccaccggcaacagatgctgctgcaggaccaccacctgtagcagcagcaccaccaccaccggcaacagatgttgcttcaggaccaccacctgtagcagcagcaccaccaccgcggccaactactgtggcggcaccaccaccaccggcaacagatgttgcttcaggaccaccacaaccggcagcagcagcaccaccacggccaactgccgcggtagcatcagcaccaccatcagggaagctgagcagcaaatccaaggtggcctcca

SEQ ID NO: 1650 - DNA, 362 bp, Zea mays
  misc_feature (335)..(335): n is a, c, g, or t
  misc_feature (337)..(337): n is a, c, g, or t
cgccgacgtgacatttcaggtcggcggcgagaagttcatggcgcaccggtgcgtgtttgccgcccgctccgctgtcttcagggccgagctctttggctccatgaaggagggggcggcagacaccgtggtgcacatccatgacatggacgccaaggtattcaggctgttgctcggtttcatgtacaccgatcatgtgccggacattgaagaggaggaggaagaagaagaagagtatatgtggcaggacctgcttgtggctgcagatagatatgacatcccgaggcttcgactgatctgtgagtacatgatgtgctcatacatcgacacggatacgntngcagatatgcttgagcttgctgaca

SEQ ID NO: 1651 - DNA, 380 bp, Zea mays
ttgcgctctgattgccccccaaaactgcgtgcgtgtctcgcagcgtgctggaattgctcatctgttcgtctggcgaagcaattggctagccgattacatctccggctcaccttgatctcactgcagtctgctgaaatcgcccatctctgcgggccattgccgctcgcttcaatcgtgggttgctgagggcgccttgggggcctggggcctgaccgcctgaatttgcgtggggcagtcttgggaaagcgcaagggaacctttcctcgtgaccatgaatctactggaggagttgatccgggcgatagagctctggctccggattgttaaggagcaggtgcccttgatcgaccccacccttgacccagtgttacttgttccta

SEQ ID NO: 1652 - DNA, 441 bp, Zea mays
tccccgtcgtcctcctcctcgccgacggccgcgtcctccccgccgtcctcatcgtggatccacatccggtcgctcctcgtcgccgccgcgtcctcgtcctcatcctcgtcgtcctcctccgcgccggctgcgtcggggagcgcggtggctgtggtgtcggctgcggccgccgccccgtcttcttcctcgccggcgtcgtcctcgccgcactcggatcggtgggtttctcccttcggatgggcgaaaggaggctccattagggcttgaaatgcctctcatattcggttcttgttacatgagcttcatttggctgctgctgatctggttccgatccgtggaccctgaccgagcttgctgtgttgtaatctgtggtctggatgcagcctaggtactcaattactcaaattagggtgttctatgtgctcttggtgtagcaatgat

SEQ ID NO: 1653 - DNA, 597 bp, Zea mays
  misc_feature (590)..(590): n is a, c, g, or t
tccctgctccaagagagatgggtctcgccggcggcattgtccggagggtcttctccaagagcccttgctcgtccgccggcagccgtggccacagtgtacgtgctttctcttacatcgcatgttcttcacttgttggcgttttcactgtgtccgcggcggggcacgtcgttcgttctagtacagtatgtagtggtagtactgtagttgagtgcaacaacaacaacaacaaaaagagagtgaaggtcacttgtttgctgtgtcactggacagactgacgcttgcatgagcacggccgattcgcaggagaaggggtctgctgaacacaggaggagatggggctcgctacggctgtacctctgcggcgaggagatgaacgcggccgcagaggaggaggaggacggggacggcgacacggtgtccgtcaagagcttcgagacctgctgcgtgatgccggaggaggcgcacgtcgtcgtcccggtgcatcatcgtctgatgagcgccgcacacgatggcaacgaccagagcagggtccctggtggtgccgatgaagagggagcggcgacgctcatccagtccgcgttcagagggtncatgtcg

SEQ ID NO: 1654 - DNA, 347 bp, Zea mays
tagctcagggtgcgaatcacagtgcagctctcctctggcatgaaggctgtgagagaggcatgacaatttctggccttgccctgccaaaggagagctgtcctgccattcattagccctgcaatcagcatgcacattggtgttttcagtggatcattgttgagtgtactgagcaaaggtatatgcgtccatggatgtgttttgatatatagaaatatttgtgtggatctttctcgttagtgaacaatgcttgttcttattgtttatagttcttgaacaatggctcgtgtaccatcgccagctgcaccaagcaaaggtggcggcatgaaacacaatcctcgtctcatcat

SEQ ID NO: 1655 - DNA, 450 bp, Zea mays
agagcggtcgcatcgtgacgaccgcctcgaccgcggagcggcccctgcgagacgggctggagtgcggccgcgcctgcaacgcaaaggcggcggcagccgtcggcgaggtgctcgccatgcgcctcaaggtggaaggcctcgcgcgggagcccatatacgccaacgcggagaaagaggtcgcgaagaaagggttcaagaaccagaccaaggtctgggccatcctcaatgcgctgcgcagtcacggggtcaacctccacatcgacgacgatggcgaccacaggccgcacgtctgaagcaaccataagttcaggagtttgctcctccaactaacaaaagtatgagctttgagcatgttgattgttgcgtgctgttttatgttgcttcagtaaccttgcccttgactctcatttaattgaacactatgactttctgtgtgtagcaatatcactg

SEQ ID NO: 1656 - DNA, 371 bp, Zea mays
tgatgtttgagtacttagataagttccatatgcctaatactatgtttctagcacttttggttgatctctaactcaattctatatgaaaagtgattcgaggacttagtttgagtcagaatgcaaatcctggtgaaactatggtaaaatggtgagttctctacacttagtcaattggattatgtactaactatgtttgtttaagtgttgaaaagcctcacaagaaagtccaagtcgaactgacttagtttgcaaagacaaggacttaacttctctggtttgggcaacaccgaaccggtccggtggcgcacctagccgagtatgtgatgcgcccagactcatgcgttttggcatcctagtgcactgaccgagtt

SEQ ID NO: 1657 - DNA, 257 bp, Zea mays
cgccaggtagctgcttcctttctcgctacgtgctctagcgtcccggccgctgattgggcgccgcagacggccggttcctgtggctgcctggctgggatttccagcgacccttctccgcttttctgttgtcctcacggtccgagctcgcatagctgatgcatgaccatcatcattttggcagaaagctggtagaaaaactcttgatgaactaatgaaacgaagctttgccgcttgcgtgcggacctgtattttattta

SEQ ID NO: 1658 - DNA, 1008 bp, Zea mays
atgcacatgctctcagtcctacattgcaaaggctattatattggtaagaaaataaccattgtttacttatctgcatagttgaatgatacgtgaatgtgtaatattgccaatatagtcagtttatcatctctgttacctcatatagttgccccaggttgtttcatttgtgttcacttacatttcttgattatgaaacaacctttattttatgtgcatagttgaataatctatgaatgtgtaatgctgcaaatgaacacccataaccatttaaagaggtggttattacgtgtgcttgcctccattaatcagagatcatgtctcctaaataatttatattgtagtgttaatagttgactaacagttcatccaccaaactataatattttaggttgtagctacgttacctacaagtatcctaatcctccttatttgagcattgtgcagctcctcatgctctttctctaaaaagtccatttacatattcatcaagtactgaatagacagaacaataataacagataatgtatagcttgttgtttttctatttatgttttcgactctaacatctctatttatgtaatcgactctaacatctctctagcatttaaatatatgtatagcttgctaaagcatttagatatgcagtaatcgactctaacatctctgtttctgtttctgtataccaaagcacaatttaacatggaagaaatggtagcagcaccatttcaggatggacaacaaccaaaatctcctacagaagttgtttctaatgtgctactgggctccagtgtgttcctacacaatgttggtcttcagtctgccttcaagaaaagctccacaacaactgtttcggcaatggctcaacaacttcaggatgaactagagatcgagaagcaagaaaaagatggccttcaggaagaagtggaaaccttgaaggctcaagcacaagcatctcagaagaccattgatagtatgaagaggtcgatggaagaaaataacaacctcctt

SEQ ID NO: 1659 - DNA, 349 bp, Zea mays
  misc_feature (260)..(260): n is a, c, g, or t
  misc_feature (268)..(274): n is a, c, g, or t
ctacactttgccagaagaaccgagccagacacaataacatcaaactgagtctgagatactgcactttacaaattctttcgatattggcagattgaagaccaacaagatttgaagagcagcaagatcagcttgcacctgcagtttgaagaaatcctttcaaagaagactgcttgcggcaatcttgccttcactccacaagcatgtgctgtgttatgcgtaccatgtaatgattgtagtacttgacaactgataccaaagangtggatgnnnnnnnatggctctatcggtgaccatatggggcaaggacgcggcgttctcgttcggcgacatcctgtcggcgacataacac

SEQ ID NO: 1660 - DNA, 381 bp, Zea mays
aggccccgtctgcccggagaggcccgccgccgccgctccggtgacccctgtagctagcttctcctttctcgccttctaattaagtcgccgttcttcttctcggagcaagcaaattaagccatcgtctatggagctcgccgtcgtcagcagcgggctaggagagccagccgcagccgggctggcgaagaaggatcggagcaaatacgtgtccccggcgatacgtgcggattgttagtatttggcatgcgggaaagccaggcatcttttcttttttcttcttttctcgatgattattgtgactcgttttcgctacccttggtgattgttgttgatttagcctttttccttttcttctctctctctccttctttcttcggtttg

SEQ ID NO: 1661 - DNA, 338 bp, Zea mays
tagatgtggagcaacgcttgggtataagaggaatcaggaaagaaaccaggatattaaagccttggttgatctcttgatctgacttagcatggaacatactgataaactttagctccaactatacaacacaagggtgattagttgtgcagtctatacctgttcctgctactggtgccgagttaaccaagacatgtggatcagagatttaaaatttgtactagtctgtgcataactactaaacatgtttgtttctggtgccgagttaaccaagacatgtggatcagagatttagaatttgtactagtgtgtgcataactactgaacatgtttgttagtgg

SEQ ID NO: 1662 - DNA, 443 bp, Zea mays
gcggcggctgttctgctcgttcagcgattttctgaaggcagcggaagccggtccagcgcgtcatggcgcgctactgtcgttcgccgtggcccggaacaggctccaggacgccgtggcggggaaccaccgggaccgggcgctggaagcccttgcggagctcaaggcgttcgccggcagcgagcactactacggcgacggctacagagcgacggagcttctcttggcggcactgtcgcctttggctcggctgtgcaagggccaaggactagtagtcgacgacgacggcgccgtggtgactaaggaatcactggcggtggcatgcctgctgctgcggaacgcttctgcggagatcggcgccacactgtgcgaggaaatctcgcaggaggaggacgtcaaatccagcttggagaggatccgagaccgaagtggttgtgattgtgacg

SEQ ID NO: 1663 - DNA, 400 bp, Zea mays
ttttatctgtctcaatgaacttagattacaatataagttggtttggttcctctttctagagacaaaatcggatattctttccattattaaaaaaatcaagaagataattaaattgaaaacatagatgagggcataatcacataacccctcactctttggtcagcataatcaagaagatgaacatcaaacaatcgattaacgctccagagcgacacaacaaattaacgtccagaggcagagagacccgtgattccgagtatcaaggattcaagggagcccaaggtggactggagccataggcgtttacatcgagtaagtagtgaccatgatggttactatgtatgacccttacgaattgaagtactaaaaaagttgcaggatttagcagcagtttagctca

SEQ ID NO: 1664 - DNA, 765 bp, Zea mays
gtgtcttgggcttttgcctttcctggagctgttgcgaactggacaatgcagtttgctgcaaggataaccggtactgctgccctcatgactatcctgtttgtgatacaggtcgcgggcagtgtctcaaggtttgtttgcttgacatttgtgtaatctatttgaactttagccatgtttgtgaggccactggcccactgacctgcatcgaagttttctagtgtttgttctaaacttttctaagctagttttgttctttatttattatgttacctttcatatttcagttatgaactttatcgtatatggtcgtttaaagcatttcagtagctgacatcttgactgaatactttgatttatggtatcaggccagcggcaacttctctgctatagaaggaatcaggaggaaacagtctttctctaaagctccctcgtggactggctggctggagttgatggaccaatgagcgtataatcagacatggatagtaggtaagattacctaaaacttgcttttgctagcaccgttatactttctgacgcccattccttattgcaacacacccatgctgaccgttctgtgtctacaacaactaacagcttcatgcaagttgtgcgatccgtaggtcggtcattggccttgttccagtgccctgccacattcctgtacgcctactgcccgctgcgttgcaccgagatgcccttattttctctttattattgaaccctatggtgtaaagtttcacgattgtacatgtatgtcacact

SEQ ID NO: 1665 - DNA, 620 bp, Zea mays
gatcatgcctagtacatttttcttcttagatgaaggcaagtgaatgtagcggtggttgcttccgttctgacctgttatttctgtcgcctacactctaatattcagaattattggattctttcataactggactctatggtgatgctttacttgcttgtattggattctttcataattggactctatggtgatgctttacttgcttgcattatactgatgctcaatcatatattgatgatggttatgattcgagtatgactcatgagattaattcacacccctgaaggtaaatgaagtattgtttgaggtttgtattgtatctgaaggtaaatgaagtattatttgaggtttgtattgtatgtgaaggaagtgaagtatattgataaatggagcatgccatatacattgcatgatttacttgcatctgaagttgggtcgtgatctatggcccgaccgtaccggtacaacttagcatcgtacgttgcccgaggaggggtacgatgcagcttcatacccttagaggtatgaaggcagatgacatatgcattgcattcattgaagtgatatttgcagatgatgtggttttatacccttagaggtatgaagacagaggacctaca

SEQ ID NO: 1666 - DNA, 438 bp, Zea mays
ctccgcactccgcagcaaacaaatcgaaagggagacagatttggatttgattgctcacggaccacggccacggccacggcaaagtaaatgcccccaagaacaaacggagctcctagatcgaatcaaccggcagaaggaagctaggttcactcaccaccaaggcaccagcaggagaagaaacggatccgaggccgggcggatctctccggctgtgtcagctgttcagcaccaggacggcggccgagagcaggagcacgctccgtggggcaagaatgcggaggcgggagtagcaggcactgccttgatgcgtcttgtcgacggcgatgaagtcgccgatgatgcggcgtcagaaaaggtggcgcggttcgtggggagaggagagagaaggtggggagaggagagagaactcagagaatgagagaagtgtggacagagaaa

SEQ ID NO: 1667 - DNA, 431 bp, Zea mays
ttttgcttgtcgttcatgtatatgcatgaccctttcacacatatgatcagaagataagcacatgcaagacgatctcgcgtggatatgatgcatggatcagacctaacctctatatcatcaccaaacgctcgtagatgatgctatacaattccatgattaaattatatataagtaaaaaaaaaagaaccgtacgtgcatacataaaattaagaattaatggctgccaatggacgacatatgcatggacaggtaagctggtgatcccactgaaccgggaggcgcccaacttccggtccatgatcgggatgatcgacgggaggacggagctgaagccgctgccagccagcggcggcccagaggaccggcggctgcaggtggtgggcgtctccgccgccgccggatccggcggcgatgactactacttggacgtg

SEQ ID NO: 1668 - DNA, 405 bp, Zea mays
tttgactccatgtcggcggcgctcgcggtgacggacgaggtggccctgccgatccgggcggtgggggatctggcggccgccgccgaggtctcgcgggaggaggtcgccgtcatcacccagtgcgcggcgctcggtgagcttagctggttccgccctcgtcttgccctctctccattttttcttctatttctttccctcgaggcgaccatggcaagttgccaagttcgtgcttgtggatgcaggaacccgtcgatgcgtgctgttctttttgctgccttgcttgcatgcttcaattagcgagccttctggcgtgattccgcggaatgggctagattcttttttttcttttgcaatcaaatttggagtagtggacgtttggttcttaagggttcccacttcaattag

SEQ ID NO: 1669 - DNA, 546 bp, Zea mays
cattctcactgatcaaacaccactttaggccatgtttggatggccatgtactggacgtggaatttggttaaatttcacatcaaatcactccaatacgtaaaaattgaggtcaatacataagcatgcaaacaattttccttccgataaaaaggccactcacatatcgccatggttctatcagctttgcttgacatggggcgcttccttattcttgagcaattcctagcgccgccttattcttgagcaattcctggtttcgtccaggtattgtgggcggtactaaagcacaacgattctgagcccaaatagttaaatgtctgcaaatagcttgtttgccgtgctgaataccggggctatgtcaacaggtacctggaaacgaacataaataagagtctaaaaactgctaacctatacgaaaatgaatatagcaacatagcagcacagctgaactcggtgcactatagtcagggcacgaataaacataacagaagcttcaggggcacctacctgcatgtgctctatcctctccaatgccattcttaatga

SEQ ID NO: 1670 - DNA, 237 bp, Zea mays
  misc_feature (229)..(234): n is a, c, g, or t
actcgaaccagcacacggccggccatcctgtacagagcaagtgagcaactacgcctaaattctaaaactctaccaaaatggatactagctccaaaccaaaaaaataaaaaacatctagaatggaggggaagtcatctcccatggagaccaatatctaatcgctccagcgaagcagcatgacgacgcagcggcggaaaatgtagaaccttgcccttttctccctgaaggnnnnnntga

SEQ ID NO: 1671 - DNA, 990 bp, Zea mays
  misc_feature (978)..(979): n is a, c, g, or t
  misc_feature (981)..(982): n is a, c, g, or t
tggaggtaagctataagcatgtcatctgttagcttctcttgtaacattctactatgttttatcatccaaatgcagccttgccgtgtgtttttgttcctactgtatttctagcagttaatttgacttgttatgattatatttctctctgcatagtgtacaattgcaaaagtaatgtcagcttgcattcctttttatcactattatgccttttttgttattatttcatgttatatctgcaaagcaaaatctgtgataaggacaacaaatattctagaggttgcctttgacttgttacatatctgttggatttaaacttacttttctgacaacgttgcatgttacaacacaaataagttttctgcgaccccagaaggtatattcagctctgaacagctttgcctgtaattttccagcttggagttgatattggttcatcaacggtggcacgaggtgtggtgagcctagtgcttggctacttgaacaatcttgtgatcgaaatggccttcttggtacaggtatccaatcgtgcatctagctaattcacaaaacccctgttcatatgaaatttcctcaagattgagcatacatctgtaaagatcacagaagatttaagacaatcgtgcatctagcttattcacaaaacgcatgttcacattaaaattgccttaaagttgagcatacgtccgcagagatcacagaagatttatatttctttctactatcacttagtacatgctttaaattcattatttgcctcatgcagggaaacacaaatgaagaactcccggaattcctcctaggtacctgccgactgaattacctggatgcctccaaggcagtgtccatagacgagtgctaggaccccaactgacctcattttttaaagccaagtacaccaaaagacaaaaaaaaaggctgaatccccattccttgctgccgacacaatcggcaaccctagcccagatgcccattttatgnntnnccgcaaaa

SEQ ID NO: 1672 - DNA, 321 bp, Zea mays
ttgattcgttttcagattgtcataaattaatctgtcaaagttatttagaggtgttaatctgataaggtaaacagacagagttactagattagaaataacttttgagtttgtgtaacaatgtccgagttagtctaatgcgtatccccatgattgctggcgtctgtggtgatgtaatactagcatgtgtgttaatgtatatagtgatgggtggtttaaggtgtggtgacaaccacaaacattagaatcaaatacaaaactttagaagtgacaactcgtgtaacacatcgggtaacctggcggtgtcaggataattgaactgtt

SEQ ID NO: 1673 - DNA, 421 bp, Zea mays
cttggatccatagcgagacagagagtagaatcctaccgtgaattgtagagtaaggggtgtgaatgagcccaaacaccttctctattttataggatggatttatgactttcctttttttggaatttcttaaaaaacttagaatataaacgattaaaatagtgttagccaatcagaagatgctacatcaacaacaaaagattagtaccgtctaggccaatcaataataacacgtactccaatgcaatggctgataccaaacaacatggtcccaacacgatcattactaaccacaccaatcggtcgacacacccattgaccgttcgaacacaacatttgttgatgcgactgatgcggttgataccgatcgcgcgcgagaccacatcatcagatagtattgatgagcactgaacccaaccttatt

SEQ ID NO: 1674 - DNA, 372 bp, Zea mays
gaccccttgaccaccccttgaccacacatctacaacttggtttgagcaggtctctcatgggcatcaagttttttgattttgtcggttgtggagaaaactccaatgtgaataatgatttgttggattttcactgatttgatggatggaatgggttgaaactctaagaggtgtagtcattgaactcggctagggtggaatccaaccctggccagactgacgaccatgcaccctgactaggctaaattaacccagctagactaacttctaaccttggtcaggccgcccttgcctgtgcagtttgagtgttggagtggttttaagttttgtgactccgatcttcaatcagtttcttccatgggtttccaatagtga

SEQ ID NO: 1675 - DNA, 397 bp, Zea mays
ggatagggtggtgtttgatggagccactccagacttcacccttctgctcagatctgctgaggaggaaagacacaaatggcaattggccggtgccaaagggctctccttcttggtggcgccaatgtcaaatgtttaggggaggtgctgagcgttgtcgctgattattagtgaacagatggatagtttcttgtacacttgtttctggcctttctaatgggaaggtttttttgtaatttttgggtcttcttcagacctcttcctctcttctaatatatttataaagcgtagctctcctacgcttttcgagaaaaaaaaatctaaacctaccgaggattttatgctctttattcactttttcttttgggtttcatctccattagaatcaaagctactgatg

SEQ ID NO: 1676 - DNA, 393 bp, Zea mays
cgcttattgatcttcacgtggaggacaatgcaaccgcgacgatacacaagtatattattcttcagtaccttggttttgcatgttgatgtcagttttgattaaaaaaaagtctatactcgcacaggataaccacatggtccaaacatcaaaaattactttttccaggttcaaagttcaacagatcatgtaacatttaggttttacatttttcctattgtatgttaaaaaataatgaaaatttgaattaaattcttactagccggttaatttactccgttaatccctcattaatgtatgtactgttttcatgctaattaaactttgggagaattttttttccaactgatgtggaaaaatgaccattcaggcatttgagaagggctacccatctgt

SEQ ID NO: 1677 - DNA, 622 bp, Zea mays
aagcatagcagcggcgacggcgtagcaagcaattcagctcagcacgtcaccggctcacccatcccctgccggtcgactccccctggtccccagcgcagcaagcagttcaccggagccggcgcagcaagtagccaagcaagtctccatcccctggtccgcggctccccgcgataccaccttcgtcctcgacggatctcaactataggtacaggctcctcttgccagttgccattgatgtcgagaagtctagtcgaggcacacattgcgaatgagaccagcactctagcgttcagaactagcgaccaaggactccacgttctttctagtttttgaaaacgtccagaactagctgcaggaggccgcaacgagagtacgggacctcgctcctatttccatatcctagtttttatgtactgagtatactagtattccatggcatacatgtatcgtgctctctcctatctagaaaaagaaagaataggacatttcaactcgtattatgtttaacaattataaattagttcatgttttcttagtgttcatgtgctgtgttcaggaggcttttgtagatttgtctgtgtttagcaattagttcctattgcaggttgattaacaaggtcat

SEQ ID NO: 1678 - DNA, 415 bp, Zea mays
agagagaggaggtactcacggtcgagcttgagcgactggaatgggacggaagacccgaggatggcgcggacctcctccagcttcttggcgttgcccgtcacgaaggtcaccgccttcggcagcactcgcgccgctgccgacatcgtgcggtggtgggatgtagcccgttagaaacttcttccgcaggatacggtgcgggaagctgcagatacggtgcgggaagctgaagatacggcgcggcggcgacgacagcggcgagagatgaagggaccgggccgccggggagagatgtcgtttgctggtttccgttctgagtggaccggagcgaacgtgggccggtccagcctgaggtcgacggctaagtccggcccgtgtctgtttaggacttaggccgtgcttgacagagatgaccaat

SEQ ID NO: 1679 - DNA, 415 bp, Zea mays
  misc_feature (132)..(132): n is a, c, g, or t
agagagaggaggtactcacggtcgagcttgagcgactggaatgggacggaagacccgaggatggcgcggacctcctccagcttcttggcgttgcccgtcacgaaggtcaccgccttcggcagcactcgcgcngctgccgacatcgtgcggtggtgggatgtagcccgttagaaacttcttccgcaggatacggtgcgggaagctgcagatacggtgcgggaagctgaagatacggcgcggcggcgacgacagcggcgagagatgaagggaccgggccgccggggagagatgtcgtttgctggtttccgttctgagtggaccggagcgaacgtgggccggtccagcctgaggtcgacggctaagtccggcccgtgtctgtttaggacttaggccgtgcttgacagagatgaccaat

SEQ ID NO: 1680 - DNA, 622 bp, Zea mays
  misc_feature (261)..(261): n is a, c, g, or t
  misc_feature (263)..(264): n is a, c, g, or t
  misc_feature (379)..(379): n is a, c, g, or t
  misc_feature (381)..(381): n is a, c, g, or t
  misc_feature (386)..(389): n is a, c, g, or t
  misc_feature (391)..(413): n is a, c, g, or t
  misc_feature (415)..(417): n is a, c, g, or t
  misc_feature (420)..(428): n is a, c, g, or t
  misc_feature (431)..(445): n is a, c, g, or t
  misc_feature (447)..(456): n is a, c, g, or t
  misc_feature (458)..(458): n is a, c, g, or t
  misc_feature (460)..(465): n is a, c, g, or t
  misc_feature (468)..(470): n is a, c, g, or t
  misc_feature (473)..(473): n is a, c, g, or t
  misc_feature (475)..(490): n is a, c, g, or t
  misc_feature (492)..(494): n is a, c, g, or t
  misc_feature (499)..(502): n is a, c, g, or t
  misc_feature (509)..(511): n is a, c, g, or t
  misc_feature (513)..(515): n is a, c, g, or t
  misc_feature (521)..(523): n is a, c, g, or t
  misc_feature (526)..(546): n is a, c, g, or t
  misc_feature (548)..(552): n is a, c, g, or t
  misc_feature (557)..(558): n is a, c, g, or t
  misc_feature (561)..(563): n is a, c, g, or t
  misc_feature (567)..(567): n is a, c, g, or t
  misc_feature (569)..(573): n is a, c, g, or t
  misc_feature (577)..(579): n is a, c, g, or t
  misc_feature (581)..(583): n is a, c, g, or t
  misc_feature (586)..(596): n is a, c, g, or t
  misc_feature (598)..(598): n is a, c, g, or t
  misc_feature (603)..(605): n is a, c, g, or t
  misc_feature (609)..(612): n is a, c, g, or t
  misc_feature (617)..(618): n is a, c, g, or t
cctgtctccttgaggataaggatcagtgggaagccggtggagctgctttagagccaacgtaacgtacagctgaactgctccagtgcagatctactgatcttcttgatcgaaagccgtacgtagtgcagtagtggctcgattcagcaagcgattttcctgatgcgtgcgttattgttctttcctgctgtgttgatgactaggggaatcttgtaataatcggcttggctgtatacggtgatcggtcctctcttgttctctagncnncgctagctaggggtggaaaacccccgccgcctggaggcacccggggggcctcctttattttttttccggggggggccaaagggaaggccggctttttttttttccaaaccaaaananataannnncnnnnnnnnnnnnnnnnnnnnnnncnnnccnnnnnnnnnggnnnnnnnnnnnnnnncnnnnnnnnnncncnnnnnnccnnnccngnnnnnnnnnnnnnnnncnnnctccnnnntctcccnnntnnncccccnnnccnnnnnnnnnnnnnnnnnnnnntnnnnntttcnnttnnncctntnnnnnctcnnncnnnccnnnnnnnnnnncnccttnnntccnnnnctccnnttct

SEQ ID NO: 1681 - DNA, 362 bp, Zea mays
acctcctcctctgcctcgccctaatcgccgaggaaggacgagggctccctgacgtaggaccagccccgtgctcgtccacggcagcctgcgggtgccacctctgccgctgtcgtgaaggagaacaccgcacccaagccacaccacctccaccgtcgttgggaaggagaacactgcgtccaagccgtccaagcccacctccgccgtgcggtggtccacgtcgtcgctatcgcagtcgcaggccagcaagatccaaagctcggtggactccaccttctgggctcccgtgctgctggggagtcgcgccagcggaggatggcgacaatggagacgggtgtgcctccagctctgccagaaccatatga

SEQ ID NO: 1682 - DNA, 502 bp, Zea mays
agaagagatggctagtaccgcaagccaaccgtttcaagaagggaagcagcacctgcacctgaaccatggtggccgtgctcttcattcagcgtacggtggtactgctgcgtggcctgccagctcggtgacgccgcctctgaccaggctggagacaccagcgtcgtcgagcaaaagcacggcggaggcgcggcaggccctcaagatccacagcgcggcagagaagcggcggcgggagaggatcaatgctcacctcgcgacgctgaggagaatgatccctgacgctagtcaggtctgcacatcttgccgtttcagagtttggttccataagttgcagccgagcatgcagtttttttttcttaatgcacagttgaaatcctttttttttacggacggaatcagtactgcaccgcaaatgattaacagcaatgtcactgtcgtctgctcgtgaacagatggacaaggccaccttgctagcccgggtggtttgccaactcaaggacct

SEQ ID NO: 1683 - DNA, 346 bp, Zea mays
gctcccgggggagcagcccggctttctgctgcgcattcaagaaaaaggacctctggccctttgccgcctgtgtcgctcgccctcgccctcgcctccaccccatcgctgatcggccgccgggaagaagatgcagcagctggcggagcggcagatgggagctgcccatggatcgcatcgatcggcggcaaccgagtcggaggatcatggtgtgaaggaaaaggaggagctcctcggcgtcggtctgggttgaagccggaattaggcagctagacaccaacgtttcatcatgtttttttttctttctctgtcccagacgacggacgggcctcatgaatcatgatgtctc

SEQ ID NO: 1684 - DNA, 366 bp, Zea mays
tatagcagtccacggcaatgagccaatgatcccttgcaggacaatgatctggaatgtcttcactttcatgacagatcttgttgccacccaagaatccctccagatagaaggcggaggaagaacatctttgcttgatagatgcaacctgggagacaaggataaagttcatattcagttatagcaccattccagatcccatgttggtgtaacttggctacaatacagaaacctactagaaggctctcaaataacattagagttcctaaatgtggttttgctacacaacgaatgcaaaatagttcagactgaaaagaaaaggtaatgaaacatacacaaaacatccgaccctggtttaattcctacaag

SEQ ID NO: 1685 - DNA, 374 bp, Zea mays
caggagctcgcgctctgcaaaccttcatggcctccgaggcggtcgtcgttcacaccggcggttgccactgccggcgcttgcggtggcaggtcgaggcccccgcgagcgtagtggcgtggatctgcaactgctccgactgttccatgcgcgcgaacacccacttcatcgtccccgccgccaagttcaagctgcaggccggcgctgacgagttcatcaccacctacaccttcggcacgcacacggccaagcacaccttttgcaagacctgcggcatcacctccttctacaccccgaggtccaacccggacggcgtggccatcaccgtggcctgcgtcgaccccggtaccctgaagcacgtcgagtaccggaagttc

SEQ ID NO: 1686 - DNA, 380 bp, Zea mays
ctgaaagtatgccaaatgtgttactaaaaaacactgccttcttatatagcctaacatcaatatgttgttgaccaacatgttcagtaaaataggggaagttgtcacatgtcaaccattcctgtgcccataattttgaagctaaaaattgtcattacctgcaacattgcactcccattttctgaatggaatgcctcttgaccatttacattatttctgatcaaagatgatatagcatacaatgcttttgcagcttcatctctagatatggaataacccgtcttcacttacctcgctaaagctccataaccaaggatctagacaagggtgaagccgtcagtattagaacagctaaaagccaccactgtgctttgtgtacatca

SEQ ID NO: 1687 - DNA, 443 bp, Zea mays
atacctacatgtttactaaaccaaaaaaaagaattgattgaacatatatgtacccgatttgaaattacatagagcttactttttataatgtacatgcgtgtgcgtgtaattgatgtactccacttgaaatgcatgggactcgatcggaagaccctgatggagtgcaagagagcccaggcgacatgatcgacggagcatgcgtgagcagcagccttaggaaaacgactggagaatttgtgaagtagcaggatggccgaggcattggtgccataaggacgctgtggaggatgcctgcctgaaaagccttcatgttgaggaagtcggagtggatacagatcgccgctcacatcagagggtccaaaccggttactgatccaaatactagtacctgagattttaaatatcgcattatccagatcataacagtaccagttgatgtctcg

SEQ ID NO: 1688 - DNA, 444 bp, Zea mays
gtagacctagtgcatatcatgtaagattgtaaggcatgtcaccacattataggaaaataacaacatatgtttttcggccttctgctaagctgtaaaactctctatttctataaagtagtccacgccttattcctctgcctcccttccccttcctcatgtggctgcaccttctacttcctgatcccttcctctcaatcagtcgctcgcagcggacatccagaagaaccaaagtccaacgacgtcagtaacaatcgctcatgtcctctgtcggtgtttggagcccgaccgcacacccggggttacccctcgcggtgcttttgggtagaatggtgcttttgattgtaactcaatggttcgtacaagatgcatgagagacgacaggcgattttctacaggttcgggccacttggagaggcgtaataccctacttcctggtaaggatct

SEQ ID NO: 1689 - DNA, 463 bp, Zea mays
atcgcagccgacaggcaaacgcctcgggaatcagctgtgccccgcgcctcgtgggccaccaggagctgttgctgcccccggtgtctccgccctcaacttccaaaccctaggggcggtagaggctccaaactcgggcgctttggccgtgaccgtccgaggtgggcgtcattgcgagttggtgacccacgggttgcgggtaacgagctgtgtgctttaacttaaatccatattccactcgtacagaatacaaatcacagaaagcagttgaaacctgtcgaaatttcatgtttctctttgaaatatgacctaacattttacctctttctaaatagtggttggattgggttgggttaatatttgaggtgtctgaactgatcgtatctacctttcttctgtgtagttgactagtgccttttcttttcttcctggactgaatggagcaaggggagaaccaatcagctga

SEQ ID NO: 1690 - DNA, 967 bp, Zea mays
  misc_feature (57)..(57): n is a, c, g, or t
taccacaatgggtaaataagcaattcgagcctaactcaaattctcaattggaaatcnttacattccatctgttgctgttgctccaattagtttatttgtactgtacagtttccatggcgagaaattgcaattatgcccgttcaatggcatgcattagctcttggcttgtttgcttcaataatagcaccatttggtggcttttttgcaagtggattcaagagggcattcaaatttaaggtgcttagtttgtttggaattatttgttgaaaatatgtatcaccttcaaaatctcactatgtttatacattcaggattttggggacagcatacctggtcatggtggatttacagataggatggactgccaagtatgtacttttaacttgatttgtttccagaaggttacacatttattggtggtgattttgaatgggttaaatcaatttctgaatgtacctgctagtttgtttctcgtatattctctgtaacatatttactgtgaattggtgattaaaaaagaatgtgtctttatgcatggtcataaataatttttttttaattggagaatcaggctttgctgccaattccagagcttaggacaagtatgtagttatgctcattctctctgcatgcagttcagacttcaactatgttttttttaaaaaaaatttgtgtgtatgctttgcaatgtgaaacctggtagattacagtagcgttttttttcttcttttttctgagaaactccaaaattatcttgcagatggtcatggctgtttttgcgtacatctattaccaatcatttgtaatggtacaggacttatctgttgagacaatcctggagcaggtaatctgggtttgccatacctgtgactaaatttagttcctttgctccataacgatatctagttgctaaacagcagcatacctttcaatgcagatactacgtaatctcacctttgaggagcag

SEQ ID NO: 1691 - DNA, 375 bp, Zea mays
cacccaccacagtctcacatctctctggtacatgtacatccacagttctgcaagcaaaccattcactcctccctctgcctgtattcttcgtttcgcccctgggatcggatcctcgtcacgactcacgccatccgcccccaccgccaccaccagccacaccatctctgttctccagtcacgccagacggccagaacccacaattttcatcacaccaaaccatccactcctcacctttcccccccaaacaagtccaatctttacaacgacattgtcgccaactacaacccctttcccttctgggtgcctcaccagattacccactcaaatccagctaccaagcacaaaagctgcggcatttgccatactgtttcatc

SEQ ID NO: 1692 - DNA, 625 bp, Zea mays
  misc_feature (235)..(237): n is a, c, g, or t
  misc_feature (250)..(264): n is a, c, g, or t
  misc_feature (267)..(269): n is a, c, g, or t
  misc_feature (272)..(275): n is a, c, g, or t
  misc_feature (280)..(280): n is a, c, g, or t
  misc_feature (283)..(284): n is a, c, g, or t
  misc_feature (293)..(297): n is a, c, g, or t
  misc_feature (313)..(320): n is a, c, g, or t
  misc_feature (328)..(336): n is a, c, g, or t
  misc_feature (345)..(347): n is a, c, g, or t
  misc_feature (350)..(353): n is a, c, g, or t
  misc_feature (365)..(365): n is a, c, g, or t
  misc_feature (368)..(369): n is a, c, g, or t
  misc_feature (372)..(381): n is a, c, g, or t
acttttttcaggtattggaaaatctgattgagaattccattccttaccttaagtacagctacaaaaagtacatagctgttcactaagtttcacatgacctcttgtccttatacttattattcccagatcaatagagtaatacaagaattctctcccatcttgtagcaagaaaaagcatgagaaagaatcaccagtgggtaggtcagtgcggttatcaacaagagtggagcaagannntttaaccccattnnnnnnnnnnnnnnntgnnnctnnnnacaancanngttcatttnnnnntataatacactcctcnnnnnnnntcccgctnnnnnnnnnactctctannntannnnatttatcactcntcnncannnnnnnnnntacgctacaagaacaccgactgctgcgggttgacgacgatgtggcgcagcgggttggggacctcgccgccgccggcgtgctccacgaactcggccggcgtgaggaagctgccgtggcagacgcacacgatccgcacctcctcccccttcctgtacttgtacaggaacccgtccgtcttgcgcccgccggggccctccgccttgtacgacaccatgggcatgtcctccgccatggcgctccggag

SEQ ID NO: 1693 - DNA, 319 bp, Zea mays
ttggctcatggcgattactggcaagatcatgatcgatgttggattggtggtaatgttctgaacagccgacctcagtaagtacctcttgggtaacacggtttcctttttctttagtgaaatacacatgcgaaggtttcttgagtggagctcacaagcaggtaggtattgtgggcactgcttgattgtcgtctcggctttgccttgtccggtttgctggaaggccctgagctgccgctgctagctgttcctatctcgttttgtcactgagcagttctccacggaagacggaacctctgaatgctgtgctggcatacatatt

SEQ ID NO: 1694 - DNA, 248 bp, Zea mays
ttgatacagggaggagtcgcgaggggacgtagatgccgacgctgacaaagctgtacagcatgaaggaggctgccctccacaacacgcccgacgactgctgggtcgtcgtcgacggcaaggtagcgccagccgccactgtatcccttcctcatccgcccttgctgtagataggtatgtaggtgcgctgtatgcagcggtaggtagagatgtaaacccgtggggagggaccgagggagggagggcatact

SEQ ID NO: 1695 - DNA, 273 bp, Zea mays
ggtgccggtgccggtgccggtgccggtgccggtgcgttcctgttgcgctggtcttgctctctgccgacggtagtgtcttggtacaacagcgcgcgggaggatgtgtagtaggcgaggtagctagtcgactagatgcgatggtgtgccgtgtgtgcatgtcggcgttggtccaactccaggcgcgctctccattgatcgcgcacactgtctctgtctcccgggccgggcagacgtgcttggtttggttctatgcgtgaacaacggcggcaattt

SEQ ID NO: 1696 - DNA, 985 bp, Zea mays
  misc_feature (7)..(7): n is a, c, g, or t
cgctggntctccgcggctgccgcgacgagtgctccgcctccgaccagctcaagcaggttgtcctctcaccccaaaatctgtttctccccctcgatttcgaaagaaccacgatggaaaaggaaggttgcccccctcgccccttgccatttgagagtcttggggtaaaggatgatctcgtctacgatgttgccaagacgaatgaagacatgcggaaactgtgaggtagagaaaattgagcagttcgtgtgatgtgtcgttttcggactaggtgttccggtgtgctccccttcgcttacctatgtctgtgttgttcacttcctggatagacttcgtcaatatttgttgttttgtcaaataaactgctagtggatcaatgtgtgggtttccttctgctacctggattaatgagtttaatatgcaagttttcgtagctccgtgttgggggaaacatcagaaacttttttgttttcttcggaaatgttgtttcacacccctctacattctctaactaggacaaattgcatcatgcacttgcagttgtgctcactgaagttaatgcagtttcatttcttttatttactgtgctgctgaaccaaccaaaaactcaaaacttactaaattaaactaaaagagtgtgatctgatctggttgacgtaattcatttctcgatgctgaattgatcacttgcagcatgtgctggctctgcaggctcacgatgtcttcaaggcgaaagaggtggtcctgcaaaagaagatctctcaagaggtggaacgggccaaggagttcacaaagtcgggaaacaagcaggcagcaatgcagtgcctgaagaggaagaggtactacgagagtcaaatgaaccaagttggaagcgttcagctgcgcattaacaccaaggagagaatgatcgctgatcacacgggcaacaaataacacaaagtgagaccgcatctctggaaccgtgtatcgaacacagcttgttctgtca

SEQ ID NO: 1697 - DNA, 336 bp, Zea mays
ccgcctcgagccaagctacaactgcgtgtcaggagctacaaccaagcatataagagaacatccatattccatagtaaacataatcgactgacatcgaagaaagaaaggtactccattgtagtcagcgacatcccgtccaagggcaatggggcctacactggaatcaccggcggtgtttgcaccagcagcgtgggtttcccatcttcagggatattcgtcaagaataccggatccgatgggatgatctgcgttggcgtcatcgactgaccttgttgtgcccgaggactataggagatgtttgcaatgccgccaacggcgctcctgtcgagcaactcc

SEQ ID NO: 1698 - DNA, 461 bp, Zea mays
gcaagcgcgaatacgaggacttcgtgcctccgcacaaaacggagcgcgagccggccacccacaccctcaccgtcaacctctccggccaaggcaagcaatgcgcgcgcgcgcgcatacacacttgtcggtccattcttccccttgcaagcaatgctaatcattgactagctgggaataatggcagggttcaagaaggagcacgtcagggtgcagatggtccacagccaacggcgcctgatcgtgcgcggggagcgccccgtcgacggcaaccgctggagacgcttcggcctcgagctcctcgtccccgacggctgcgacgccaaggccatccacgccaggttcgaaaacggcgtcttccgcgtcaccatgcctgccgtcccgccggagcaagtcccggtcgtcgccagcgctgcgaagcaagacggtggtgaccgtgccgcgcgagggcgagaagacaacaa

SEQ ID NO: 1699 - DNA, 366 bp, Zea mays
  misc_feature (19)..(21): n is a, c, g, or t
tggagccagtatcctacannncatttcgcttctactgtatctccgtgaaggcatgaacgatccacttacttttcattcattctgaacagagagtatggacgaagaggaacctgttcaaggaagtttcttaggtatgttgcccccaaaggaagggcaaccttcgtcccactccagcgttccacaagaaagacaccaacctcgacgtaaataggatatggaggttcaaaacgtaaagcataggaaagtaaaacaagtgggaaaaaaaaaatcttctgctgccttttgatatgctccctgtctaagttttgtaaatcctaaccattgcgttctttagccaaatgtttaaaacaaaaaagatcaccggcc

SEQ ID NO: 1700 - DNA, 352 bp, Zea mays
gtggtagggctagtagtgagcagtagacgacaactagtcctggcagccagttgtagtgaggtgacatggctgcatacagacatccaaccaaaggaaacagagggtgtggaaagaaggggagagtggacaaaagccagaccggacagacatggctggcgctgctgctgctgctgcataggcacaggcacagggaaaggtgatgagacgagaggggtggggtggtactctgctgggaccggcgcactcacgggtgcggagaatcagcttcgcctcacgagcgatgcagcagcggagacacagacacagacacctctcgtctgcgtactgtttcgcccatgctcttgtcttgtac

SEQ ID NO: 1701 - DNA, 137 bp, Zea mays
ttttacaacctcacatgtaaccagagatgtaattttatgcaaccaatctaagacttgctagcctaaaccataaaggcatagaccattctcaagatggactgaaaaaaaatctaacctcaacaactaatctcacttcc

SEQ ID NO: 1702 - DNA, 831 bp, Zea mays
cgcttgcttcctctgctcggttctattgtaccccgcccaggttcttcttggggacgtgggcgccggcaagtccagcctggtcctccggtttgtgaaaggccagttcgtcgagttccaggtgagattcttcgacccttcaaacgcggattgcctctgggttcagcaggatcgtgatacagagtgggtgcttgaacgtgctgtttcgtttggccgcaggaatccaccatcggcgcggctttcttctcgcagaccctggcggtgaacgacgagacggtcaagttcgagatatgggacacggcggggcaggagcggtaccacagcttggctcccatgtattaccggggcgctgcggctgccatagttgtctacgacatcacgaacgcggtcagtacaacgacttgaatcagtaccggttaatacacacattgtagttctctgcctcattgttgagtccagaactgaaatgcgtcaatactactgaaatgaaataataactggaagcagtgttctggagaattgttctgcactcacccatccttctttgtgtgccacgattgcttagcttcgcatccaactttgattttacagcgtatagcgatcaaactgttaattgactctgctctgagctgtgcaaagatgcaatgttataggtttcccaacttcatgtattgtacccttcgagggtgcgttttgtactgaataagtcggcataaatgaatcagtatgatgttgtaaacctagagcaactggatgtttgcacctttttctgtctgcatttcaagagcaacctaaatcagaacaaaattccataactttcgatgctaccaagcc

SEQ ID NO: 1703 - DNA, 657 bp, Zea mays
tatacccaaggataagaaggtatggtctattataaagactaagtattttgattaaatacctatattgcatgctacgagtttataaaaaaaattctagtattcagctgttaccttatggttgtcattttgtgaactagcgctttccatgtttagttgatccgtttctatttggatttgctttagttctgttactttttatgtcttgctttcgtactttatttcacttctcgataaattatgcaagcttgatgtatttatggagcgacattggtaggaaatgcatgcgttcacttccatatgctgattgtatgctaaacactgcagatccagctagttgaagtttcaaagccctctccatcattaccggagatcttatccggcattggaggttcgttgcttggagttgacagggcagtgaagggagtgctccaggacatgacctccctaagtggagtccaagctaggatggatggaattctgtttgaaagtttaggagacatgtcaggagaaaaccagttattgttgcttgtaaaagatatcatgaactattttgattaattctagcattcaggtccttatgttccaaacatttgtatttagagatgaggggaaattcataatgtcactacacatctatcttgcacagaaacaggtagc

SEQ ID NO: 1704 - DNA, 385 bp, Zea mays
ctgactatctgaggcacttcagtccaacctgacagtccatctcgcacggtgcacgatcagagtcactatccagtgcacccctgcagcgacttgcattgggaccgggagtcgaagcctcgtctcggctgtggaggctggaagcaatgcagggcagcatcgatcagcagttgagcacgcatggaggaggccggccagctgcgagtcaggctacaagttgccatatcttcttgtgtcgctttggcgtcttgctttctacttaggttgttagagcatctccaaaagaggctctaaacatggtcctattttaaatatagggctcaaaaccataaaacattctttcaacagcggctctattttataaaattttatcaaatggttatagcac

SEQ ID NO: 1705 - DNA, 343 bp, Zea mays
ggaggtaggtcaagaatattttgatcctaatgttgtaccaagcgatggagctaccatgattggtgatgcagttgctgcacaaacaacatatgatcgagacaatccaaatataaaagttggctccacatttgtcgacaaggatgagtttatgctacttaagacaatatgaagtcaaaagggaattggaaacaattgtagtgcatagtgatataagtcggtacaaggcaaaatgtgtagattcagaatgtgattggaagatttatgtaatgaagcttcttgattgtcctacattcatggtgaccattatattgtttattaatgtttacaaacttggttgtcctac

SEQ ID NO: 1706 - DNA, 337 bp, Zea mays
gagacgggttttctacatcttcttgcgcctctactgctgacgggagggaagggagcggatctggtgatccgtggtaacgtagttctcaacacgttatcaacacgctctacctcgacgttgctatggattcgatctgcaccgaatctccatcaagtcggcaggtctcccggccttgccgaactatcctacgcgatagccttcgatttcctttctatgcggtcacacggtatgtctttctaagtagattggatgtaccgtttatgggcgatcatccggtcgaacaagtacacggcgcctgggcacgtcttcaacccggcactggaggggagttggacag

SEQ ID NO: 1707 - DNA, 451 bp, Zea mays
tgattttggatttttgctctagcaacttaacatttcatatctcagaagtagcaactatgttgaacgtaggcatgaccttgacactcaagtgttgctaattgggcacttattgtactcaggcaaaagtggagcatcataatctggctggggcttcttgtgggtcatcttcttcagtcttgtcgcaacaggaattacaggatatgcaccgtacaagtatagggcccgggtaagaaatagtatatgctgacacttttatgttcattaccttctgataacttgggtgcatctaattttgttcttgcattgcatatgcctacagaggtacatggattcagagatatgtgccatcatggctcactacatgagctgtacaaccaaggagagatccaaatccattctcatcacattgagatgtgacgcagtaggacacagactttgacgaagggagact

SEQ ID NO: 1708 - DNA, 410 bp, Zea mays
tggtgactgatcggagcgacatcaagaggtggagattggagatcaaagccaaggtggtaaagatgacagaagtgatgaagacgctctagggtaaggtgaacgcgaagtcgagtggggaatctcctgttttggtggattcgatgaagccgaagacgactggagggatggtgaccacgtcgaccggagaaccatcggtactggcgagtgcgtcggcgtcgatgacacctgaacccacggtgatcggatcggtgaccagaccaactcttcaccgtgctgctaaacccttccgtcgatcggacgctggaccggagatggcacgtacaccatactctatgggaggtattgtcgtgttcgcgttgaatacccagcacccttggtcctttgttcctatttcagtagtgcagactgca

SEQ ID NO: 1709 - DNA, 304 bp, Zea mays
tgacgcccgcgcggccgcgctcaacactcacccgtgatcaaggctacatctagtaattgctaataaaatttgaccaacttattaaaagcaatgctcagcttgaacccctattattgatcagccttacaattcacatgaactctcacctttggtgagttcatgcacattattccccataatttgttgagctatgatcttttatgagctcacacttgcgacatataaaccccccacaggagaagaataggtggtccaggaggagccgtacaatgaggagtacgagttgatctaggtggtgtctccc

SEQ ID NO: 1710 - DNA, 554 bp, Zea mays
cgattcgggggtgtgttgtcgaaggcggcaatggcgagctactcgtcgcggcgtccatgcaatacctgtagcacgaaggcgatggccgggagcgtggtcggcgagcccgtcgtgctggggcagagggtgacggtgctgacggtggacggcggcggcgtccggggtctcatcccgggaaccatcctcgccttcctggaggccaggctgcaggagctggacggaccggaggcgaggctggcggactacttcgactacatcgccggaaccagcaccggcggtctcatcaccgccatgctcaccgcgcccggcaaggacaagcggcctctctacgctgccaaggacatcaaccacttttacatgcagaactgcccgcgcatctttcctcagaagtgagtccgatgctgccgccattgttcttgcatccatccagcatcgtacgtacgtcctctatacatctgcggatcatcatgtgcgcatgtttgtggcatgcatgcatgcatgtgagcaggagcaggcttgcggccgccatgtccgcgctgaggaagccaaagtac

SEQ ID NO: 1711 - DNA, 261 bp, Zea mays
tgcttttgggagagcatggagtgtttgatttgtcgctaatgtcatgttaaggcttgttcattgtactaggatttagttatctatggaaatttgtcaaggattgctgggcttgaagattcagcgtgtttgtattatggttttcatttactagcttatccaggtctgctcttaaacccgtagggctttgtacccagaaaagtactggctgctttcagacgcaggcatcctgttggggagagttggcagcgtatcatcatctta

SEQ ID NO: 1712 - DNA, 459 bp, Zea mays
atctcctagtctcaaggaggttacctgggggtgcactggtggaagtccccaacgctcgggacatcaccaaggattctcctcgttcttcccacccctacttcttgagttcttgcccacaaccctttgttgtgttgcttgctgcgcatcaatcccctgctagaccacgaaggtatcatcatttacttctttaatgtagtagatgctaatttacttttccacaaatttttgtcaaacttaggacaaactcagaaattgttatattttaggactaagggagcagtatttatctatgccatatgatgaaatggtggggtggaggactggggcacgaacaccttttataacaatggctcgtggttcagagttggttgaatcctattgatgtgtgaaacacttgatccccggtgtcgggtctagcggaaatgtgtaatcaaagctaagcacataagccactgtaga

SEQ ID NO: 1713 - DNA, 765 bp, Zea mays
  misc_feature (367)..(367): n is a, c, g, or t
  misc_feature (369)..(369): n is a, c, g, or t
  misc_feature (372)..(380): n is a, c, g, or t
  misc_feature (402)..(409): n is a, c, g, or t
  misc_feature (411)..(417): n is a, c, g, or t
  misc_feature (419)..(437): n is a, c, g, or t
  misc_feature (440)..(758): n is a, c, g, or t
gcgtgtcctgaaagagatctactgttctttgattgagatccatagtagtgctgctggcaaagctgcattggtgaattggagctattttgtggaacatgattttagctagctaaaattctttggaggtatgtatgccgttctctcttcatcctggtcccggagtggtcgacatgcacagtatcgatacctgtagattgtactgatgactgctgcggtgaatgtgttgccacgtcgctggtcagcgacagatcggatgcgagatccagatcatgtgacgggtagccgttggtaccggtacggtgcctcacgagtgccggtcctgggcagtgggcaccatggaaggcaggaaggaagggtatagcttatntnctnnnnnnnnntgaaacacttgatccccactgnnnnnnnnannnnnnntnnnnnnnnnnnnnnnnnnncannnnnnnnnnnnnnnnnnnnnnnnnnnnnnnnnnnnnnnnnnnnnnnnnnnnnnnnnnnnnnnnnnnnnnnnnnnnnnnnnnnnnnnnnnnnnnnnnnnnnnnnnnnnnnnnnnnnnnnnnnnnnnnnnnnnnnnnnnnnnnnnnnnnnnnnnnnnnnnnnnnnnnnnnnnnnnnnnnnnnnnnnnnnnnnnnnnnnnnnnnnnnnnnnnnnnnnnnnnnnnnnnnnnnnnnnnnnnnnnnnnnnnnnnnnnnnnnnnnnnnnnnnnnnnnnnnnnnnnnnnnnnnnnnnnnnnnnnnnnnnnnnnnnnnnnnnnnnnnccccccc

SEQ ID NO: 1714 - DNA, 420 bp, Zea mays
cttctgcatcgtcaagcgccgcctccccgtcgcctcctccggtgccggcgctaccgcaaggcctaccacggctcataccggtgtggacgtcgctgcccgtgaatccgttcacggcgaaggcggcgtttatccggtactggaaccggaaggtgagcagcaaccgcccgcacccggccttcctcttcgccaagctgtcgccgctctcggccccggacgcggccacgttctccaacctggcctccgcaggcaagctcgcctcccgcatccacgacttctgcgatgcggcgtccctgctctgtccatcgacccccgcggcgtcctggtcggcgtcgtccacgtccatggacggtgccgcgggcgtggcctcctccggcggtggcagtggcgctgcctccgccgcgccgttcaaggactacgaga

SEQ ID NO: 1715 - DNA, 705 bp, Zea mays
ttcactttatttctaaacgttagtaatgtatttggtagtattctaaattgccttcactttcagataaaacaactgaggaaaatccagccaccgttctccaatcttctccgaagataagcgaccaattgagaaagatatcaaattcactgaagcttcttaattctatggcacctagtatagtaaaacagaaaacagatatagttcgtccacaatcctttgacttagttgaagcagaaccaaaaactcctgaggtcaacttaaaactttggcatgctcaagatgcacaagaatcacttaaggctcgtagcacagggattaaggtaactattttgaactcattacatacactttttattgtatcattagctttggtaataaattgtttactctttttctctacaaatgcagaaatctctagctaaggagtgtttgttgtttctaaacagcgctaataagtaagtattaccaataacatattatattatttattgttgaatagacttcatttatgtttctctaatacatatttccgtatcaaatgcagggagcagttaaaaagtttaaaggtgctcaaaaaccttaaaatattattacttaaccaaacataaatgattgcttatgtcttgctaacatgttggtgatgtgtagggtattggagagaaaagggcaaactatatacttgagcttcgagaggagtcaccattg

SEQ ID NO: 1716 - DNA, 695 bp, Zea mays
cgaggacaggttcaatagatcagtggtacgtgtccaagctttgttccgttctcatcgggcgcagcaggagtaccggaggatgaaggttgctcatgaggaggccaaggtaagggtttcacccttgtgccttgctggtactgactgacatgtgatacaatctccagaaagaagttaggttcacaggaacaactgctttgactactgccagtaatcctgttattagaatactcgcctactgtagttgagtttatgctttcgtccactgttctgaatggagtgaatctgctgtatgttttcagaaagtcagatttgctaaacccaaaacttgatatgggatttcaactagggagctgtgcatgcaattatcgttataaacacttctagatttcgtttgtagacactgccatatttgctccttacatctgtgcttgtcattgtattttgcaggtggagttcggtcgaaagtagttaagacgggcatagattcaagatctgaagtgacttgttgttccttgtagggggttggctagttcttctagttctttgtatatccgaaggaacaggcgtagcttgcggatgacgtacattctaggaacatctgacgctcgtagtcagtctgccaactgccgttaggcttcttctgtggtgtgtatttggctgggttttagttgggcgaaaacggcattgtgctttat

SEQ ID NO: 1717 - DNA, 571 bp, Zea mays
catttatatattcaaaacatctgcccgttaattatgatatttgaagagttcctttttgaggaaaaatgcaagtacagggacatggcccttcagaacttctaagtgaatttacagtttatctcgtataatgaccccttgatggtcatctggtttttcctccacgggggctcaagtcctcgattatatgctttgcatcgtagagtaatatgcgtttccttttgtagtagcccgtctttttcagtttcccgtggtgttatgctctattgttttgacacctgtaaatgcaacgtcttcagcatgcctacgatgatggccgtttggaagacgctttattgaatcatcatgatgccgacgatgcaagcgcagcgattgccaaacttatgaggtgggtactctatatcctaccaagcttcctttacaaaattcctgggtatagtatagtactcgcttcagattagagccgcagccacagtttgattactacgaaacgcagctttttactcgcttgctgatatgaaactcctgtttatttcccaggttgtcgtacttactgactcggctgcatgtgtaa

SEQ ID NO: 1718 - DNA, 701 bp, Zea mays
  misc_feature (695)..(696): n is a, c, g, or t
tttgcactttttaaaacatgttatatgactacaacctaatgaagttcatttgctaggcccgacgattgctagcatatcccgatgtgccacagaatacagaggtaaatttgatatacttatatagttatcttctacacattgaaaaaagtgtgtacctttacatacctaatactctcgtagcatatagtaagaaccattctctttagctacacatctatagatttaggaaattgaccttccaatctgaactaccaagataattatacatgttttattgtcttcatcacaggcggatgaacactacacagatcaacttaacaagaaggagctttcctcaccaccgaaaatgtaagtattcgagtattataaaaaaagtaggataaacaacagatacattttaattttaccactaaaacttatgtccaggatgaagcacacccaagttgacaaagtcctagattctataattccagaaaaatgaagcttgttacatcctcatgacatgcatgaaggtataatactatatatactcctttgtgatacaaaacatattacccccacatattatctttcactcgccttagtacccattaaacagcaacaaataattaggcaaacattgttagcacaactaatcctatcttcctctttatgtaaaggaatttgcttttgcgtatctgtggagggcttcgtcnnttttg

SEQ ID NO: 1719 - DNA, 338 bp, Zea mays
cagctccaaacattatacacgtagattgagaaaattcttgagcccttgttctacccattcataacgacactatagcctatagttgagacatgtactttatcgtgggatagatgagacgattcttttacctcagcctgaaaatcattcccatgaaggagtcaaactcaagacatgagaagtgttatttacatcatctaacaatttagctagaggcctttcatgtgaacatgttagttttgattgaatatttaatttttgtaggttttaaactgaaaagtatcatgtaaccaacttgattttttcgctgatttgttcggtgatgtgtaatttgtagtcct

SEQ ID NO: 1720 - DNA, 717 bp, Zea mays
  misc_feature (628)..(630): n is a, c, g, or t
  misc_feature (632)..(632): n is a, c, g, or t
  misc_feature (646)..(648): n is a, c, g, or t
  misc_feature (681)..(683): n is a, c, g, or t
  misc_feature (691)..(691): n is a, c, g, or t
  misc_feature (699)..(702): n is a, c, g, or t
  misc_feature (710)..(711): n is a, c, g, or t
atttgatgcaatactgattgttccaatgtttcaaattacttggaccttcttctctatttttataggatttgtttactttcaagaatatcaagtaagttcctatttgttataatcggataatgaagtgaatcatgcatttcctaattataaaccgatgattctgtttttctgctgtcaggtatttgatacactcaggataattatgtttgtgttaggcatgacatttgtctttgttgggatctccttgctagcacccgatgacagtaaaggttggtaaaacattgattttcatgtgtttgcacatagaatattttgactcttggtgaactgtcggcagctgatacgaaagatggttcaagcaccgccgaggactccataattgacatagacaggttctattccacgaacttgtagaaagtttcaagatttgctctgttgcattttgtgttcagtattgcattcagtgttctgatatataacctagacactgcagaaatggaaagatgctgatggaggagacagacacagatgatagcatctcctttgttacttctgtaaaagtaaatgcaaaacgtgtactttcaaaggcaaaggtcatttttgtttcttcctagatctgattgtaccnnnanaaaaaataggaacnnnctggatattcttgaaagtaaacaaatcctatannnatggagangaaggtcnnnntaatttgnnaacttt

SEQ ID NO: 1721 - DNA, 276 bp, Zea mays
gcgaagtaagcgagactccgcaacgcgtttgtgcaccgcgcgtccgggacgggacgggacgggacgggaggggcaatctcgtcaaataccagcgggcgcgggcgcgggcgcgggcggcggcacatgtccacgcagatccgcgatttgcgtgcgcggattgacccaagtttcacgcggtttcctttgttttcttccccgtctatctactctgctctgcctttttttaaaaaaaatccgcgtgctgcatttccgtatatatatatactgttcacgtct

SEQ ID NO: 1722 - DNA, 396 bp, Zea mays
atgaatccacgttgcgggtcagttcacacaacatcatcatattccttattctccactcgattctcgacgccctcgtctccatcgccgccccaaccacccaacgccgactccacctcgttctgcagcgccctcgtctccaccaccgccccaaccaacattgattccccttgatttgcagtgtccttgcccccacccattgcattagctccgtctggcgtgccgcctctttgtcatggatgaaggatagttgtaagtgattagtagtataataccagtagttgttaattgttatgtggtttgggctagcccagattacggttaacaactggcttaaagccttgtaaaggttttgtgatctatctaggcctgtattatgaagtgtcctcaatcctctgg

SEQ ID NO: 1723 - DNA, 465 bp, Zea mays
tctctactgtggtccgagaaagaaagttttgaagagtataatgagtcttttatccctggacgcccagaacgtctctcatttgctgcgtaccaaacagtttcaggtgatgtttcattccgatttcatcgctccagttcaaaatctttaggtcgtatcatattgatcaaaactttcactgcacatctatatattctataaatgagaaacatatgttttaaatatgagcaccatccaaatagatatacctgttccgtatgttcctaggtatctaactttttaagctgtacactacaggcatgtcagatgaagaacttctcactgtgcaaaactacaagatacaagcaatggattcgacagacacccttgaaaggctgaacactggtatcaagtttgtagaacataacatcggaatgatagccgcaaggcttgccattcaaaatatatgatcctcattggcagtgttta

SEQ ID NO: 1724 - DNA, 359 bp, Zea mays
tactcatccattaaaactgtatatgattatcatgccacatcgaagtattatagattgtgtcatacttagatctatttattttactcctaaattatacaagctagattatggtaaaaaggtaaaagatagaatcataaataagctgaaataagctatcaaataatagtttattttaacttatttatggttttaaagtaatattttaccctcttaacttttcagcataattcaacttatataatctattaataaaataaacgtcttatataatctattaataaaataaacgcaccgttacacggcctgttcatacgtgctgcagtgctgccaagttgctgttgaccgactttgttcttctg

SEQ ID NO: 1725 - DNA, 497 bp, Zea mays
ctcggcctcgccggcttggactcctcgtgcatgggcgccatcatcagtgccagcgccagcatgagctgctacgacgagccacagcagcgtgcacaggctcaggcagagcagcagcagcagcaaagcagcaacgagcaatggcacagcatgggcagccatcatagctaggtcgataaagctactttcttcttcctctcgccagccgtcgtcatcggtacgtcgccatcgctgcatctcatcgctgccgtcgctgtgcagaggcaaagctagctagggccggccgctcggtgcaccgtgccttttgctcatcttttgcttctgttcaggatatcatctcatgcatgtggtaaccacgcaagcgatcaaaccgttccgatcaaactctagcccggtcgaaggatggtgatgacagattggtcatacagactacagaggtatgcagggagttgtataatttttttttgggttggcgaagagatcggccaacatgtaagcta

SEQ ID NO: 1726 - DNA, 245 bp, Zea mays
gatgtcagcaagattgatggttgctaacaatgaccttgtgctgtttcttaccgggttttgacgtgttggatttgtgattaccactgattgctattgtacttcaaacaggaatggctggaaatgcaactcggcttctcttgagaccttgtcatttgctgtagttcgttcgcaactgtatattgtagcttggaagactctgtgccgtggtgcgtgtatttgagaaatttctatgcaaagtgagctgg

SEQ ID NO: 1727 - DNA, 356 bp, Zea mays
ggtccggccccaagcctggccagtgcgatgtcgcctggaggttccggaaccgccgggagaagtcgtggcgccgctacagggactaccgtcgcttcagcctcgcctcgggcgatggctgcgctcttgacatcgtcagcgtcggcaagttccgctcggggacgaatgcagctcgccggccgtatcctaagggctcgaagtcgaagaggccccgcgtgtcgccgccgcctgtcgatgcggagatcaatgacacaatccctgtcgtcggatcagaggcagagttcaagaagggaaagtacttgtactacatgagaggaggtgaccattgcaagagcatgaaccagttcgtctggagcttc

SEQ ID NO: 1728 - DNA, 377 bp, Zea mays
gaggaataaattataatgagaggacttaacatctttggtacagcactggttattgttaagtggaagcagtaagctctcaatgcagaaaattgtcaaaattaaaattatgttttatcttgtagttactgttgacattgcatagtacgtttgatcaattgcagggcttcgagctctcctgtggcttcgttaagcaatgggagctgatacgtgaatcacgtgatgagggtttcaaggatggagtaggtattgatgttgctatcagtatggtttctgtagtcccatggaacaatggtccatggatagtctgacaaccttctctacagaactttggaacattcttctctcatgtatgttgtctgtcttcagttaacatgcca

SEQ ID NO: 1729 - DNA, 360 bp, Zea mays
aggccgagttccaaagaggagcagggcaccctgaacctggaactcggcatctccacgaccccggacaccttcaagagccacacatccggtggccacatggtggccgtaccgtgcgtcaactgccacctcctcgttatgctctgcaagtcctccccggcgtgtcccaactgcaagttcgtgcagccctccgtggcagggatgcccaagacgcctcctcgccgccggctggaaaccgtcaagccactgctggagaccttgagcctcctgcactagcagcttgcgcgccatgcagtaacggcgggcgtgtggtttattacaaagggcaaatgcaaatcgagttgctcaaactcaatactccct

SEQ ID NO: 1730 - DNA, 447 bp, Zea mays
agcgctacgcggccggggagagatagggaaagcgggaagcaaggacgatggcgtctctgctcagcctgtacggcggcgacgccgccggcggtcggaggaggatgagccgaggtagcggcacggcgccggcgccggtgaggcgtctgctgaggaggctgaggtccagcttcatcagacggagcgcggcgcggccgaggacgagggcggcggcgaggttcgcctacgacctgcgcagctactcccagaacttcgacgacggcgtcatttcgtcgtcagctccggcggccacggctcgtgcgtagctgcgactccaggaggattctgcttcttctgtgtagtaacaagtaactgtagccaagatgttagctactagctagtgtggtttagtgctagtgcttcctcactgagctagagactcataatcgagtccagtgttaatttcttgtg

SEQ ID NO: 1731 - DNA, 217 bp, Zea mays
acgatgtcttctagttcttgctatgcttggctggaagcgcatacacacgacggtcagagcaagccgccgccgcacgcttttcctcatgttactttttttttctctctctctctctccatattttagttttaccgggcgaattaatccgactacgacaaggtaaacgccgtcaacgtgatcgtggcgttatgggcatgtgtatagagatcaagattga

SEQ ID NO: 1732 - DNA, 250 bp, Zea mays
agaagagatgaagccaccaaagcgtgcagttgaagagtcgagtcgaggactctaagaagcgactacaggccggctttcccatatgagattgtggctgtttccttcattcctgcagggagttgttggctgctgtgggctctccgcgccgggctgtgggtgctgctgtttaggccaggggagtgcaaatagggtaaaaatgtatatactataaggcttttggtatttgggactgggtgcggccgcacccagt

SEQ ID NO: 1733 - DNA, 256 bp, Zea mays
acatggtgttcctgcctgccggcgccgtggtggtgcaggtggtgccgtacgggcggctggagtggctggcgcggaacacgttcgcggagccgtcggcggggatggaggtccactacctggagtacgtggtgcagctggacgagacgacgctgagcgagcagtacccgagcgatcacccggtgctgagggaccccatggccatccacaagcaggggtggaacgcgctcaagaccacgtacctggacaagcagaacgt

SEQ ID NO: 1734 - DNA, 1250 bp, Zea mays
ggcgatcatgagcatggtcatgtgccgaatgagattgacaggaagggccatggtgatgcggctcatgacctgaggattgtagcagagagagtgcaggacctgaggcactcgcagtcggaagctgacaccaaacgagccaaacagtgagttggattgatattattgtttcactcaatttgaaaaattatgttactccatccaattataaattataagacattttgtttttttctcaatacatagattttgctatgcacttagatgtacactatatctaaatacatggtaaagaattgtatctagaaaaaaacaaaacttataatttagaacggagagagtagtttttgtggactctgtggtcttgagacatcagtagtggtaataagtctgattgttgaaagcaaacacttaagtggaaccataattctaatttgcaatattcttttagactaaaaggtaagcacatagctataccacaagctgcacatcaggttgatttctcttatgatgtgctttgcttaagaactgaattaagtgttactaaacagtgcaaatgtgtctgttctgaatgtcttgtctatgtatttggatagacattttattggtctattggctgtggcaattccacaggagtacaaacttaaagtgggaaactctactcatgtggagtagagtccctaaaactcaagtaactgatttcaaaacaaaatgattgtatgcacaatagagggttttagattagatgaccactgagcaatcaatttgtaaatagattatgcgggaagttctttagctccttaggatgtttaagtcctaataagatggaactgtacatgtggaatgtgtttgtcagtgtgtgccatctttaaatttggaagaagcttgaatgcaaaataggtgcacatcttcatgtgcatcgagtttcattttggcttcagtatatgctgacttaagtctgcacaatgatatttttacttttgttgacaactgcagacaatacgctcagagatctcgtgttcgcaagatccaatatattcagagctcgagagaagagttcagtccttacaggtaatctttctttttaaacaaatcatatgagtcatttattgcacgagttagaaagctttaacatcccaaagaattcttaattttttatgcttgcagacagaggggatagaagtaactgctgaaattgattttatcggtcagcaaaatatcatgttagacttggaaaataaggcctgaagcaa

SEQ ID NO: 1735 - DNA, 324 bp, Zea mays
tggctgccaagccccttccatggcgctcgccaccgtctcctgtctggtcaccccatctccagcccgatctgctctggctgtcagccgtgtcaccatggctgtcctcctccgctgccactcgttggaccttgcccctgctgtgccgccggcagttccccgcgccctatcctccctggtgctcacctctgctccccctgcgttggacggtcgcccctgtatcattgcgcgtgcccctcctcacaagccatagcgcagcagccaagccctagctcgccaaccccctccgttcggtcggccatggccacctcgtcgaggccccagcca

SEQ ID NO: 1736 - DNA, 743 bp, Zea mays
gaggaggacgccaagaggacaggactggaaggcactggcctgccgctgcaaggcggctcccacggcaaccttcgtagcgctggcagcgaccagcagttgaggcagatgctcgattcgctcaaatcctcaaagtccccggtaagtacagttgctgatctgcagttctgcactcgccgatagaatggtcgaaacgacctatatgactctaatgtcccttatatcaaaaaagaataagaagaagaagaagaaaatgttttgctcttaatgggaataatagtgaaacagagaacgggacagcatttgtagtgttttcagaacacgggtgtactactaccattagtccatagaattttgatgttcagatgtttgttttgatgaaagctctttggcgtgttcttttgcaggctgtgatcaactatggtgcctcatggtatgcccctttgtctcttgcttgtgtggagacattcattatttttttttaaaaggctacacatacgttaaagctctatagtcctatggtttggacctaaactctctaggcagcctgatggtttgcgtatttacatttgttctgttgaaatatgcattccacacttcaattttttaaaggttttggaaaagtagatcttttgctatgccatggaagtctaaagttctgcttatactgataaccatatgtggtgattgaatttgcctgtccacttgattctgcatgatcaatcaaactcactcctccttatacg

SEQ ID NO: 1737 - DNA, 438 bp, Zea mays
atctgagacacattgttatggtaaaaaatgcacgaattgaggaagattatggcacccatatcgctgatcttgacataaatgagttacaagagcggcgcaagcgaaggattgaagaactccaagtaattgaaaggacacaccatgaatttctcagcatgaaaactaggatggtagctagcattggggagttattgtcaaaaatggaggcactgaaacaaaaccgaagcacatgaactgaggttactattgcagaaatcgaagttactcaacttgtttaaggaagcctgcacatattgttgtaagtttctttttcttttattatgatttccgcttgttctaggactagctttctgtaatattattctttttcactactgctgtgatagagattccttcacttttggatcatttcaatcacataggcagaatgatgagatg

SEQ ID NO: 1738 - DNA, 416 bp, Zea mays
cgaggcgatgaacaggctcctgccggccattgtgctggcgagctcggtgttgacgccccccgcgacccagccgctggtggcctgcggcgcccggaacgcgttcgccgcgtggttcgtccagtacaggctggcgccgcgcacggggaggttagtgcaccgctggaacaatcgccctggcggagaacatggcggacgagcaattctgctgctgctgcaccatggcggtggacgcgaagagcaccagcacggcaacgagaaggagcagcgccgactggcgacgagaagatgctcttactaccatgagttctgttgcaggacacacatggtgaacttggtcatggtttttgtattggggctagttctttatgaatttcgtttagtgtttggttcgttgccacaaccataaactgtaatat

SEQ ID NO: 1739 - DNA, 416 bp, Zea mays
  misc_feature (124)..(124): n is a, c, g, or t
  misc_feature (330)..(330): n is a, c, g, or t
  misc_feature (381)..(381): n is a, c, g, or t
cgaggcgatgaacaggctcctgccggccattgtgctggcgagctcggtgttgacgccccccgcgacccagccgctggtggcctgcggcgcccggaacgcgttcgccgcgtggttcgtccagtanaggctggcgccgcgcacggggaggttagtgcaccgctggaacaatcgccctggcggagaacatggcggacgagcaattctgctgctgctgcaccatggcggtggacgcgaagagcaccagcacggcaacgagaaggagcagcgccgactggcgacgagaagatgctcttactaccatgagttctgttgcaggacacacatggtgancttggtcatggtttttgtattggggctagttctttatgaatttcgtttagngtttggttcgttgccacaaccataaactgtaatat

SEQ ID NO: 1740 - DNA, 370 bp, Zea mays
aatgcatagtggtgaggcctagcgcttcaccaagcagtgacagtaagcataagtgttgtccatgagtgcaacactgtcctaccctcatggatagctcattattttgagagcttttagagtttagtatgcctgttttgcgacctatttaatcctttgagttcttatatagcctagaaatgtttttggttgtccctgagtccaacaactagttagttatgatgttttttggttgggctctttcttcattcctattagagtagagaacttaattttctgatatcagaaaattttacctacgtacttggttttggtatgttcaagtcttctagtatgtctgtcggtcatcaccgagaatatcgagaacctaata

SEQ ID NO: 1741 - DNA, 434 bp, Zea mays
ttgcgatgagttctttatgttttgtaggctcgctaccactcatgattattttttgcatcaaatttgggataggattccaaggattttggttgtcgtgcacatcaaatttgtctatctaggcaactacatgtagttttaagaatccaacgtgactcgtgagttcatgttctgtagactcaccaccactcaaatgattattttttgcatcaaatttgggataggattcaaaggattttggttatcttgtacattaaatttgtctatctagtcactcaactacatgcagttttaagaatccagcgctcttagaccgactttgatagttttcaatatttttttgagctatagttcatgaaattcatgtgttttggggtgtcctagaaggctagaatggtcaagccctatacactctaagggcatagttaaagccaaca

SEQ ID NO: 1742 - DNA, 451 bp, Zea mays
agagggtctagcaaaaaccagcaaaagcatgctgatacgaccaaggtaaaacatgattcttctacagttttcaccttgcatatgttcttttttttaaaaaaacgaccctgcatatattctttgtatgtcaacatgttcaaagccgcctgtgtttttattaggtcggcccacatgattcatgaaatcacaggtttacgctagcagctcttttgtgattcaggagatcagtcatcctcatggggaagcttaggggccaatgggattggttcatgcaagctaataagtttgtaagaatagcagtgatggaggtgggcagatgtatataaatctgttcattcatctccagatagccaaaagataggtgtttcctgttggtagtgtatctattaggaatgtcgtagattgctaatgacttcctgtaaaatcgtccaggaaggtttcagatattgag

SEQ ID NO: 1743 - DNA, 399 bp, Zea mays
cgctacgtgttcctcgcacggcagcccgtgcccgtgggccgccaccacccggaggaggacgatcgagacgcgagctttgcgaatgatgacgacgacggtgatggtggcgatggaacggcgggggaggaggaatcggaaggaggcgtctgtaggaggaagaagaggcctctcctggagatcttggacgacgacgccccgccgccgaccaagaaggcccaggtcgaactgatcatcgcgtcgccgctggcgacgcagacgccaccgagcggttcggagtcgtcgaacttagcgtccccgcctttggccggggagtccgggagcgaggggagccacgagaaggcgcacgagcatcgccctccaagagagcaaggaagggccaagaacgcgacaaagaagcag

SEQ ID NO: 1744 - DNA, 452 bp, Zea mays
tgtcgcatgctggcgtctggtgaaggagaggacaagcggcggcagagttggcgcgagcggatgtcggaggccccgatctagagactctataagcaacaacgaaaggtcatacctgcgtgtgcatgagaggataggggcaggcgaggggatgagaacctgagaagagatactcgcaggcgcggatgggaggagcgtgtggacttgcagagggacgacgcggaggaagcaagaaggggatgagaacccgacgaagtgatctgtagagggatgaggcggagggagcgaggaggaagagagacggggcagatggagcgaggagaggcagccaaagtcaaagcattaggtggaactctccagatgcgaggggaacgatgtgagagagcgcgattaaggtgagccagtgatccacgatcgagcggttaagaagattttcgatgacgtggatgggctaa

SEQ ID NO: 1745 - DNA, 1370 bp, Zea mays
  misc_feature (67)..(67): n is a, c, g, or t
  misc_feature (1321)..(1328): n is a, c, g, or t
ctcatcctgtctggtgttctgaagtcactggctttgtcacaagcaccgtgttgaactccaaaccctntcaaaagtttttcaagttaatgcctggcgaagttattcttgcttcacttgatggatttggtatgtctgatttacatttctttaagatttgcttgagaaatataggttcattcaggctagtttatatgtttctggggtgattgaatctaaaaaatgataggtttgtaaaaccagaagatataattgaaatcataatatggcttctgattctacccactccacaatgtttaacttctgctgcatgtctgcattgcatgtatgatcggttgatttaccccttattcaatgatacagggaaaatatgggatgctgtggaagtgtctggcaaaaatgtgatgcagacatcctcagttgtgaccacttctgttgtaacacacaggtaacatacaatgcaatggatacttcgtcgaatcaactgctttgtactccctctatcctaaattaaaattcgtttaagaaattaatagattcatagaatacttgatgtacatgttttttatgtgtcagattcatcatcaaacatttgaatatacacataaaaaccaatagctaaaatgaatactattttgggacggatggagtattatttttgggtatccactgtaacatttttttggttaggagtcctccaattttctgaactatgtgaatgtaactctttttggttggcagactttccatgccattttggcattttagcagcaaagtccatatggtgtatcatacatataagaatgaaacaggactttaaaaacaatttagatcaaattcaaataataattcaataaccagaagagattagaaatgcaagagatccaagaaatattgttcttttagaaaaatggcaatgaacccatgaactaggaagtactgctcttatgagataacagcatgcgggaaatgtttcttctgttcctttagaaaaccttgttccataacatgattttgcacctacttatgcgtagaaacggctcggctcttgtctggttgccacctggctattagtcaatgaaaaactaagttccagtgaactatatggttgatactagaactctagaagggggcatttagctatttgccgtccttcgtgtgtcactaacacataagtcactaacggcaaaaattttgccacccacttaatttttccctctagaagagtttaatggttcgattgatgcagatacggtgaacaagcaggtgaagccacacacaattacctccacgctacaggaaatgttctcggagctgcgtgggnnnnnnnnaagattagaaaagccctcgaccctaagggtaatagtgggagt

SEQ ID NO: 1746 - DNA, 285 bp, Zea mays
agtgaggcattttgggatttaggccatgaagccccccgatggttcgatgttcgtttccttctgcctccagctagcttctctggagcgagcacagcacatgctttaggcgggagcagaatcagtcaagctcatcttgacgaaggcaagcatgaaaattggaaagcgaagagcaactcttccccggcattttccaccccccacagccccttacgtttttcgtcctattctccatttgttgattacctgcttaatttattctttcaatctgtctcgtccgtacatcat

SEQ ID NO: 1747 - DNA, 931 bp, Zea mays
  misc_feature (228)..(230): n is a, c, g, or t
  misc_feature (248)..(248): n is a, c, g, or t
  misc_feature (253)..(256): n is a, c, g, or t
  misc_feature (280)..(286): n is a, c, g, or t
  misc_feature (301)..(310): n is a, c, g, or t
  misc_feature (316)..(316): n is a, c, g, or t
  misc_feature (322)..(322): n is a, c, g, or t
  misc_feature (354)..(365): n is a, c, g, or t
  misc_feature (367)..(367): n is a, c, g, or t
  misc_feature (371)..(374): n is a, c, g, or t
  misc_feature (377)..(388): n is a, c, g, or t
  misc_feature (390)..(390): n is a, c, g, or t
  misc_feature (394)..(403): n is a, c, g, or t
  misc_feature (405)..(405): n is a, c, g, or t
  misc_feature (407)..(407): n is a, c, g, or t
  misc_feature (410)..(422): n is a, c, g, or t
  misc_feature (424)..(432): n is a, c, g, or t
  misc_feature (437)..(437): n is a, c, g, or t
  misc_feature (441)..(441): n is a, c, g, or t
  misc_feature (449)..(457): n is a, c, g, or t
  misc_feature (459)..(465): n is a, c, g, or t
  misc_feature (468)..(485): n is a, c, g, or t
  misc_feature (487)..(490): n is a, c, g, or t
  misc_feature (493)..(496): n is a, c, g, or t
  misc_feature (498)..(499): n is a, c, g, or t
  misc_feature (501)..(501): n is a, c, g, or t
  misc_feature (503)..(513): n is a, c, g, or t
  misc_feature (517)..(521): n is a, c, g, or t
  misc_feature (525)..(540): n is a, c, g, or t
  misc_feature (543)..(543): n is a, c, g, or t
  misc_feature (545)..(546): n is a, c, g, or t
  misc_feature (548)..(549): n is a, c, g, or t
  misc_feature (551)..(558): n is a, c, g, or t
  misc_feature (576)..(583): n is a, c, g, or t
  misc_feature (585)..(585): n is a, c, g, or t
  misc_feature (587)..(593): n is a, c, g, or t
  misc_feature (596)..(597): n is a, c, g, or t
  misc_feature (599)..(599): n is a, c, g, or t
  misc_feature (604)..(611): n is a, c, g, or t
  misc_feature (613)..(616): n is a, c, g, or t
  misc_feature (618)..(618): n is a, c, g, or t
  misc_feature (620)..(625): n is a, c, g, or t
  misc_feature (629)..(633): n is a, c, g, or t
  misc_feature (635)..(637): n is a, c, g, or t
  misc_feature (640)..(640): n is a, c, g, or t
  misc_feature (642)..(644): n is a, c, g, or t
  misc_feature (648)..(657): n is a, c, g, or t
  misc_feature (663)..(670): n is a, c, g, or t
  misc_feature (672)..(682): n is a, c, g, or t
  misc_feature (688)..(689): n is a, c, g, or t
  misc_feature (691)..(707): n is a, c, g, or t
  misc_feature (719)..(722): n is a, c, g, or t
  misc_feature (730)..(733): n is a, c, g, or t
  misc_feature (735)..(736): n is a, c, g, or t
  misc_feature (742)..(752): n is a, c, g, or t
  misc_feature (758)..(758): n is a, c, g, or t
  misc_feature (760)..(762): n is a, c, g, or t
  misc_feature (769)..(771): n is a, c, g, or t
  misc_feature (777)..(780): n is a, c, g, or t
  misc_feature (782)..(784): n is a, c, g, or t
  misc_feature (787)..(791): n is a, c, g, or t
  misc_feature (800)..(801): n is a, c, g, or t
  misc_feature (804)..(805): n is a, c, g, or t
  misc_feature (811)..(815): n is a, c, g, or t
  misc_feature (817)..(819): n is a, c, g, or t
  misc_feature (822)..(840): n is a, c, g, or t
  misc_feature (850)..(853): n is a, c, g, or t
  misc_feature (860)..(868): n is a, c, g, or t
  misc_feature (872)..(877): n is a, c, g, or t
  misc_feature (880)..(885): n is a, c, g, or t
  misc_feature (888)..(896): n is a, c, g, or t
  misc_feature (904)..(906): n is a, c, g, or t
  misc_feature (909)..(916): n is a, c, g, or t
  misc_feature (919)..(921): n is a, c, g, or t
  misc_feature (923)..(926): n is a, c, g, or t
gaagcggctctcctcggagtcaacggcttgattgggcctactggatcccaaacaacatgggcctttgctcttggaaccatcagtagcgactagcgatagcgagtgcgaggcttccaccaccaccagtagcgagtgcgaggccgaccgtcaccgcgagcggcgccgaacgcggcaatcccccctcgatgacggtggctccaggccggggcgtcaactccaacggcaaannnattggtatgtcttgtagngcacnnnntccaggggacctccggaagatttnnnnnnntgcttatgacgcgtnnnnnnnnnnggatcngcagtnggtggcggtcgatgactgagactgtcggcgannnnnnnnnnnngncctnnnntannnnnnnnnnnngntttnnnnnnnnnnantntannnnnnnnnnnnngnnnnnnnnngttanctcntaccttcnnnnnnnnnannnnnnntgnnnnnnnnnnnnnnnnnncnnnncannnnanntntnnnnnnnnnnncccnnnnntccnnnnnnnnnnnnnnnntcncnncnncnnnnnnnnacccttttccacctttannnnnnnntncnnnnnnnatnngncattnnnnnnnncnnnntncnnnnnnctannnnntnnncgncnnnttcnnnnnnnnnncccccnnnnnnnntnnnnnnnnnnnttcttnntnnnnnnnnnnnnnnnnntcccctcgtctnnnnctttactnnnncnnccttannnnnnnnnnncccacntnnnccccccnnnatcctnnnntnnnccnnnnntcatctccnnctnnccttcnnnnncnnnacnnnnnnnnnnnnnnnnnnngcactaaccnnnnccccccnnnnnnnnncctnnnnnncannnnnnccnnnnnnnnnctgatcannntcnnnnnnnnctnnntnnnntttcc

SEQ ID NO: 1748 - DNA, 452 bp, Zea mays
cctccatatttcgccgtccacaaatagtcgaactgaatcccagatcactcagaaattgccaccaaaaagggaacagagtgagcgagacctcgccaaattgccaaccaagcctgctccccccgcctaggccagtatgataatagagaaaaagcaagcaggagggatgggcgagtgagatgcttcgttcacgttccagcgacggttaaagctggtggagctggtgccattggcgatgcccagatgcgagcatgtgcagcctggttgacgtcagacgagctaggcacgttggacgggcctaaagcgttcggcgaaatacctccccaagagtgcgctgtgtgccagaccggcatagcgtcttggtttcgttgcacattaatctaacctttgatgcaactagaagaagagattttattatccaagattgtgaaggtcagacatttgcttgtaccttc

SEQ ID NO: 1749 - DNA, 376 bp, Zea mays
cgccgcgtctgcgtgctcggcaacagcttccggcggtacgcgctccaggccgaggagaaccgctcgggccccgccgccaaggccccacatgtcctcgctgcagagcggttcgcgcgcgaggagcggttcggcgacccgagggatctggatgacgaagattggttcgcccacgcgttcaacgagacgagctggcatttcttcgagctgcgcgacgacgtcgacttgtccgccaccattgctgtaggagggagctaagttcattgatcagatgtaatatggtaactggatatcttcatgcgttgcttgattgaatgcaatggtgatcaagattctaagtttatcctatttatcggattctctgtgggatgcatactgt

SEQ ID NO: 1750 - DNA, 252 bp, Zea mays
gtagaccgctgcgctggacagcacagcagccattgtacagggagtacactagagtatgcacggatctcagcaggtgtcaaagaaccatgaagtcgccgcgcacggtccagaagagtgccacgagtaaacaccgcacgaacacgtgttggcaaagcatgcgtacgtgtcctctccagttctcccccaggaggccaaggacccagtaggacgtcgatctgttgtgtacggactggcgccgccacttagtcacca

SEQ ID NO: 1751 - DNA, 585 bp, Zea mays
  misc_feature (577)..(577): n is a, c, g, or t
ctccgatcgttcatccaattgttgatggttcgtttgtttgttcgtccgatcattcgatcgtccgttcgtccgttcgtccaaattaagttattattcatccgtcatgtagccacttccctgttttacttcctgtgactgagcaagcaaaatattttgggggagatggatacttgtcgttgaatgtcatggcactatgtgacttcgatatgaggttcacgtttgtcgttactggctagccaggtttggtacacgatacccgtgtactacttgacactttgatgacctatgataataagtttccacacctaccgaaagacaattacttaaatagaacaatttaagtgttctccctcataattactttataagagagtgacaaatttctatgttattgcaggcaagtattaccttatcaattctggttatcctaacagagaggggtacctcgcatcttagatggaacagaagtatcatatatcagaatggcaaaacggaagatatctcgtaggtgcaaaaggggtattcaactacgcacatttatcactaacaaatggtagagcgatcattcggtgtctanaagatgta

SEQ ID NO: 1752 - DNA, 343 bp, Zea mays
taggataagaattgagcttggctgtccatccacagtcgaggaggaagcggaagccatcgacgacgaataggtagcaccgggggtcctccccgtacaccccactgagaggcgtcacctacactgacgtccccatctgatctggaaaatactgcaaacttctaacaatttgacttgtagtcttttatatcttgtagataaactaatacacttttatatatttgttactgatgatagcttagtatcataaggcagcaacatcatgggtacccgggaaactcatgggcttgacaacatcgatccaacgttgctgaggtacaagaacacatgtatcattatcttcaat

SEQ ID NO: 1753 - DNA, 1129 bp, Zea mays
  misc_feature (17)..(17): n is a, c, g, or t
catcagaaggcacaatnggtataaagacataatgaaggtaaaccagctatttcttggaaacccatgtttccccccttgttacatatctggtcaactgtaattaaactagtatatatggttgaaggcgcactgagcttttaaatggggctgcccattgttacccaccaatgcataagctgaataattataaaattaaagcttcttgtgaaggtgaatgaatggatactaaatgacataatacgatttttaactgagtctcttgtactatcagttctgttcacatattttatcttccttgttgaatggactttccatgatgtaaatagttcttcatcaaatgttaatgggtgtatattataatgtaagtgaagtataaaattatctctttttttgttgttgtatttcagagaatcgtctttatgtatttatcttttgtgctcaagtgttgatcctatcgatatgtaatttaattgacaacactggatagtctattctgctttgttaaatcattttattactgatgtgagccctagctttcttcattccgtaagccatttgttaaaaccgtttttacttgttgttcacataaacttgaagatgcacttgaaaggtgactccaatcaaggggccattctgcaagatcaagataccagcttgttgttgattgcaatgcttcatcagtagatattgacaatgagattactataatccacaatttcatacgtgacaagttcaagctaaaggaccctctactagaatcctgtgttcactatccgattgattatgcccgtgttgtctggaagattggaaatgacatggacttaacacttgatttgaaagttatttaccttctgcagacatgatcacaatggcagaaacgacaactggtggggagcctctttctgaagataatttagtaaatactattgaagcatccgacagagctcttaaccttgatgccgacaaagaagatgatacttgaatttttgaagggcagaatgggatacgttgcacgaaaccttgccgccattgttggcagtgctgttgcctcgaaaccgagtcgtgctgccgtgttggtggtttgggagcactggccaaaatgcccgcttgtaatgtgctgcactgctgc

SEQ ID NO: 1754 - DNA, 499 bp, Zea mays
  misc_feature (444)..(496): n is a, c, g, or t
taattctccaggtatgtgtatagtataatcaagtactgcactttcatcaaatcaaattatctggctggtacgttttcagtcaccatgtttgctgcagtagattcttagttatcaataatttatctctttgcatctcccgcttcttcctccttcggcctaggcgcaatggttctttcttactcgtgggctgcggttttgtgttcaaaggcgtgatctttacgcttggaatggttttattacacaagatagggttctagaagaggtgccaatttctcgttgccagttgactttcatttttcttgtcgcgcattggttgccatttggaaagggcgttttatttgtttactgtcggtggtgtgttaattttctatgtcatgttactcacaccagggaaacaaaggatgtgatcaagtctataaataagtctacagggaacaagagcannnnnnnnnnnnnnnnnnnnnnnnnnnnnnnnnnnnnnnnnnnnnnnnnnnnnccc

SEQ ID NO: 1755 - DNA, 405 bp, Zea mays
aagcactgattaacgaattgggaggatattagatctccctcgtgtacagggggcgcagaggctgatacccttttgagagggtccccgagcgtgctccgttggagcggcctggggtatacggctccctccatttggtcagggggagcggacgagggggttccgttggaaccagcctcagttcaattatgcaactgttagatttttaatgttagcttactcgtattatggaaattgaaaaaaaaaacatttattttgcacgtgacattctttattttgtccgatgttttgattgcaaaacaggaattcagtgacccccgtgatgctgatgatgcgcagtacaacctagatggcagggaagtcgatggaagccgtattattgttgaatttgctaaaggagttcctcga

SEQ ID NO: 1756 - DNA, 307 bp, Zea mays
tggcgagtacatcgtcttctgtcccacatcatagtcggagtctactttccccttactcgagttttaggtcctatttggcacaacttattttcaacttcttcatatatttaagcagaagctatactaaatagggagcttctacaacaatttatcaattcaactgaatttttgaataaaccaaaaatagataataaacagaagctgcttttcaccggtttataagataaattgttttttcaacaagcaccgactataccaaacagaactttatatcgaaggttaggcttcttacacttaatgctatcct

SEQ ID NO: 1757 - DNA, 851 bp, Zea mays
  misc_feature (77)..(77): n is a, c, g, or t
  misc_feature (749)..(765): n is a, c, g, or t
  misc_feature (780)..(787): n is a, c, g, or t
  misc_feature (791)..(791): n is a, c, g, or t
  misc_feature (793)..(795): n is a, c, g, or t
  misc_feature (797)..(797): n is a, c, g, or t
  misc_feature (804)..(804): n is a, c, g, or t
  misc_feature (806)..(809): n is a, c, g, or t
  misc_feature (814)..(838): n is a, c, g, or t
tgttttccttgacattaaaacaagcgcgcaattgttgtgctctgactatttggtgatacttgtgaaggtaagcatgnctcagaaaatggcaactgttgagcgagtagaagagcttctcgagaagctgcgtgctgcttcctgggatcatgctgtcaaaggtacaaccaaccaaattcctattgttcttcctataggtttcttcttttgcacagtgacaggattttttgctttcttgcatttcttctgcatcgcttgcattatgtactttttttatcaagttgttctccttgataccattatcagatcaaatatatcaagtttgtattcaggattccagagatatggctattattctttcacaacctgaattttgtattacttattttgtacttgctattgagcccatgcaccaaactttaggttttctttaacctctgaaataccctaacgtgaatatttcttttcagcaatcattgtctcttttgtagggaaagtaggctgaacttcttgcttttctccacacatataataacagctgatttgtgtattcagatatggaagatctgaaagtctttgcgaaagattctggttctcctgaagctaatgatttgactcactgggaccttaccttctggagtgaacgactgagagagtctaaatatgatatcaatgaggtttgctttttttattttgcttcatttaagtatctcaatagttttagctgcaagctgctaagtttcttttactgnnnnnnnnnnnnnnnnncttttctttattgannnnnnnntgcntnnnantttgccntnnnncttcnnnnnnnnnnnnnnnnnnnnnnnnngatactcatacac

SEQ ID NO: 1758 - DNA, 366 bp, Zea mays
tcgtggtcaccacggccaccatgcaccagcaccggcgccaagccatcacggtcatcacggccatcatcacgcaccagcatcggcgccaggtcctcatggccaccacggtcaccaccacgcaccaggtcctcacggtcaccgtgccccagcaccggtacataacgaccaccaatcggctcaggctccgaaactgcatcatcatcaccgtcacgctgcagcgcccgcccctgttcagagctcctactagtctagatggcagatggtcaaaacatgcgcatgtgtggcaataataagaagacgatatttacgttttggttgtatttttgtactcttggctatgcctctgcgttgttcatggtaatctct

SEQ ID NO: 1759 - DNA, 500 bp, Zea mays
attgggcgatgcctagacgcgagcgtgtgcaacccggttgacgtcagacgagccaagcacgctggatgggcctaaggcgttcggcgaaatgcctcccgaagagcgcactgtgtgccagaccggcatagcttcttcgtttcgttgcacattaatctgatctttgatgcaattaggagagattttattatccaagattctgaaggtcagacatttgcttgtacctttccagtatgaatggatattctcgaagatggaaaatattctcgaagatagaaagtatgagttaatattcatcgacacatatacatacatacgtttacatgaatctgattttattagattctctaagcaagaggattatgattctattttgttcttagccctagaaagtttgtgatttttattaatattgtggaccttacagcctttgcacatggtcagtctcttgtgtatgccctgttggttttaattcagtattgacagatacttggattgctgct

SEQ ID NO: 1760 - DNA, 459 bp, Zea mays
gcagcttaactgcatacagctagcccgacgtacaggcgtggtttcagttctgacgcttcttcgattcctgttctccaccgtctccagggccgttgcccaaggtggagtgcgcgcgggtcttcggcgtccgcggctgcagcatctgcctcaacgttttcgacagcagcgccgccgtcagataccaccgtgcggcctgccagtactctcgtgctgctccggtatgatgcgtggtcacgcctgatcacttgagagctcgatcggatgcattggcttccatcgccttttgcctactagctagctagattctgatattgtttcccactccaccatcgtggtcccagatgcccaggggcggtggcatgactggccgcgcggtcgccttggcttgcaagatggtagggggagggagcgacggctccatggacctttgtgcgagggtgtgcctcgttggagaagatg

SEQ ID NO: 1761 - DNA, 300 bp, Zea mays
tatcgttcgctaaaatttctcgtccagcaaacctgggggactggtaagcgatcgcaatacactgtttcactcggcgcgcgtccttctgttcactcccgcgcaaccgaaggtagaagaagacgtggagtcgccgagccgacgcagcttcgccaccaactccgcgacgttcgacgctggccaccgccgtgcgcagggcagcgaccttcctcctgcgctccttctccgacgaacgtactcctccggcgaacgtactcctgcgctctctctctccgacgagccatgccgctcggcaaccgatat

SEQ ID NO: 1762 - DNA, 525 bp, Zea mays
tccttcctcctgagattcgagtcagggaaattagtgcagcacgtcctgaattccatgctcgctcatccacaaagagcaaagtctatcgctacaagatctataatgaagcaatcatggatccctttcataatcactatgcttatcatagtgcttataaacttaatccccatgccatgcaggaggctgcaaattattttgttggaatccatgacttcacgtcttttgctaatgctgcacataatgacggtgagcgcaggcccacaaagaagataacacgttttgatgttactgaaatggtaattgatttccaaaccaaaatgtttttattacttcttttttcacactgggtgtgctgttcagtattggttttatacttttatctttacacattggccagcttccatttggtgttcgttgaggttgacatggtatttcttttttgttcgtatactctacagggtgctgtcttacagctcgaggttgaaggcaccggttttctgtacagacaagtgaggaacatggtta

SEQ ID NO: 1763 - DNA, 533 bp, Zea mays
ccttgctcgccaggacgaagacgtccttgcggctgtcctccccgaacgagaagacgtacccgagcagcgggtccgtgctcccggcgacggactcgcagccgatcggggaggccttggagcagctcaccggcttcacggccgacgtgtagttcccgctcccctctggggcctccgtgcccgtccacatcagcgatgagtacaggtcggtgtagaggtacctggcagagaatatatatggggaaaaaaatttaagaaatatatgtatgcaggtgctttgctgggcactagctgcagatgtaccttccgtacaagcaggggtcagcggaacctcggtacacatatccgcctgtgatcgatgctgacccgatttccttgttcacagcagaatggtcgtagcccatgacggggaagattgcgtttatggactcgggcgaagtgttccctccaggcgatttttgcgggtgaaagatgtatggcccctcgtatacacgccatccgtagtttccacccttggtgactaaatctacctcttc

SEQ ID NO: 1764 - DNA, 538 bp, Zea mays
gcagcatggttgttgattgaaatggtcaacgatagtaatacgaaggagaaattgaggaaacttcctgtgttgtctctgggaaggatggctaaatcttcttccctcccagattcaagaaccatatgcaacgaacagggatcagttgaaaacgcaacagagacactcgaattattcaaagtgcagttgaagaggcagaagaatggtggcactgaaggatcattcagtacgagcaccccaaagaaacatgacaggtggtccatagcaaaatcatggactccctgtccaataggaacagcaccctgttcatttagttcatgtgctgttcttcctgcctttgacagcatcggtcatgaacaaaattctacattagaacatgggacctttgaggaggtgatcattctggaaacagctcatctccattcaactcgtgtattgggaacttttggatatcatgcacctgagtaattgtttaatactcttattcatgataattatcttctgccacattcattttcatttttttacacttgactgcaac

SEQ ID NO: 1765 - DNA, 830 bp, Zea mays
  misc_feature (783)..(790): n is a, c, g, or t
  misc_feature (796)..(800): n is a, c, g, or t
  misc_feature (814)..(822): n is a, c, g, or t
gggcagcgagatcaagcggctcaagctatcaggtgtggaggtctgtctggcttggtggctttggagttcaaaaatcgaagcatggtctagtaacttgttgaagggagtatggcttctaacccccctcaccaatttataatttttgcagatcacaaatacggtgtccacccctgaaattgctttctcgggggatacaacagcagatttcattcttgatccggataatgcagatgtgctgcaggcaaaaattcttgttgtcgaggtattttgtcatcacttgtcgctttacagctaagttctcagtttgcaacatgtcaccaattgtgtggcattaacaagcaagtcaacatacttagaaacacattctattccactgctgaatgttttatcttctgtagcctttcccctttaacctagtgaatgtgctgtgtcaatttcagagtacctttctagacgactcaatttcagttgagcatgcaagagaatatgggcacacacatttatttgaggtatctgatttaagtttttatttgaggtatcccaaacttgtttattcaactttcaaaatgtcaaattgtatgtacctacccttggaaacacagataacaagtcagaccgacaagcttcaaaacaaagctattctactgatccacttttctgctcgttatactacagaggtgggctgatacctaaccattttttcagttctatccattgaaatgctatggctgcctgcattttttggttttcgattatttaattccattttgactacttctatgnnnnnnnnctatcnnnnntccattcatacttnnnnnnnnncacttcca

SEQ ID NO: 1766 - DNA, 302 bp, Zea mays
ggggagtccctgatgaagccgcagactatagcttcatgttccctctctggtcccgggtgtccatctactggcacaaacggtggcgtctccctgaggagtggagggattcttgaaaaatctgaagttcttttagaataattcaagatgtggtacattgatagataccaaagtatcgacatacgacacgtcggtctacactgtataggtcagatgtagatgcagggtttgtaaatgtgcagtttttggagtttgcactgaaatcagataaaactttgtggccttttgggcgaggtgttgtggag

SEQ ID NO: 1767 - DNA, 358 bp, Zea mays
acggcgtcgccgagttggtggccgccattgtgtccccgacgacgacgaacactgtctgccgccgccctcttcacctccatcggattgtcatctccaccggcctcctcgcgctggtcctccgatcctctgatgtctcctcgcgcggtcgcgcccgtcctccaatgcccgactccgtcgtcctcgccactgacccatccacaggtaaagcctttatcccaatattaattcgtatcctgcaccaaggagttgctgtgcgcttgattcgccgcatctgagtgtcacggccacgactgcgcgccctccaatcctccatcgcctcccgtcgccgccgcacagttgcgataggcatcgaccctgc

SEQ ID NO: 1768 - DNA, 375 bp, Zea mays
gtcggcgtcgacggcatggaccggaacctgagtgggttcctgatcgggtgcgtgggcaccgccgtgacgctgctggcgtaccagcagacggcggtgaccagcacgcagtgcgtcgccgcgggcttcgtcgtcatcctcttcgccctcttcgtcaaggaaggtttcctttccctctgaatctctgatgcgccccagccatgcgtgactcgggagtcaggaggcatcatcgctcttcgtcttcgtctccgctgcttgtacttctacttgctagttcagtcccgcagctgccgctgtgctcctcaggttcttggaaaaacactgtgatgttaacatttatgtagtgcttggttgagccatgtgacatgaataattgtt

SEQ ID NO: 1769 - DNA, 752 bp, Zea mays
tgggagtcagaagcgtcatccttccacgacgacaggagggtggctacgccgatggctctcaagcgcatgcaagccttgcaggacaagtgagtagatggccgaaatgcatctaacagaatgaaaattgctggatgcctgcttctttttaaattctacggtgtgatactggatcaagaaatcaacatcatatccacctgactgtgctttcccttgttgtagaattgaacaaggtatccataacactgaacgagtaagggacagtgcaggcggaaggtacaaggatcttaagataccatgggaatggatgctcgactctggagtcataagccaagtacgcattcctaaactcctttcgctcacaataaaggagatgcattttagcatttcacaaagtatggagtccaaatacaaatagtagaaacaaaacatgacacatggtgcatgcccatcctacactaaacagctgaagatggcttccttgaagcttgcaaaagagtacatgaaccgcatcgcgaacactctgaagtcagatccatttgcgaacgacgaggggctacttctgcaaggcgtccgctttgccttccgcgtacaccaggtaacctgctccgaaccacggattattacttggcaacgacacatttgcatagactgattaactgactgcaccgtccgagacaaaaacttgcagcttgctggtggctttgacgaaggatgcagaaaggcgtttcaagagctaaaaacttacgcaagca

SEQ ID NO: 1770 - DNA, 399 bp, Zea mays
tttcgctcggggttccgtcgaggaggcttacagtggcgcccttctcggtggcccttactcgcgacggtggcggcagccttgatgcgtacggaggccgcggcacggtggccaggccgcagcacggccgtgcgggcgtggcgcaaggagagaaaggtggcagctctcgtacgcggggcagatggctggtgtgcgaggccagacgtgatcaacttcatcaatctgagagcaaacgctctctcttgtgaagaactcgatctagatctgtcctaggcttctggaacatagtggctgtctaaaccctagaaacgactaattgattattagttagttgggtttaggtgtggagggattaactttaatcttgaaaccagctgtaaaattaaccaggacagaccttcg

SEQ ID NO: 1771 - DNA, 1270 bp, Zea mays
  misc_feature (603)..(609): n is a, c, g, or t
  misc_feature (613)..(615): n is a, c, g, or t
  misc_feature (617)..(632): n is a, c, g, or t
  misc_feature (634)..(637): n is a, c, g, or t
  misc_feature (640)..(656): n is a, c, g, or t
  misc_feature (658)..(658): n is a, c, g, or t
  misc_feature (660)..(668): n is a, c, g, or t
  misc_feature (671)..(671): n is a, c, g, or t
  misc_feature (673)..(673): n is a, c, g, or t
  misc_feature (686)..(686): n is a, c, g, or t
  misc_feature (690)..(695): n is a, c, g, or t
  misc_feature (699)..(703): n is a, c, g, or t
  misc_feature (705)..(719): n is a, c, g, or t
  misc_feature (722)..(722): n is a, c, g, or t
  misc_feature (727)..(728): n is a, c, g, or t
  misc_feature (730)..(737): n is a, c, g, or t
  misc_feature (739)..(741): n is a, c, g, or t
  misc_feature (750)..(754): n is a, c, g, or t
  misc_feature (756)..(770): n is a, c, g, or t
  misc_feature (775)..(777): n is a, c, g, or t
  misc_feature (780)..(786): n is a, c, g, or t
  misc_feature (788)..(795): n is a, c, g, or t
  misc_feature (797)..(800): n is a, c, g, or t
  misc_feature (803)..(818): n is a, c, g, or t
  misc_feature (821)..(828): n is a, c, g, or t
  misc_feature (832)..(834): n is a, c, g, or t
  misc_feature (839)..(858): n is a, c, g, or t
  misc_feature (862)..(868): n is a, c, g, or t
  misc_feature (871)..(873): n is a, c, g, or t
  misc_feature (875)..(881): n is a, c, g, or t
  misc_feature (883)..(894): n is a, c, g, or t
  misc_feature (897)..(898): n is a, c, g, or t
  misc_feature (902)..(911): n is a, c, g, or t
  misc_feature (916)..(927): n is a, c, g, or t
  misc_feature (929)..(929): n is a, c, g, or t
  misc_feature (931)..(940): n is a, c, g, or t
  misc_feature (943)..(943): n is a, c, g, or t
  misc_feature (945)..(950): n is a, c, g, or t
  misc_feature (959)..(972): n is a, c, g, or t
  misc_feature (976)..(986): n is a, c, g, or t
  misc_feature (992)..(1000): n is a, c, g, or t
  misc_feature (1002)..(1006): n is a, c, g, or t
  misc_feature (1008)..(1012): n is a, c, g, or t
  misc_feature (1015)..(1020): n is a, c, g, or t
  misc_feature (1025)..(1027): n is a, c, g, or t
  misc_feature (1030)..(1035): n is a, c, g, or t
  misc_feature (1037)..(1041): n is a, c, g, or t
  misc_feature (1044)..(1046): n is a, c, g, or t
  misc_feature (1051)..(1059): n is a, c, g, or t
  misc_feature (1061)..(1076): n is a, c, g, or t
  misc_feature (1078)..(1083): n is a, c, g, or t
  misc_feature (1085)..(1098): n is a, c, g, or t
  misc_feature (1106)..(1109): n is a, c, g, or t
  misc_feature (1111)..(1113): n is a, c, g, or t
  misc_feature (1115)..(1124): n is a, c, g, or t
  misc_feature (1126)..(1126): n is a, c, g, or t
  misc_feature (1131)..(1148): n is a, c, g, or t
  misc_feature (1150)..(1152): n is a, c, g, or t
  misc_feature (1157)..(1160): n is a, c, g, or t
  misc_feature (1163)..(1168): n is a, c, g, or t
  misc_feature (1175)..(1175): n is a, c, g, or t
  misc_feature (1179)..(1188): n is a, c, g, or t
  misc_feature (1194)..(1195): n is a, c, g, or t
  misc_feature (1197)..(1203): n is a, c, g, or t
  misc_feature (1206)..(1209): n is a, c, g, or t
  misc_feature (1211)..(1215): n is a, c, g, or t
  misc_feature (1218)..(1224): n is a, c, g, or t
  misc_feature (1232)..(1232): n is a, c, g, or t
  misc_feature (1234)..(1236): n is a, c, g, or t
  misc_feature (1238)..(1238): n is a, c, g, or t
  misc_feature (1241)..(1265): n is a, c, g, or t
gccattcatgctattgaggttagtattacaaaacacatgcaactcctatgcagtttgatcatcgggaccaatttgtccacataggattataacctacttacacaaaacttaagaaacacatgtttcttgtcggatttatttattttttataatctgtcgcatgtaggcatctatgcctgaggcagcttttactggttcttggatgaagtctgctcacaagctgtgggttaagcggctgcgacgaacgtcatcattgccagagcttttgcaggtcagtaaaagattttcaggtctttatttttgttttttaatacctgaaccttctattccagtaatgtttttagaaccttctattccagtaatatttttagtttctactgccttttcttttaccatgcttatgttcccctgcaggttcttgtcgattttgtaggggcaatggatgttgattggttgtacaaaagttcatctgcgagattgagaacaaatctggatgacatcattgtcgactttcagacaatgccacaaacaacatcagcagttgcacttacaaaatcgacaagaacctgcaggggaacataagcatggtaaaagaaaaggcannnnnnncaannnannnnnnnnnnnnnnnnannnnaannnnnnnnnnnnnnnnncnannnnnnnnnaanancacaaaacaacanaaannnnnncacnnnnncnnnnnnnnnnnnnnncanaaccnncnnnnnnnncnnnacccccacnnnnncnnnnnnnnnnnnnnnacaannnacnnnnnnncnnnnnnnncnnnnaannnnnnnnnnnnnnnnaannnnnnnnacannnaaaannnnnnnnnnnnnnnnnnnncccnnnnnnncannnannnnnnnannnnnnnnnnnnacnncacnnnnnnnnnnacaannnnnnnnnnnnancnnnnnnnnnnccncnnnnnncccaccacnnnnnnnnnnnnnnaaannnnnnnnnnnccccannnnnnnnncnnnnncnnnnnccnnnnnnaccannnacnnnnnncnnnnnacnnnacaannnnnnnnnannnnnnnnnnnnnnnncnnnnnnannnnnnnnnnnnnnacacacannnnannncnnnnnnnnnncncaacnnnnnnnnnnnnnnnnnncnnncaaannnnacnnnnnnaaacacncacnnnnnnnnnnacccannannnnnnnacnnnncnnnnnaannnnnnncccccacnannnanaannnnnnnnnnnnnnnnnnnnnnnnnaaaac

SEQ ID NO: 1772 - DNA, 381 bp, Zea mays
ttcgtccatggaagttgtagactatctaattgcaaagaagaaagattctgaccttgaaaaggacttgaagaaagaggagaggtgcaataaagcctttgctctacaagaagaaaggatcaaattggacaaagaaaagtttgcgttccaaagacagctcgaagaggacagaataattggtttggaccttagcaccatgaactataaacaacagcagtattatgaagatcgtcagaacgagattcttgcaagacgtttcaatatctagaattttctagttttagttaagtatgctttgtcaacaaacttgttttagttcaacatttcatctaagtaccatcttgttcaagtttcagtttgtaatggtttaaaggtcatgaatca

SEQ ID NO: 1773 - DNA, 385 bp, Zea mays
ctctccgagtccgacggccggccccggaccctggtgctggccacgttctcgccggcgcacttcgacggcagcccgatcgacagccccacggcctgcaccaggatggagccgtacagggaaggcgagaaggaggtggcgtggatctgcaaggaggtcagggacatcgtgtacgacgaggcggaggccgccagggcgaggggcgccagcgcgacaagggtcgaggtgctcgacgtcacgaagctggccaccatgcgcccagacgggcaccccggcgtgtacatgaaccgcgaccccttcaagcacggcgtgccggataagatctactccgactgcctccatttctgcctgcccgggcctgtcgacaccttcaacgagatattactga

SEQ ID NO: 1774 - DNA, 353 bp, Zea mays
tcaccagccatgtagttgctgggttttcctgcttgcatgctgcaacagcttcacattattgaagaaaccgatgaggcttctgtggaattatgagctgagatgaacctggcaagcattggaatctggtttcagaatgctctaattttgaagattaacttgtgttccattttaagcgtgtagtaagatgcaaggaagccctttacttctgttcataggttgcaatcagttttgtgtgctccaaaggtaatatttgattgccacagttgcagggattcaataaatccacgagttagaaatgaccatttgatgatgaataagaatgaatgtctgccttgtgctattggatatggata

SEQ ID NO: 1775 - DNA, 366 bp, Zea mays
ctcctgtccgtctgggggcaaggaaagcccgctggcgcgaggcttcaacagcgtgttgtggccgtcggcaagcagcaaaatcaatggcttcgtggcgatgaaacttgaaatggaataatggaggcacaaatttgtggaggtccaacggcgacggactcaaccttcctctactcttaggctctaggcgataggcaaggtgtgttggacagtgtcgtccaccaatggtagacattgctaatgttgatttcgattccatgtcagaagtaccttactcatctagtgaagacccatacattgagtaggatcaatctgcgagtggcaacccatttgttaatggtatgtgaatcaaatgcttatgaatggaat

SEQ ID NO: 1776 - DNA, 660 bp, Zea mays
gccctgagataattcaggtttgcatgacttcatctctactcaggatttctgtttcatttgtaactggttcctgaatgtatgctctttatgtcagggaattgcaattgctgttaaagctggattgacgaagcaagattttgatgccaccattggcattcaccccacatccgctgaggaattcgtcacaatgaggagcccgactagaaaaattcgaaaaagttctacagatcaggtccacaatgccatttggaaatgaaatctttccttggtttactggcatatttactaggaaatataagttctgagaataatttgctttaaagtagaattattgtttgtgcttgtcttttatatgtttgatcacatcattacacctccccccttccaatttcaggtagaatctaaagatgaggttgtaagtaagcagtagatagcattttttcctaggaggtaagcaatttcttcttggcgtgcacatttatgtttaggcagtgctacattgtcctaaaacttgtttctattaaaacaatttatcacatggattgatgaattttatttaactgatggggctattgctatgaactctttgatcttttacactactaatttgagtagcaaaacccacttaaaagccatcctgaatgacacccaactataggg

SEQ ID NO: 1777 - DNA, 460 bp, Zea mays
cgtctatctgacatatgcatgtgtccattgccattcttcatgtttgttgaccttttaggtgtgggaccaaagccttcagcggaacccatgtctatacagcggtacaaagtttcgggtatgtatttttagctctaccttggtatgctcgtttttttctgctccgttgatacttgaagtcttgaagatgctacaatttactggtaaacacgtatttaactaaagaaaactggaagcttcttgcatgttaagtgatttggtgcatgctttatagaaagacaatctctctgtatatgtatctgttctactgcattcaccagcaggtagtagagtgtaaatactgacaacaatcaagaatttcagtatggaggaaatgccttgcactacaaagatgactcagatcatgatcttgagtactgtgtctcacttcatttgggtctcacagactacaggacatttgtgg

SEQ ID NO: 1778 - DNA, 448 bp, Zea mays
tccttgctcgcctctgctcgcgctcagaactcccatggccggcgcttggcctcagctcgccacgcccctcagctcgcctgcgtgtttctctactcgccgacgcaaccttcctgctgccgcgctcggtcttcgtctctgtcgcgccgatctgcgctcgtccgaggccgtcgaacccgctcagctccttactcgccacggccctagtcatcgcatcgctgtgcgcagcggtggcgtggtgggtattgatcgcgagcatggtcgggcgacgcgagatctgggcacgccgtcatttcattatgacgagcgtcgtgccttttgtgccagtcgtcgatttcctattcaccacaacgccgtcgtcccctgccgtttcccggatgtcgtgctcgttgtggccggctctggtggtcggcatcgtcgaccgtcaattctgtcaatagccacgttcata

SEQ ID NO: 1779 - DNA, 365 bp, Zea mays
ggcggcggcatggaccggaacctgagcgggtttctgatcgggtgcctgggcgccgccgtgacgctgctggcgtaccagcagacggtggtgaccagcacgcagagcgtcgcggcgggcttcgtcgtcatcctcttcgccctcttcgtcaaggaaggattcatttccctctgaatctctggtgcgcgtcagccagccatgcatgaggaggcgtcatcgctccgctgcctgtatttctgctcgctagttcagtcccgcagctgccgctgtgctcgtcaggttcttggaaaaatactgtaatagcgtagtgacttttatgtacgacacggatggttgttgctggctgaagggtctactctgtcgaaata

SEQ ID NO: 1780 - DNA, 755 bp, Zea mays
ggtaaacacatttatattaattggctcgctctattatagcatcttaaatgcgtgcatatatgttttaaagagtggtacgaaccaacaacttatccagaattccagatgacttgcggacttgaagccctaacccagtagggccataccgctccattcaattcctaatatgtgagacatggatttgcgctatgacatacttagggactaaaatggaataaaatggagggactaaaaattagtccctagaaaccaaacatccctttgggcatgagtttttttgggtgaaggacagctatgtttttttatgacactagaaaatggctcttggacataaagaatattcataaataaatgtattgacttgatatgatttcgtattttaatcagtcagcattcttgcttgcttaattctctagtaagaagcatgattaatacaccgtttcattctagactatcttttagagttcagttattagcgtctgtatgttctttgaacgaaaattatgtctatatgtttggcagatcataaaaaaactgagtgagttagatgagctgtcccggacaatctttttggtgtgtgaagaggaggcagaacttgcattggttgcagcaaaaagtggcatcaaaacattcagcagtgactggttcatgagctgtgtcatgaaacaggaacttgaccttgaggcccctcagtttattgtatctctatgatgtacctacagttcaagtcctcctaactcctaattatctcttcc

SEQ ID NO: 1781 - DNA, 375 bp, Zea mays
  misc_feature (8)..(8): n is a, c, g, or t
tctctcancgagcagcaagcgcagggagcagcagctttcccagcgccccctctctcccatggctgagcagcagctctgctcgccccctcccatggcgcctccacctccctgcgtgctctctcctcgctccttggcgcagcagcaaattaccatggtgcctccctctgctgtccacgaagagcagcccagcagccaagcgccccactgttgaagctccctggatggcgcccagaatttcagcagagagcttcttctccatggccagccgcccctctgttgctgccgagctccagctctggccagcagccacggcgccgaggattacctgcaggcgagcagctcggcccttcttccctgcgcccagctattctccct

SEQ ID NO: 1782 - DNA, 327 bp, Zea mays
ctgacgcctcacacttcgccgcccactgccccctccaccccggtcgtctacgcccatctaccgcccttagccccattcgtcgctacccgctccctcccaactccctccgaggctgatctgtgtccccgccaacaaacttgtgttgcatcccgtcgtcgaccctgctcgccgtcatcgtatttttgtctgatactgaattagctgtgatttggttcttttacttgttttcctttgtcgaatcaggaaaagagggaggaatacttgtgaatgcaacccttctatctacattagatggtgccgtgaattagcaatgattgcaatctatct

SEQ ID NO: 1783 - DNA, 369 bp, Zea mays
agggagcggatctggtgatccgtggtaacgtaattctcaacacttttcacactcctcgatgtgtgtttgctgccaatcatccaccctctgtctcgcgcggtacgcccttgcatcaatggacgagcctcgagccctcgaccgacgagttgaaccaggcggtccaggcggaggcgggcgaccagccctctccgcgcggacgtctccggtcggggacgaccatctctggaccggatccgacgccgcatcgtcctccgccgatgcgggcagggcccagaatgtgtggtcgtcgtgattccagttaataatgtatcgccatgtatgttttaagtttattatcaatgccacgttggtgtatgagtctatatcgac

SEQ ID NO: 1784 - DNA, 442 bp, Zea mays
aatgttgagcaagatcattttaatcatttgcacatttggtatgtagaaaatgaagtgggcgtatattcctaaagaagccaagttactctatggacaagcaaaagatgattgtcgcagctaccacgtgcctgcataactaatacatccatgagaacgatcaagaagactatgaacacaaggttgatatgtgcacttgttgtttgggttgtgatgagttattgtcaacaagtagtggcttgggttcagtcgcgtggactaatcggggcatgagtgtgtgttatgcaaccatgtttcttcgctagcttgtggtgtgcaggtgtgcagttaggagacgatagtcgatagcgaaggtgaaggtcatgcgagttcgtgtcgatggaccgagagcggtgaaggacgagtgccgagtcatgactgagggactagagaagctgggtgacta

SEQ ID NO: 1785 - DNA, 329 bp, Zea mays
ggcggcggcagcggcagtgacggcggatcgtcggcggcgccggcgccggcgtgatgatcgatctctgcactgcagccttttgattgcattggtctgcatgcgtgatctgtttgagcttgttttgatcgcgttcctttttcttgaggtatatcgattggttgtgtacttgtgtgtgttgattcttgtcgtggattccagttgttgatttctcctttttcggtctctttccgagtttgtttctatatttgaattaacgggttttcaaattatggaaaaaggaccatatgtgaaacacaactgtaaacagagaagatgatctgtaaggctat

SEQ ID NO: 1786 - DNA, 419 bp, Zea mays
tgcacgagcaaggttttgttctggacattggcagctgcaatgagatgctagagggactctgcagttcaggagaggttcgcaaggcgaacaacctgctgacggcaatgatggacaaaggacttcttcctgataaggatacatacttgagccttattaatggatatggtaaggttggtgattcccaatgtattgtcaacatctaccatgagatggaacacagaaggcttgatcccggtgttgaggtttttaccgccttgatcaagggtctttgccggtgtggaaatctgaaggaagctgagaagctctttgcggcgatgaagaagaaaacgttggcttcgactagtgacttgtatgatatgcttatcagctgttactgtgagaagcgcaatgctaaaagggcacttcggttgtatgataag

SEQ ID NO: 1787 - DNA, 353 bp, Zea mays
aagctatttattcttatttcagtgaagggcctcataatcattccacgttttgacactggagtatgtccattttttctactattgttgaagtcttaggtacatttgcggtcaattgtccttcctaattttagtgacattacattctctttgaaacaatatcctgaaaatttgatttcatatttcatacgtgaggtgttttaactattgtagcattgatttcccccagtgcacctgataggctatcatcattggccttagagatatcttcaattagatgtgaagaagggcatgaccaaaacagcaacaaagataactgttggggaccttcggcttccgaagctcttcaaaaacat

SEQ ID NO: 1788 - DNA, 461 bp, Zea mays
  misc_feature (447)..(452): n is a, c, g, or t
agagccagaggcaaaggaaaagaaaaaaatgagtgggcggaagagttgaagtttgatccagtacactgcaaatgtggtattgaagctaagtatgaattagttccttccgaccttggtgttagctatttttgtggacatatggtagattacgatgaggttggtatttattttttgtttgcatcagctgcaatgttgcacccgtacttactctattttttgtaggagacgaggaaatgtggttaagagagttacgacgacaaaggagaggtgatgcgtacaataaagtccaagagactaatgggacagaagatgcgttgtggatctcagctcgtcgattcttacattaacgatcgcatacaggacatgcttaggttcgcaaaatcaatgagttttggcagcccgatgcgtgcagagcagaggagattgaaggcggcaaatgagaagagnnnnnnggatgtaag

SEQ ID NO: 1789 - DNA, 360 bp, Zea mays
tttttcttaaacttccatccgttgcccattttaaattttggttacaacagtgagtcttcaaataatacacagtttttttatacaagaattggcaacaaaagttttaaaaatctacaaactttcttaaaattaaaaatcgaaaacaggtgtaccagcgttatcggccgacgctgattagcgattattatgtatccggtcgataagctggaatggataagccgttcggtttcgtgaccctttgccttgcctgacagcaagctgcgactgcgagggaggcaagcggagacggggccgccctgggtagtcgctcgtcgggatgggattgtaggcgcacgccggatcagactggagagaaattgg

SEQ ID NO: 1790 - DNA, 852 bp, Zea mays
tggtaccagagttcattgtatttgcctaagaaagagatacttgcttctccctcccattcttcttcttctcctctttgtaattgcagctctgaaccgtgtcctgcaaaactttgtgcatttaatcatgctcttcaaaagtgcattaacttgctatttgattctatgtttacatgaaatttacatgtatctaatcgagtctcatctaaaacaatgagtggtttcaatttattttagcctcgttgcttttttcaccttccagactgaagttggggtcacattgactccgccaactggtaaggagagagctgaaggatggacagggcttcaaggggttcgcgagttgaagataaaatatgaggaacgtgacaggtaatgtttgcaagtaatggtgatgccatagctttactcatcattcgtttatatggtaaaaaaactgcatggttcttcttttactgtgaagatgggcagtatcttgtccggataacaagtgaaatgggagtaattgcatttttgtataatactaatttaaggtgctgattcgatgattaatgggtttaaggacttggtctgtaacaatgtcatgcaggcctgcctgtgacatcgcgatctctgggcttgggtggatttctgtggagccatcaggtgtgccttcaaacagcgctgaggaagtttatgatggcggtgagctgcatctggtggtacatgtgcccaaaccggttgaggtcttcatgcgtcctccattacctgtcggcaaagcagcgtcgcaatggtaccggtatcaagagctgacagaggaagaagaggagctgaggcctaaatggcattactgatgctgctctgtttctctagggc

SEQ ID NO: 1791 - DNA, 374 bp, Zea mays
gaagctgctgagaaaattctccagacttacaatggcacacagatgcctggaactgaacacacattcagattgaattgggcctctttcagctctggtgagaggcgccctgatccaggatctgatcattcgattttcgtaggggacctggcacctgatgtcacagattacttactacaggaaacattccgagtgaactattcatctgttagaggtgctaaggttgtcacggatccaaataccgggagatctaaaggatatggatttgtaaagttcgcagatgaaaatgaaaagaaccgtgcaatgacagaaatgaatggtgtgtactgttcaacgagacctatgcggataagtgctgcaatacctaagaaatccac

SEQ ID NO: 1792 - DNA, 263 bp, Zea mays
tcctcctttaatttgctcatgccaagctcaactgcagctgttggcgggtgcacttgaaaacatgttcatattctttaatttttccacacgctgctgtcgagttgccattgccagtggaagccacgacgccgtgctgcctctttgtgcgtcaaccatcggcttctgtagcatatatagcttgatttgctatgttctcttctctgatgcagtagtatagtagtacatctggccaagctaggccaactgaatgactgaacctcgga

SEQ ID NO: 1793 - DNA, 371 bp, Zea mays
tgtctgcttctcctgagttgcggttgaaatctagaaccattcaaaatggcaatgatggcactgaagctcctcagatcaatctgttcccttcaaaacagtagagtttgtaacaggacaccctgaaagtcggatcaggtataaatgaggctatgcacccaggtgagcacaaagctcagaggtccatgtccctcccatggctatggaagtgcgtgcaacttggttttgcatatggatgatctggatcgattatgtttccagtgcttgacatgttgtaattttagccagaaagtaggtttgttcatgaaggacattcagttcaaatgtttgacctattgttaaggcaaggcattgttctctgcaacatgtggtgt

SEQ ID NO: 1794 - DNA, 372 bp, Zea mays
gagaagatggaggatttgacattgacagagagggcaataaaggggagtgccaatgttaagcatgctcctgctgacaatggtggtgtggaagaagaggaggtgaagaatttgagcaagggagaggaaactcaagtatatcaggaattgagggaaaaggtttcaccagggtcaaagcctgatggtgttggagaagtggaaaagaatgaaaaaagggaagctgttggtgccagtggagagagaggccatgttggggttggggagcccaaaggaagacacagattggagaatatgacactgggggagtggtttgttcagatcgagaaataccttctagcaaagaatgaagaagctgctgaaaaggcgatagctgaa

SEQ ID NO: 1795 - DNA, 413 bp, Zea mays
cgaggcaccatgaaatgatgtccatgatggatcacgagactgacgaggaagatgaagatgctgaaggtgatgagaatgtggaagaagatgatgcagaccacgcagttgacgatgccgatgttgagatggacgaaggtgatgatgaaattggtgatgacggagaggatggcggcgttggcggggagatgactccggatgaggatccagatgctacttcatattcatctgactacagcgaataagaaagcagaaataagtgaccttatcctagagatcctccctcagcgtccctttgtgaaccaaaaggaaaagctaaggagcgatagatgtgcatactgtttttttaggcaccgcaggttctaatagatttcctgacgtatgcctactcattcgatgagtggttgtatcttgct

SEQ ID NO: 1796 - DNA, 390 bp, Zea mays
cgctcgatgttatttgctttttataaataacatatgagctttcacatatttcaaaaaacatatattccattgtcttcttgtcttgaaatatgagtgatggaagagtatcaggtatgaagtttgctgcaaagctataatcagagaaggcgatggtacaattgaagtcgtccttgttgcaagaaacgccatcctagaggatttgaaggcagctaaataccaaaactaaatgtgatgcatgctgccacttgtgactaatatatgttttgcaggtagccaggtacgtcataataggaaaatgtattcatcagctgcaccacaaatttcataccaatgattagagagaagtgggataatggtcatcatctgccacctactggtttcagacttcca

SEQ ID NO: 1797 - DNA, 207 bp, Zea mays
ctgcaggacctcctcctgcgccagctccctaggggaccctagcagtttgcctgctggtggtcgttttggtcgggttgttgctatgtgtgcgtggcgtgttgtgttaatgtcagggggtctcgcctttgtattaggggttgacaagtcttgtctctcctatgtttttttcttcttaatataatgacacgcaactctcctgcatttgtt

SEQ ID NO: 1798 - DNA, 328 bp, Zea mays
tcctgatagcatcattactaatcctagttatttccaatctcatcgacttgggtaatgtggcccacgctgcggtctccatggtcaccatcttcatctactcctgctactttatcatggggtttgtccacatccccaacatcctatgcgcatagatctttctgactcgggttcacggcctctgcattgccatctatgccttgacattttgggctagagacatcgttgtcacctactaccatcgtatgatgctagatgctattggactagttgatgttttggcatatatgcagacgtatgcttggttgacttcatgtttgtctttctcaag

SEQ ID NO: 1799 - DNA, 360 bp, Zea mays
ccagctccagaccctcactgacccatcgatctacagcaacaatcccgggctctgtggacctcctctcaacccttgccaagacacgtcacgtgttcatgatgaaagagatgtcggaggataccgggacggggacccatggctgtactactgtgtgatcgctggagtcgtttctgggttctggctgtggtacgggatgctcttctccgttgcgaggttgaggtgctctgttttcttgtttgctgatcgggtacagtataaagttatgcagaagatgcggcctttcaatcattttgtttcgaaagagaagagcgatccatcgtctgtgcctatgttttctacaagtgatacaagctgaagaat

SEQ ID NO: 1800 - DNA, 372 bp, Zea mays
tgtatgatcaaggaatggtctacaccaatgtgtttgatgccaactttgatactcttgtctggtcattaaggaaagctggtgtgcccgacatgagaatcattgttggtgaagttggctggccatctgatggtgataagaatgctaacaccaaatatgcacagaggttctataatggttttctgaagaaaatgacaaaaaatgtcggcacgcctctgagacctggtcgtatggaagtttacctgtttgcgctgattgatgagaaccagaagagtgtcctgcctggacgctttgagcgtcactggggactattcacatatgatggaaaaccaaagttctctatggatctcagtggaaatggcaagggcagtgtag

SEQ ID NO: 1801 - DNA, 290 bp, Zea mays
ggacccatcaatggcgccatgaagtccgacggcgccccattgaacagccggccacccctccctctctctggccgactctccctcttccctcctgctctctataaaaggcagcagagcctctctcccttctcctgcctaccaagctcaccccatctctctagctcgccagtacactgctcgacgccgtcgtttgttgccgttcgtcgccggagttcacggagcccgtagttcgtcgccggagccacgcactcgccgtccgtagtcgagccctgctcttcacccggccgaaa

SEQ ID NO: 1802 - DNA, 152 bp, Zea mays
tctcccatggcgcctcctctccttcccttcctcgagcaagctctagtgagcgcgcagtgcagcaacaccttcttccccatggaagccggcgctccctgtccatggcgccatctcccagcagccactcccatggcgtgctgctccagtcggtc

SEQ ID NO: 1803 - DNA, 807 bp, Zea mays
ggatgctcacatgcagactttcagaggtaggtcaaacaagagcagaatcaatttcttcacttccatatgaagcatggctctttattttttttttcatttccaaaacaaactactagctaggatacttgatttattaattcacgattgaatttagagtacaccttggaatgaacctgtgtgctttgtttactgaaatttgctttttgttgacttgttgctacttgctagttatacaaatagattttaattatgtgcctttaaaaagcatggcttgacaaaaacattagcctatcaactaaaatccttatacatgttatctgcagacctgttgtcaaaagttgaagttgaaaagaagaaattgcttgagaagtacgaacatcatagtaagtagtaggaagacttgccaaaatttgtgcgatggactcttgtttacttgactatcatcgtcattctttcaaccagtgaaggaggagaccaacacattatcggaacttgacgaaacaatctcagagaaggtaacacatgcggaacattctatcagaagggtgaaccaggtacatcttgaacatatattccgttcgcagcgtatcttcctctgataacccaaatttcttgagctcgagattccggtactgattttacatttcaatttcattgcttcatctatgcaggatggcaagtcatttatcgtctttcgcaagtctactggcttgtttcttgattgtggatctgatgatgattttgaccttgatgagtggcgctgctaataataattcatataacagataaatggaagcccttagtctt

SEQ ID NO: 1804 - DNA, 678 bp, Zea mays
cttttcataatggtgttgattcttcttcggtaattaactaataatttgcctgtcttagtagtgtggccttttcatttatctgatgggaattgctacccttgtatagttaaacaacatcctctacaaaaaagttaaataactctgctgttggttggtctcaccttttgtggctgttgcgaaaacatactgcagtatctgccggtggcttcagcaatcatagttggtgggattaccgcgacaactttcactctcagtcaaggtctgcctgccttgctagtctccagagttctgaagttttgatagactgttcacatcagttgtgcttatattctctttgaaaaaaactgaattgcacagacagcaaaattttatatccattgtctcatctcatctgcagttggacggaacgcgcagcacttgatctcctccattatctgtgcgggcttaacagtcggagtagtagccttggtgaaagccaatgggaaacagttttgctctaggccccgtctgtgtggtctaatctaatccttggtcttttccccccttccctttcatattgccctttgttagaaattgaatgtaaaaggattagaatgttgttttattcgttgcaagagtaaggttaaataaggaggcaggatggcctgccggtcccgtaatctgaagctggctaatttg

SEQ ID NO: 1805 - DNA, 353 bp, Zea mays
atgatggtagttgagtagttcttcttgcctctcgatcttgggcattgatacttcgcccccttatatggtgcaaggtatccttcgtggttggggtaccctgagtcaacaacatcaaacttacctgcaacatattaatatgcaatgagcgcatacgaaccatatagtaatattttaagaataaacacttgtcatgtgaatttacctttcggtggatgaggaaacttgtcaccatatttgtctaaagcatcaccgaataccctcatgtccatcccacaaccacaaatgtaaatcttatatcaaagtcacatattgccacatattctgacttgagtaaccatgacgacccacatatt

SEQ ID NO: 1806 - DNA, 336 bp, Zea mays
accccaggccggacgcgcgttagagtctccaaagcttatccttccatccactccccgcagccagcttctcttctcgttcccggttatattaataacgcggcggcgtgctctgcttcctccggtttgctctgccctgcttcctaaacacaaacgcgctctgcaccaagaactatatacaacgtagaaactagccgcgccgtcactcccttttgtggcaacctgcagcacgcacttgctgagacaggggtagccttgctataggctagctagtgtcacttgccgaggacaagcaagcaggccggggagacatggcactgacagtgttcgagaccacca

SEQ ID NO: 1807 - DNA, 567 bp, Zea mays
tggcttcggtcctccgttggatcctctgagaaagaatacgagcaaactcagcaaaagatatctgagctgagagcgttactggagcacgagaggttaggcttctgttgcaagttaatcttgcaatgccgctgtctctcgaaatttgcttgttacctttacttttttcaggagtgagaggcggcggcttgaagaacaatatgaagaggtgaaaaatgaagttatggagctgacctctgagactgaagagactactgtccggaaacttgaggatgaaataaaagaatgcaagggtattctcaagtgtggtgtatgctttgaccggcctaaagaggtaacatataatgtactgtacgtgtttctcaatcatgattttagaggtttacaccattcttagctccaccacgaagttcctgtttctttgttggatgatcaattttgccgcctaaactgacgaggattgtatttttctgtatattcgttgacaggttgtgatcaccaaatgtttccacctattctgctcgctatgcatccagagaaacctcgagattcgccaccgaaaatgtcctg

SEQ ID NO: 1808 - DNA, 401 bp, Zea mays
attttcactctgccatgcttggtattatttgttgtgctgctgcggtgcctggttgggatcttgtgaattttgtcttgcccttggagtctagatgttgtttttaattgctcttttgggtgggcgccgttgtccagaagaatcagctaaagttgatgatgttttggttggcgtcagactatgtgctgtccggatagttggctgttaaggatgtgaaaacgttcttgttagtttgcatatcgccttatatgagatgatgttagtatgtttcttagctggttatggtaaaagtcagtcagttttttttccttttcagagctttctcgatctggaaggattggctgctgaaatcgccatttcttgctgcgtgcttgcctggtctggttgtaacagtgatcgtgtac

SEQ ID NO: 1809 - DNA, 330 bp, Zea mays
gctgcctgtttctccaacaacacagtctgcgtgatggatttccggatgtagtccaaccagtagggtggtgcatatcaatcctaacacaaggctagatcataaatccgtcccatgcaaatttgtgaagagcggagttgttagcaaaatgtagatcctaggtggcttcaacttttgtccatgcacatttcgtttttcttggtcatacttaccttagagtagcaatgtagtagtggaaatgccttaacagggtttagtagcatggaaatgttttggtggtaaattaatgaattaatctgagatgtactagtttgtagtttgcacataccgtcg

SEQ ID NO: 1810 - DNA, 325 bp, Zea mays
atgggaatttcttgggcttagtagagatgttggctgaatttgatccaattattcaagagcatgtccgccgtattacaaatgaagaaactcaggttcattatcttggtcctaggattcagaatgagttgatacatttgcttgcttctgctattaagtccaaaattattaagaaaataaagagtgcaaagtatttctctgtcatacttgattgtaccccggatgcaagtcaccaagaacaaatgtctttaattataagatatgtggactcgtcgtcaggtcttgttcgcattgaagaatcctttctaggatttttagatgtaaatga

SEQ ID NO: 1811 - DNA, 528 bp, Zea mays
accaccgctcatctatcaagctagccacgccgccaaaacaaactagctagtgctcagctcagctcaggcaccaccacactagtagcaccagaagcgtgaccagctagctacagctcgctctcccatggccagcttcactgctcagctcagggacaagttcctcggcgtcatcgaccacatcaccggctggaccagcagcggcgtcgccaaggatacgccgccagaggagtccaccaagttacagtcacgcaccgtgcagcaggtataacagctgcagcatgtgcgagtggacagtcatctggtgcgattaattaattaagtaattaacaataacagccttgttgccggattatctgttcttgtttgcagcccgttgaggtccgatcgagaggtgacgaggaacccattgtgcaaaagggggacgaagcaggggcgaactgataccacccttgtctagaaatgtgtggctctactacggcgtgcatgtttgctgatgccctcaattctcttaatgttgcatccaccgta

SEQ ID NO: 1812 - DNA, 371 bp, Zea mays
attgcacgagaaagacgcaaaaatgggagacgccatactccctggtggcttgaatctgcctgttggtgggacaaacgatggcgagtactggattgatctccctgatgacgacaggaaggagctcgtcagagctggcaacctgaagagcgctgagctatacgctcatgtgaagccagctcatggagggaccttcactgacattgcaatgtgggtgttctgcccgttcaacgggcctgccaccatcaaggttgggtttgcgagtttcgctctgcagaaggtcggtaggcacattggagactgggagcacttcaccctccgagtgagcaacttctcaggtcagctgtcgtctatctacttctcgcagcacagaa

SEQ ID NO: 1813 - DNA, 444 bp, Zea mays
accccctcaacctgccataggtgaagaagctgatctcggagtgataatatttcttgcgatttatctttttctcccacatggcctgtgcttcctttcgatgaatcaaaaggattatacagatgcactgaatgaattgccacttcaataatgtgtgtcgttattattcatttttcttccaatctgtgcagaatatcagtttggtaacagtctggtttctgcattatgttgtaattagatttagttactacctggatgattactagtgcacttatgtatagccctgtaattctggaagtatatattattgtggaacaaagctgtatggatggtgctgacttctggtgaaaaagaatttcatctttttcattggtcgcagaggtggatcatatggatttgtattcaaggcacacatgactatatttttcattcggcactagttggtat

SEQ ID NO: 1814 - DNA, 648 bp, Zea mays
tggcgacgacgtcgacacgccgcactccgtccggcatccatatcctcctgtttccttctctccggtaatcttatttcctttctttggttatcgcgttctagggttctgcttcttggactcagcgattggggacttggggataggtttctgggcatcatactgcaaagttcttcatatctagtgctgatctgatttatcgtattgaggtttgagataagagaatgcctacgctttttcttttttgcgatcgaaatgcctacgcttttgtagaatctatcatggcataatatggtttactcagctttacgatagtttctgcaccctggtttgtctagttacccgagctggaagtctatacacacatagacggcataatatgcacatgaagttgatctaattaatgagtgcaaggaaagggaagcaatgcaactggcttgcttggacacctgctgcctgaatggttgtgtgcaacagctatgaagcctacagggtggtactcacagcattcactgcaatgataggatgacaggatcagaatgcatcatatggagtgctgatacatatgtagacttgccagatctttctgcacatcttactacgttttatgcatggtaacagctagtttcaaagaagaacaccagcaaagta

SEQ ID NO: 1815 - DNA, 212 bp, Zea mays
gtgcgcggggacggacggatgcggcgcctccctcgtgggcatagctggcaagttcttgccgggttttgtttcgtactactattcgtttcccccttgttctggcccgccggccggctgctcgtacgtttcgtttggttgccgacgagggtgacgacgatgcacgcagtttcagtgactacgtcccggcggccacaagttggaacaagaactgc

SEQ ID NO: 1816 - DNA, 400 bp, Zea mays
ccggcgggcgggagggctctttttattttgacccaccggaggacagccgccccatgggctggtcgcctgagcgcgctatgtatcagctcatcgaccggcggaaaggtactggttccatgtctccttgcttctctagatctggtgaattccgcgtagatctggtccggatggtacactgtgtcggttagttggtaattcactagtatcccgtcgcctgcatgctttgaaaaaagcccttcttttctcgccgctttaggttcgggtgaacgtcgtgagcgcgcaccgcatacgagagcaattaagcaaagcagctgcactctttgctcagatttttattgctatcttggctatgctcgagtgtaattattagtatgcttaagcctgttgttgcaagcaattg

SEQ ID NO: 1817 - DNA, 308 bp, Zea mays
cgatgcgcgggtcatcagtcttcgtcgtgccactgttccctgatccgcgctactccctggtcggtctcacgctcgcctttagcgtcgtggccgcacccaagttctttgaccccgttctagctgcaacgacctctcctatggggcatctcgtcgtcgtctggccatcagccttgatgtccattccactctccagtcaacctatggcggtagatgagagacctcggaagttggttagatgaagaaaagaaaagtaaagttcgtacaacgcccgtctggtgttcggcaaaatgagtggaccagtgcttgtc

SEQ ID NO: 1818 - DNA, 318 bp, Zea mays
ggaagggaaaggaagcagcaagcgctccgccgacctccccggtcgccgcaccgcttccctcccacgtcgcagacgccgcgcccgtcgcccgactcggaagaacggtcctggcccggcgctcgctcgcccgccgttagcttgtacccctcctgctcggatccaagaacgattccggtatccacggcggcggcggtgttcctgttgtcaccggcgcgtttcgtctcgtgcgtctcgttctgtaactggaaaagcagccgcatcattttctttttttactcttagttatttctgatttatttgggtcctgctctttctcat

SEQ ID NO: 1819 - DNA, 485 bp, Zea mays
aacatgttagatatcctgaccttacagaggcacttgaagcctggtgttatagatcgaaggttgctaaaagaaggctctctttcttgagcgacattggccaggtatcttgattcctgaccaattaacaattaaccgaagcggacatgagatatctgaattgaacaagtttgcatgctttctgctggggaaaatcatcaggttctgtgatcaccagcataaattttggaatttggaggcagtgcagaaaagggctcttgccaatattcgtatccatgacatgaatcctgataacaagtagccgaagcggggagggcctgttcggttgtttgggattggagccccgaattaattcctagccgaattacttatctaatttatatagattttaataagctggaatgaatcctggcttattccggtacaaccgaacgggcccttagtaaattacccagagtttgtctctatagattgcaggctaactttaa

SEQ ID NO: 1820 - DNA, 456 bp, Zea mays
  misc_feature (347)..(418): n is a, c, g, or t
  misc_feature (424)..(427): n is a, c, g, or t
  misc_feature (443)..(452): n is a, c, g, or t
atagtgggatgaaggttaattcaatagttgggcatgcaagtacaatgcggcccagctcatgggatgatcttgtagcactgaaggatgataagagtcaccacatatgttgtttctcttcacaccgtcaagattcatctgttaaaagtggagagcctatgaaagctgaaggggagatcaaggttgggattttggataagtcaactgctgataaggaaaataaaaaatggtataagaagccgccacgacctccaagatcacagactacttcaccattagaccctgctgatcagaagctcatcagtgcactatcggagcttgcggtgttaaagaaggctaggattgagcannnnnnnnnnnnnnnnnnnnnnnnnnnnnnnnnnnnnnnnnnnnnnnnnnnnnnnnnnnnnnnnnnnnnnnnttatannnntttttattttccttannnnnnnnnnactt

SEQ ID NO: 1821 - DNA, 350 bp, Zea mays
caaaatccttattaatagtccagttgagtatcctttcaagaaaggaagtccaggtgaaaatcctttcaaaacatgtagtccagttgaaaactccctcaaatttgcagctcaacgtgacagcccatctgagaagaggaaatcctgcatcagcaatccccttccgcccttccagcaggctgttcaatgcacaaagcaagtaggagttgcaggtcaaccctttgatattaaggaatattgcaaggaaatattgaggagcagaaatgacagtcaaggaggcgatccttttgctggttacaagagtatcttttcttttctatgatctgctgaacagctagcaaatatgatcctga

SEQ ID NO: 1822 - DNA, 402 bp, Zea mays
  misc_feature (337)..(339): n is a, c, g, or t
  misc_feature (381)..(390): n is a, c, g, or t
gcgtcatcgcatgaatccacgcagacaggacagaatcagggggccaatcggcggcgcgagcggaggcgtaccagtggtgagggccttgatcatgccggcgcggcggcctttgtagtcgcggaagacctcgtccgcggtgtgcgcggcgttgggcgccagcccagagcccccgccattcatcgggcgagcggcgcgtgggcaatggcagtcgctagggttccgggtcggggacgggctgcggcgggacgagagcagactgtcccgcggtgccggtggtggtggtagagagaacaggggaaggggaggagtgggtttataaactttatattttgctcgnnnagaatttcgtcggcgtttcgggggaggattttgagccctgtnnnnnnnnnncatcatgcttcc

SEQ ID NO: 1823 - DNA, 692 bp, Zea mays
tataaatccgtgcatttcagtttttgtttcttttttttcttctcctcatcatcatgaagtttttgtgcaattaggaatgctaatatccactcttcactagtatgacgagttctacattgacctgtggtgatcatttgacctgaatacttactttgtcctgagcttcccatctcctttacattatttggctggctgttccagtgtctgaaattcgcgttgaatatgccttgctaaacgcacgggcagttctgtactcaccaaagtatacggaaccctcgattcttacttcttaccgtcgtctgaaaattgcaaccggaatcaacacaggcagcccgaagacaggcctgccgggtgcaggaggtggccaggaaccgctgccagcagatgtttgcggatctaaactcccactgcagaatccccgtgagtagttgctatgccctgaggcctctgaatgacctagctggttcatggacgctaacctgtcgtttgaactcagggaccaagggttaggttcgccgaatacgtcgaggagaaggccgcgtcgtctccacgcaggagcagccggaggtgactggatttcaggaggtggcaggtgaactggcctgcccgatcgtgttgctgaattgttcggtacaataactaagtagtgctgcttggcgaaccatcacccttgtcactggtttgtgttggtt

SEQ ID NO: 1824 - DNA, 374 bp, Zea mays
cttgcaccgtcagttagggggttttcccaagctttcatttcccaagtttgacggcactagcccaaaattatggcagaaacgatgtgaggattattttgctatgtatgccagtgaaatcactgtttgggtcagagtagcgtccatgcactttgagggggttgctgggcgttggtttcagtctattgaaccacaagtgtcttcctggtcgtggcaacagttttgtcaagctgtgcacgatcgttttgggcgtgaacagcacgagcttgttattcgcaagctgttccatatccgtcagacatcttcggtccaggattatgttgatcgtttttgtgaacttattgatgtccttgtcacctatgagcacactacagatc

SEQ ID NO: 1825 - DNA, 1029 bp, Zea mays
ctcgttttgttctgtctctctttctcctcgctccctccgtcgatcctctgcagcttgcatcggtcgaccagcctagtcttccactgtaatcgcctctcattattctttctgccacgctcctcttcgtccttactccctccgtcttgtctatctgtagccacttcgtcttcctacgtttttgccaggttagaaaaaggcatgttttctttttccccgatactttgtccttctagcagatctagttccttctgcttcacatttattggatttgttagtcgcttcttacgattcgcatcttagatttttggattcgttgggcgccttaaaccgcgaccacatttctcctctaaggtctgtgtcttgtcttcggcgtgaaaagtgaatcaccccacctccaaaaaattactttgcccccccccatgttacagttaacgttcttcgctccttactctctgcgtgttatttcatatttacacagtacatggatgaatattctttcgaaaaaagatgttaagtaacttagtgactctccttaacactgtaggatttgaggctgtcatagtatgctctctgaccgtgctggcgggaggaaggaggtgtgtatatagttttcttgcattattttcctgtgattattctcatccctcctatatgttctttcagatgatttaagttctctgcgtttataaccaaaaagaggaggataatccaatcatggtaactaaatagtaggtagtaatgtttcacggtaaatcacagtgctcgaatgcgatatgatctttgactcggagtattgaagactaatttagtttgagtttgagattagttgtttttgtcattaataaactcacattggcgtctggttacgagctcactactagattttagatctccagttttggtgtacttttgctgcatgtgcctcccagagttgcagatttgcaggtagcacctgattcctttttatttttggattgagatacagtgaaatttatatttacctgttcccaccataatgtagcatacagg

SEQ ID NO: 1826 - DNA, 414 bp, Zea mays
agcttgttgtccagaacatcggcttactccgcgcgttcaagaagtaaggcaacgagggctctgtccatcttggatttttggtgcctgtaatagacatctctctgtttatagtaactcaattattgagctcaaataagacgagtagttctagcatagtagcacccccacccacacatacagatcataatggctccacacacacacagacacattccatgcatagcttgattaattattctacatttctacttgtagtttgcaccttcttgttctctgcgtcaatgcatacagtctgatctctgtcaacctggttctttctcccttccagtttgcatcttctgtgattgagtgctacctgaatagctcaagatgacagttttagtgtcatcagttaggtgttagttgtgtcatcag

SEQ ID NO: 1827 - DNA, 437 bp, Zea mays
aagggttgattctgtggtctgggttgcatccatctctggcaacttgggaggacctgattccacttcgtcagaggttccctcgagcgcctgcttggggacaagcggcgtgttatcgggaggggaatgtcagtctctccacgcgagtcgacttcagaagacctccaggtgcagcaggcggaagcagccgtgtccgaggagctacagcagcaacagagcaatgtggagactggtgggcctcaagaggagactacagctgggctgagaaggggaacacgccagcgtaaggccaatgtgagattccagggcccagaatggagaacctgaagatatacgctcgctgagacctacggagaaggcaggatgtaacagaactacgtttatcttcttcctcaagtttcttcttctcctctcgctactgtcttccctgctactgctac

SEQ ID NO: 1828 - DNA, 356 bp, Zea mays
gctcatcaaatggatgcatctatgagatccaaacaatacaaagagagatggaggatggtgttgtccatatgctaggagaagctaatgtggtggcagaaccaaatgcagatttcttcaagaagataatagttgactacgcttacaatttcatgaggaagaacttcagacaaccagagaagataacatgtgtccctcataacagactgctccgggttggaatgacatatgagatctagggcgatgctgaaatttgtggaacacagcaatttaatcaaagcaggcaggtggttagctacttgacaatggagtcggtcttctcagtatcaagtcaggaaatggaagggttctgttcaaag

SEQ ID NO: 1829 - DNA, 533 bp, Zea mays
tgagagagccttcaggagggggggatccaggtgagccacagtgcctgtgcccagcagccaagatgtgtactgtttagccattttgtgtatttgattaattgtttgtttctatgagaacttggttaatcatgtgttgtattgattgttcacaaatgaaattagcttttctcaatcagcatcggtcaccggatgcatgagaaatggatagcgggtgagttatgtattcttatgtttacaagtaagtgggcggtactgatcatctattcacttgtatccaggtaaggaaaagagcgctctaaggaaaatagggggtaagttgccaagtttttcttggagctctcagggtctcaccacaactgagaggtgcacgtgcacaagaaaaaggtaactataattatcacggtaaagttctaacaatttgaataggctttattagcattaagcacaataaattccttaaaagaccatcttgcatgactgacctggcataataccagcaactaaaattttcttttgtaggagctggatgagtt

SEQ ID NO: 1830 - DNA, 326 bp, Zea mays
  misc_feature (237)..(241): n is a, c, g, or t
  misc_feature (246)..(246): n is a, c, g, or t
  misc_feature (250)..(253): n is a, c, g, or t
  misc_feature (264)..(269): n is a, c, g, or t
  misc_feature (271)..(271): n is a, c, g, or t
  misc_feature (273)..(276): n is a, c, g, or t
  misc_feature (278)..(280): n is a, c, g, or t
  misc_feature (283)..(284): n is a, c, g, or t
  misc_feature (286)..(288): n is a, c, g, or t
  misc_feature (290)..(290): n is a, c, g, or t
  misc_feature (292)..(292): n is a, c, g, or t
  misc_feature (295)..(296): n is a, c, g, or t
  misc_feature (298)..(299): n is a, c, g, or t
  misc_feature (302)..(306): n is a, c, g, or t
  misc_feature (308)..(312): n is a, c, g, or t
tgtcttctggcgagaaatgcagcacccagcagtgtcccctgagcgaagcaaatgggcaacttttgtttgaaacaaaacaaaagtaccaggcttttttttgggggaggggcggttagatttcgctcttcttattttttttcttctttcttttgtaattttaaccctttctttcatcttttttttcctggtgtaaagtaagcgtggactttgtcggtttatggacgctatcttattaannnnngaagntaannnngaaagaagggnnnnnngntnnnnannnaannannnananaannannaannnnnannnnngccgccgctgcccc

SEQ ID NO: 1831 - DNA, 389 bp, Zea mays
cctatggacagctaggactagcggaaaaagcaatcaggtttgcgatagaaatgcataggacaggcattgacccagacaatgttacattcttggagattctacatatgatctcactgattccatcactgaattaggggatggaagtacatcctcacattgtttccagaatgaacaggcgattgctaattcacttatttacatgtatggtcgatgtgggagtctcagtctttcagttggtgcctttattattgggattatggataaggatgcaatatcttggacttctatgatgcaggtatatgcatggagtggacttgcaaccgaagttgttaagctttttgagatgatgaagaaaacaaaagtacaacccaagcactacactttaattg

SEQ ID NO: 1832 - DNA, 490 bp, Zea mays
gatgaatgatgagggcggcggaggttgccgcagatgagaacatgtccactatgcatttaatcaatcatcggtggggattttttttgtgatcaatttcttctgtggaagaagtttttttggaaacggcccaatcatcagtggggattgtattgtgatcaatttcttcaccttggtaagtaattaagtaatgtctttattcatgtactgattggaacttctctgacattttgttcaattattttcttcaaaatatcataatgattggaagcaagcattatgatcaacctaaggtaaggagtcggactactcgtttcattgggcagcttgtattgctctgcttggtttgtgatagtaagatttatttttgcctatgttgaacaatgttttttcagttgggtgcgagaagttcagaagcagcaactaggtggatcatctgcgtaatggagtttgcattaaaggccaaagttttgcttattttattgctccactt

SEQ ID NO: 1833 - DNA, 1469 bp, Zea mays
  misc_feature (60)..(64): n is a, c, g, or t
  misc_feature (1374)..(1374): n is a, c, g, or t
  misc_feature (1414)..(1418): n is a, c, g, or t
tcttccgcctttttggtctgctagaatttcttctctgttctcctaatctgtggttggttnnnnnccgcctctacgcttgtcgtcgccgtgtcctcctgcttgggcctcgtatctatgtctctcgtggctgctctgtggctactgcccctccccctcctcgtgcagagttggtactgaatctatgtctgaatctgcagacaataataataatttgaacaacaaccaactagtacaattcacacgggacaatctgtaggtttttttgtatcgttaaacaacgtaaagaagtaaatactgcaaatcaaggcatctgaaaggtacaggaagtggagctaagtttgattagagtttttcagtttcgtcagtcttagtctctattcagtttggtcagagtttcttcagtgtaatatagttagcagactagctttggattctttttttgcaaatcatatatatacttcatcatccactactcaatttgcatattttgtttacatttcatggacgcacttatcagtgatcctagtcgtgaggacaaagaaatgtataataatattctcggtaacttttatgcatttaagtgcatggcatactgtcagaatgattcatatgtatgtatagtctcattttgaatttccatatgtgtattcctagataatctgttagaggtttctaaatgttcttactaaatactaattaaggcatgcatcgtttattcgttttatatgagttctgcagttgctaaatatatctataaattacatgtttccttcttaatcctattgtttttgtttgcactctataaatgaattatatgtttctttgctgggaagaccacaagtctgaactagtagtcgaatcccctgggactgaatggtctcttgattatgattataactgtagctggaaggacactatatttttgttccaatttgattccttaatttgcattaattttgtatgttatatgataggtagcacaactatacaagtgcctaattaaattttatgtttctagataatgggttcttgggaggagcatgttaggcggttttttgttggaggaggaagaagacgatgatgaactgttctttgttattctccctgctataatctcatacctctcagaagagaaaaggcccattcacacatcctctctcagaagaaatttttgttctttgttataaccacaatgttcgaagaatgtggctaaagcgcaaaatcaggtatgtccatagttaagcatgtagcaaaacatagcttccaagaacatgttagcatcatacttctgcaagtttcttcgcttttgtcatttcgctagttgtaaaatgttggtacatgatgtaaactaaaccgtatgtcaattggtgctangtggtatttgcagagtgctaagtgtaagcaacacttgaannnnncatggagaaggaaaatggaacaacaatccacatgaagctgtaaaaaaggag

SEQ ID NO: 1834 - DNA, 311 bp, Zea mays
ccttgtaacccattacacaaagcatactcaccaggacgtagggtgttacgcatctctaagcggcccgaacctgtaaacactgtccattgtccctcgtgcatctggcacgaaccattttgctacagtcggcgacaccctcctggtacggtttaatctggaagcctccgccgcgatggacgaggcggacgatgacgcccgcaccttcaaggtcggattcaccgccgccggagagaagcagttccgggagctcgtgagggagaagctgcgcgggttcatgaggggcctggacgacaccctcctggtacggttta

SEQ ID NO: 1835 - DNA, 1066 bp, Zea mays
acatgttatgtcgatatatatgctttttaatggaagttgctttcatttttttgaggacttgttagtttttgggaaggtcttgtaaggaattgctattttccaaaatattgaggacttttggtttgtcccaagtcaaactatacaagtctataaaaaaacagtaatatttatgatatcaattcagcattactagatccattaaccattatgttatatatttcacagcttactttgatcttgtagatgttaatactcttctctataagctcggtcgaacttaagatagtttgattgattacaaataaaaaaaatccttatgttttgggatgaagtatagttttgttacaaatctagaggattctgaggcttaattcatgagcttcagcttatagtcaggcgggaacgacgtggaaaaagagtgccgtagttttgttgactaggattggaatcctgttctccattttatgtttactttggaaaagtagccttttgtcagcagtccattcactgtaatccctgttactacttgttaattacaaagatgtatttattccatttgcttggcgttagatgttaatataacggccactgggtattttatgaaaggaagtttctcagactctcttgcttggcgagtaaaaattgtggatactcaaatctacctttcacactgcaggtcatggtggatggagacctagataacctttttcggtatcgaagcggtaggccgtttgttacattggcagtgttttttttgttgaggtttattacaaaggtgttgtctttttctgtttcatctgaccaccccgtttgtttcaggtgctctgatgctttccttggtctgtgggggcttaacctgtgggagagtctgtctggtgtctctgcttcaggttgaaggcacccacggaggtggagcactccaggaaagtgggagctggtacctgcctccttgtacagatgtatctcatggattctacggcggtcgggctgcctgaactgctgtttgtaccctagtaggggtttagactgcgcgaccacacgcagagctgagttgtaggggtgtagg

SEQ ID NO: 1836 - DNA, 555 bp, Zea mays
  misc_feature (531)..(535): n is a, c, g, or t
attccgtatacaagtaagtggttcttttgatttgaactttcgaaatgtcttcaaagtttcatctctgaaccatataatgtggtatcctgcatctagatataagtagtgtcttcaatggatacaatacaagtatagttttgatagaacctttcttcgatgtttgcttttccccccatatgtatacaatcattgttattgaggtatcttattattacatactcttcaatgtatgcctgaaaactatatcttatttcctcagatttctctatggtgatcaagctcgattttttgatgatgagatccgaccagagttgaggcattctaaaactggaactgttgctatggccagtgctggtgaaaactgcaatgcctcgcaggtgcaaagctgccccggtgtcttaattgataatattggatgctccatttttcaccatttttcagtacttcgttgcttgttttggccttcaatttatgtgcttttaatgtttttagttctacattacctttgcgggataaaaaaccacattatannnnncagagatgaaactttgaaga

SEQ ID NO: 1837 - DNA, 585 bp, Zea mays
ggtgcaaacttattccgtaagatggcaaaggatgttttgtttgccaaggtgagcatatatctgcccaggttcccattctggcaaatcatgcctttcgcaggggaaaatctaaaaattagccccacttgttgttccgctaggatatatcactcgtcaagaagttctatatgctctatagcttcttctttgtgaggagagttgtagcgccgacggctgcctgtattctctacaatgtcatcatccccatctcagtcacaatcccggagctttacctaccagtgtggggtgttgcctatattcccatggtgcttaccgtggtcacagctataagacatccaaagtaagtctctttgtgactgtgccatgagctctagaaaacaacattgctcatctgtccttcaccagaactaaagctaatgaacaattcgacttgtctttgcagaaatctacacatactgccattttggattttgtttgagagtgtgatgacattgcatcggatgagggctgcgctgactggactgctggagttagaagggttcaaccagtggattgtgacaaagaaggtggggaatgatctcgagg

SEQ ID NO: 1838 - DNA, 454 bp, Zea mays
gcacgaacaggaacagtagattgcgtgggatgcgtggctcatgttatcttccgtttgctgtcctgtgaacctgtgtgtgtgtgtggaactgtcaatgtgcggccctactgcattctgacgtagttcgttcgctgtctgcagaaattcttctttggtgggaggctcatattcggacctgacgccaagtcactgatcctgtctgtttcgctcattgtggccccggtattggtcttctgcggattcgttgctcggcatcttcgccaccacttcccggcttacaatgctggatatgcgattcctgcggtagctgtagtgtttatgatttatgtgagttctgtgtgctgattcctgctggtagtggtatcgatcagttagcattcgcgatatgctcttggctgagcacggatcattgttttccttctgtgtaggtgctagtcctgctcttgattacatc

SEQ ID NO: 1839 - DNA, 466 bp, Zea mays
  misc_feature (453)..(456): n is a, c, g, or t
caagaaaggtgttccgcttcttgggaagtcgaatgctcgcggagaccagctcgtgcgtgtccaggttgagatcccgaaacggctgagcagcgacgagaagaagctagttgaggagcttgcaaacctgaacaaggctcagacagccaatagcaggagatgatttattgagcaaatctttttaggacaccatgcttgtggtcacaggcaattttgatgcaaattgcagtgatgaaaagagttggtagtggttcaacacttctacgaactaaagaggtacactggagcgaagcgtgtcatgctcatgccatatctgtggcctcgtttctaagctattggaaaccaagtcggtgaccactggacgtcttgcaatagcttaacatatacgactttattagccattttttgttacacggctttttgtattcttgagagccttaggcaaaatctctggtnnnngaatcaggct

SEQ ID NO: 1840 - DNA, 390 bp, Zea mays
atagcaatggaaagataggtaggagaaggccaaagtttatatgggaggagacagtaaaatgagacttgaaaaaatgaaatataccaaagatttaaccttgaataggagtgcatggaaaacggctatctatgtatctaaaccttgacttgtggtttatgttgaatttcaactctagcctaccacaacttgcttaggactaaaatactttgttgttgttgttaaattgaacaccatccagactcaactggagcacaaaacttcagcatgccttgatccgaaactagcttggtgccttagtttcatgcccgacagcccgagtatggctcagtcaatttcaatgtgctccaggaagttactcagatattgcaaagggtgactatgcttgcatat

SEQ ID NO: 1841 - DNA, 480 bp, Zea mays
cagtagccacccacagtttctggtgctctcagcagacgagcgcacaatctcaggtcaagaaggggactacgaacaagcatctgctgtagcttctggccgccctttacgtacacttgttgaacaagaacgcactcgagggttagcggatgcttccagtccatctctccgttgttctactcctgctgatagtactggtagatcaaacaataggtatttccgacatatcgtatgtatgatgctatccttgtgcacttctcttcactatcatcgaatgcccgtgcttagcgtctactatggcctgtcaggatttctgggatcgaatctacacctgtggatcaagacggaactggaccatccgctttacaatcaatggcagtaactctcgacaaacagaactcctgacaaatggagcacagacacgcgtcttacctgtgggcattcttgacaatggcaggtacagggatttcataatcaaagtgc

SEQ ID NO: 1842 - DNA, 301 bp, Zea mays
  misc_feature (295)..(297): n is a, c, g, or t
gagatccaggccaccgccccttccgtccgaaacaccaaagctcccaagccccttccgtccactactacgccacctcttcgtctccgatcttccagtgtgcaaggtgaagttgcattcctctctccctctaatctgtagtcgatcgaggcgaggacacaagtgtttttctttcggctctagctcctgcagtgtctattggtttcttgatttgaaaatcatttttaagaaaatccttgcacatgagtatagtagctgtgaaaatccaaagctcacacgtctagcccagcagcatcannntaga

SEQ ID NO: 1843 - DNA, 382 bp, Zea mays
cacatcttcaacaccaggtggaggttgctgcctctgcggttcggaaggcagaggaggagcgctccatcctcgctcgtcaaatggaggaaaccaggaagacagtgtcgcgtctttgcttggagtggatggccaaggagatggaaggtatgggatcgaaaactgagagggagaaccgtgagcgtaggattgttgaggaagagaatcgaaggcgagaggaagaggatcagaggcagggggagttccgtgagcagcgagggaggaacaaggagattcgtgagggggagttccgtgaacaacaagggggaaattgagagtatagagcagcggatttgccaaaaatgtcattcccaaaatttcagggaactaaagcagggatatggat

SEQ ID NO: 1844 - DNA, 542 bp, Zea mays
  misc_feature (299)..(299): n is a, c, g, or t
  misc_feature (307)..(308): n is a, c, g, or t
  misc_feature (318)..(318): n is a, c, g, or t
  misc_feature (329)..(337): n is a, c, g, or t
  misc_feature (339)..(339): n is a, c, g, or t
  misc_feature (341)..(341): n is a, c, g, or t
  misc_feature (344)..(346): n is a, c, g, or t
  misc_feature (368)..(370): n is a, c, g, or t
  misc_feature (385)..(392): n is a, c, g, or t
  misc_feature (403)..(405): n is a, c, g, or t
  misc_feature (470)..(473): n is a, c, g, or t
  misc_feature (476)..(476): n is a, c, g, or t
  misc_feature (478)..(479): n is a, c, g, or t
  misc_feature (524)..(526): n is a, c, g, or t
gcgagggccacgcgggacgccgcagagacggccaaggagaaggtgaagggaatagatgacgctgagctctgactcttgagaccatgcatgcatattgactcttgagctagctctatgtctatctggatttccagtccgcttagcttgctggtcaagacgcactcacgcacagcaggttgtgcttgtatatgtttggtcacttggtactatatatcttcacttcacctcttgagatagatgtcaaacctgacggagatggatagatcaaagcaaaaagatgcgaaacatggcacaaacgngttctttnnttccctgtcntgatatcacannnnnnnnnangnctnnngcatgaggatttctcggcattnnntcctgacacctttgnnnnnnnncacatcatctnnnatgtcagcgtcgtctccattcaactcgtgtattgggaacttcttggatatcatgcacctgagtannnngantnntactcttattcatgataattatcttctgccacattcatttttctnnntttacacttgactgca

SEQ ID NO: 1845 - DNA, 363 bp, Zea mays
gggtcggggccacgctgctcatgtccacggcgctctacctcttcccgcgacggtggcccgcgacgacgcgtaaggagagtacggccgccgtcgacccgctggacggctggagcgcgacgccggagaagaggaaggtggttatggagcggtgtgacgcggtccctggcctggagtggaaccgcaacaagtgaagccatgatcccgccgtttcgtttttgccccctgctatttttttttaggaatcagtgatccttttttgtttagatggaaaggattagtttttgcagtactcggcagttttgttttgtccaagggttttttgcaattgtattcaatgcccaatgtgaccaaacttattatacg

SEQ ID NO: 1846 - DNA, 384 bp, Zea mays
gcacgcggggcctcatagcggccggcggcgggcgggtgctggacaaacgcgacctgcgccttctgccgaagaaggatccggatcctgacggccgccgctctccgtctccggtgaacccgaggccctacttcgtgtacgacgtcgaagcgcccggaggtggtcggttcagcgcgaggctgctgcggcgggagatcgacgaggcgagggagcaggcggcggccggggcgcaggtgatcggccacctcagcgtgttcgacgccgtcgcggcctatgacgcggggatcctgctcgtgtgagcgatgcgggcattgggccggggatgtgtctggagcttggacttgcatgggccgattgttgggccgccagcacgttgggcctcgacgt

SEQ ID NO: 1847 - DNA, 231 bp, Zea mays
  misc_feature (165)..(169): n is a, c, g, or t
gctgttcttttgcttctttcttttcttcagccgatggaacttgtgtatgttgtttttcttttgtttttttttgttcggctgaatcatacgtacggcttttggttttctacactgaggagctttctgctaactcgttccccggacgtaacggtttttttttctctnnnnntagaatcaggcgctggttccctttaccagagatggtcggccgattatggggcgccgtcataa

SEQ ID NO: 1848 - DNA, 260 bp, Zea mays
cagtgcaggtgtaatgttgttggcccaggaggaggagaacgagttaatatcccaggctgcagatgtggtggaagcagcatactacaagagaaaggccgaggagggaaatgcaggacaatcaagcaagtggaacaatattgtgattgaggattgtgcgacggatgacacagacgacgagttgcttactgattatgtttcggactgacttcgctacccatgtgtttggtagtaccttgtattctgcatgggttgtttcattg

SEQ ID NO: 1849 - DNA, 390 bp, Zea mays
ggaggtccagatggaggggatgccgatgatgtcacagttcacactggattcggatgaggagaaggaagaggaagtgatcacctctacagcagctccagtggcaaatggcggggagtcccatgacgagatcccactgcacgaaccaggttccaagtgacggagatgaaatctgggctgttcttctgtcgattagccaagtggaggagggtgtcgacagagctggcacactggggcttcatgtttgtgtgttttggtacatcattttaatatgggtttcactttctgtttctgatatttggttaatatgtggaaagaaatcttgcttagtttgatctgcatagagtttatatctgtgaaatattgtaatttgttgggttcagaacttcagat

SEQ ID NO: 1850 - DNA, 390 bp, Zea mays
  misc_feature (157)..(157): n is a, c, g, or t
  misc_feature (162)..(162): n is a, c, g, or t
  misc_feature (369)..(369): n is a, c, g, or t
ggaggtccagatggaggggatgccgatgatgtcacagttcacactggattcggatgaggagaaggaagaggaagtgatcacctctacagcagctccagtggcaaatggcggggagtcccatgacgagatcccactgcacgaaccaggttccaagtgncgganatgaaatctgggctgttcttctgtcgattagccaagtggaggagggtgtcgacagagctggcacactggggcttcatgtttgtgtgttttggtacatcattttaatatgggtttcactttctgtttctgatatttggttaatatgtggaaagaaatcttgcttagtttgatctgcatagagtttatatctgtgaaatattgtaattngttgggttcagaacttcagat

SEQ ID NO: 1851 - DNA, 418 bp, Zea mays
ttatattatatagaagggtttgtttgaatattacagcacctcaatcatgcttgtctatttgtccgtggccgtttgatggactgcggactgctagccaaagcttgtcccgtatgggattatggatccttgtgttaacttgctataaatgcttaatgtggttttgtaataaagtcgactgagtaaaactacaaatttctgatgaccgatatgtgaatgtgaccatgtttctttccatttgtctggcttaatactactttcactacattagctgtgtgcttaaatagtgtaaactttctctttagcccttttccgttttggataattgattcctttgacagcaaatagtcacttattcttacacatactgactctgaaaattcacaggagcatgagacatacgcttgcttctgcaattcta

SEQ ID NO: 1852 - DNA, 423 bp, Zea mays
  misc_feature (374)..(376): n is a, c, g, or t
  misc_feature (397)..(398): n is a, c, g, or t
  misc_feature (402)..(402): n is a, c, g, or t
  misc_feature (407)..(415): n is a, c, g, or t
gactcggcggcaatggaggcaccacctgacccggccgtcccatcccgctcgacgagatcgtcggcgacatccacggggcagttctagattttcctttgttgattgtcagggctgtcaatgcagctcggcgagctagccccactgccagcttagctattgtgacagccattggggctgctaacgccgttagtggggtgaaggcgacagctgacgagatgttggccgaagcggagaaggcaaatgtcctagctgcaaaaaaaattgatcgcctgcttcgtcgttgacctcccatgatgtaaggttgaatcagttagtgttcatgtctaaaatttgatttttgtttccaactgttttgttgtgatgaattaaattgnnnttgtttcatgtataagtatanntgantgtannnnnnnnnagcatatg

SEQ ID NO: 1853 - DNA, 368 bp, Zea mays
agtttgaggacttgggggtagaagaggtgggtgggggcttagtttgggatctcgtccggagaagagagacgattgggtggatagtttcggtcagctgatttcgtttcgtgaggcaaatagttttgcgagcagtttgaccaaacaccccgggaccgttttgctcctgtaatgcaattatgcaaatcctgcctgccccgtggtctttttgctagtcttccccgtatgatcctttgtagtagtccactgtactaggctaccagcacatttgttgacctttttaggctctggcaggtccgcagtgaggagaaaaagaaaagaaaataagcttttgtgcatttgtttgtttgtttgtctgccagttctttgcc

SEQ ID NO: 1854 - DNA, 687 bp, Zea mays
  misc_feature (607)..(610): n is a, c, g, or t
  misc_feature (633)..(636): n is a, c, g, or t
  misc_feature (645)..(652): n is a, c, g, or t
  misc_feature (656)..(664): n is a, c, g, or t
ttcaagtattacgcataatggcaagatggtagcggctgtggagtacggtactgaaatgcaagagaagtcaatgtgtgaagagcctcagaggaaggccaaagtaatagcaattgctgaagtactgaagcttgggtttagtggaattgaagtggtaaccaccgcaagcattttcgctaaggaaccaaaccaaatggacatgtttctagcactgccagaaatctataagaaggattacatacttcagatgctcagtggtaggccatgtgatcctctgaccctttatacaatgcatctcacttcgtttaaggctgtaaaggtcatttataatatttgctttttagttctagcattggcatttgcagcaggtttcaagtttctgatgtatacgtatatatgattgttaaactgcttacactagtttctgttggttttaattttagtttatgcatgttagtcttcaggttgcatctcctaggagtgcaacctgtgcatactgtaagatctgagaccattcatggattgtcctttctgcatatgtcgtctttagttgactgtgtactaaaaaaaacatgattgcgctgtcacatttagcttgctctatttattnnnntgttgctgcttgcttctgccatnnnnatcaagttnnnnnnnnatgnnnnnnnnntatataactatctacttgttgct

SEQ ID NO: 1855 - DNA, 749 bp, Zea mays
catcagaagatttagcgtaagttcagacaacagttatttgttttattttgcacatgaaatgttcactaagctgtatgttttcacattatatgtccattgatgttacttggaggtttgcaacttactagtttactcgtggataatggtatccacaaattgttgtgtccacatgtgttactagaatacgtgttatggtcgataccatatcaaccttagttcaggataggccgactatgctagctattcgttcatgtcatgtttctgatactccaacccacccatactctttgaaaatactggattcatatcacctcgatctgttgatctttatccacatggtaaagcctgctgttgctgtccacatagccttatgaaaattcagcagatcttattttcttaactatacatcacttgttctgcaacatgtactttccacatatccttccttgccggttcatctgaatgaccaatttcttctgatgtttcaggagactatacggggaagaggactactataattttgttgttgcaaataggaaatgaatacaatttgatgttgtgagctctcatgtgtaccaggtatctatttccgaatacattgggtctagagctagtgaaaaaggaaataatattatgtgaaactgatgaagttgatagtttcatgtagtctacatgcggtactttttccttgcaaataacaattacttgcaaaataagcatgtttgttgacatgggtttcaaaactaaaa

SEQ ID NO: 1856 - DNA, 508 bp, Zea mays
  misc_feature (78)..(78): n is a, c, g, or t
  misc_feature (88)..(89): n is a, c, g, or t
accaatccaccagaaacatcgccgccgacgagagaccgtacggcaccctctcgatcgtctcgctcgctaaggtgtgtnctatagagannacctgggatgcatgtcaggtcgtctttctataggacacaccttagcgagcgagacgatcgagagggtgccgtacgtgctggtctctctcgtcggcggcgatgtttctggtggattggttctacgatttgtttgtctccgccctgcggcggcgtgcaggaggccaagatcctcttcgtcggtctcgacaacgccggcaagaccacgctgctccacatgctcaaggacgagcattctggcgcctttctttctttgctcttgccgccacaggcaattgatgatttcttctcgtgccggccgggagagtgaacaacggtcgccgtgctgtgtcgttgtgttatgcagaggctgagtcagcacgcgccgacgcagctccagacgtcggaggagctgagcatcgggcggatattagcgatattta

SEQ ID NO: 1857 - DNA, 392 bp, Zea mays
tacataaagaggtttgatcaaattcagatttgtgtgcgtgcctggctccctgtatgccacacatgtagcgcccaacccagatgctaaggttgcctgctgtgggtggcgtgcaaggggccaagcatgcatccatgcatgcatgcacttttgttcgattcattcttcatgtcactttttgatggctagtaccatgtgtgtgtttccatatgttcatgtttcgatatgttcatgtttcgatatgatgtaatttcatgtttggtatatatgcatgcatatatatacatctcctccattctttttgcacagggagccggcccaagggaggaagctatagccaaactggtgtgtggattacaattttgtgtgcttctcctcaccggccagttgccaga

SEQ ID NO: 1858 - DNA, 452 bp, Zea mays
  misc_feature (443)..(445): n is a, c, g, or t
gtcgtcttaccagactacgacggcgccaccctccacggggcaacctatgaagccgacgaagcccgaagacaagcttttcggtgacctcctgagcattgccaagaccaagaaagcttcatgagacgagctcgagcaggagcggccttctgatatatcgtctcccctatttttcgtggtttttcgtgctgtttgatcttacacttgtaacattatctgaatgtgtaaacttttttggggtccttttcttttattcccacgtcgtgtgtgatcctattgatcccattggattcgttataccgtgtgcgtgtactgatcacgagcgatgggaaactttggccgtaaatgatgattcaataaagggtgtgcagtacacgcacacggtataacgaatccaatgggatcaataggatcacacacgacgtgggaataaaagaaaaggaccnnnaaaaagt

SEQ ID NO: 1859 - DNA, 279 bp, Zea mays
cactgattggttggacttgggggcggttcaggaggggtggaggtgggtgctcaaggcggccatcaagaagttcaaggcgcggcagcggcggtcccggcaggctcccctgctccagatggtcctccccatgctgtgatgatcgatcgatcgatctcgcgcgctcacacgaattgtgcttgccttttgttttcacttgttccatcacagttctattcattgcatccggacgctggtccatgccttgcctgtattatagttgagttcggatttgcttcaagt

SEQ ID NO: 1860 - DNA, 969 bp, Zea mays
gatctccactgcgaagcactgcccccactgcggcgagaaaatcgacagcaaaccggtatgtagtattaagtatgtgtcaactgtcaagttggcaatttcgttttgcctttgtatatatcttgtgcacacagttatgcacctcctcagccggctgagaactggtggtggtgcaacttgttttgatgggattaattgctgtaactgcaagaaggattgggtggggctgccggcaggcgtcaagttcgatccaactgaccaggagctgatcgagcacctcgaggcgaaagtgaaggatgaaggctcgagatctcaccctctcatcgacgagttcatacccacaatagatggggaggacggcatatgttacacccaccccgagaaacttccaggtgagcgatgagggagctctactatctaataagataggcttgagcagaaacatttctgaaccatatatatacttatatagacatattccttgcttttcgagctttgcttttcatggagtgatgtattgtatgtcgggattgtttcgccatatgaattactcctatgtgcttgtgtggtttggatttgggatatggcacatattcccttgttctcgatgtgtgctcttccctctattcctagtgttctctacatgtgctcttgggtaggagtatatgcaaagagaattattgtttatggaaagttgtgcctatcctgatctacctctctctcatctgtgtcatgatggtaagatgcttctgaagtttccaaataggtttctttcctttctttctcctatcttttttccccagaggtttgttgcatctttcaagaaacattggccacccacccagctaccaggttctaacacagttcttgcgtctatatgccttgcatgtgctaatgaagggacgatatgataatgatcaggtgtgacgagggatggcctaagcaagcacttcttccaccggccgtccaagg

SEQ ID NO: 1861 - DNA, 346 bp, Zea mays
tcggaccaaacagtatggtggcgtaccgaaccgttccggtgtacaagcatataaaaaactacagctttttccaatgtctagaattgagtgggggctctatataaacccccttagccaaccatttgaaggtatggtagcccaagaaacatactaaggaaggttatacacatctccatgtgctcaaacacccaagtgcttaatagaatcattcgtttattagcgtagatgctttgcaaagtgtttaggttagttagaccgcttacgcgcttgctctaggttgttcttagttagttgagtgagtttagaaaaacccacaaaacccatcgactcttacacggagctgttg

SEQ ID NO: 1862 - DNA, 341 bp, Zea mays
  misc_feature (331)..(335): n is a, c, g, or t
cgcgcctcgcggacgcagaactcggccggcaggtgcacgcccaagtggagatcgccgggtgcgcacgcgacacagtcgtcgccactgcgctcgttgacatgtacggcaagtccggcggtgtcgaggacgcgcgcgcggtgttcgacgccatggctgcgccagcgaggaacgccgtgtcgtggggcgctatgctggccgtgtacgcgcagaacgctctcgggaacgaggcggtcgagctcttcgcggagctcaggacgtgtggcggtggcatggcgcccaaccacttcatgctggcgagcgtggtgagcgcgtgcgcaggcatggcgcgtcnnnnnatcggt

SEQ ID NO: 1863 - DNA, 219 bp, Zea mays
gatctgctggtgatgagatgcacaccgaagaaaggattcttcttcggatgtgtgacgacttgcaacttttttttaaggtgtacatacagtgctagcaggggtagagaagatatttaggaactataagaatagtggagactggagaccctgcttgtttgtttgggcttcccttttgttcctaacttatgcaccaacaacggctgaacatcgtgtatctcc

SEQ ID NO: 1864 - DNA, 324 bp, Zea mays
tcctcgacgacgacgacgacgacaacacctgcctcggcatcgcctcccctgcctcgtgcaagcggtccctcggatcctccggaacctcttcccgcgatttcctcgacgcgttctcgccgtccccgcccctgcgaaagcggcctcccctcgcggcggtggcccccatcaacctcgacgacaccccgtctccgcctaagcggcggcgctcctcggtctccatcaacctcgacgacaccccgtcaccgccaaagccgcggctctcctcggtgcccaagcagccggtcggggtggacgacgacgtggcgctctcaccccctggtgatg

SEQ ID NO: 1865 - DNA, 447 bp, Zea mays
agatgaggtccaatccttaacgaaatatcctatgtacctgagtttgtctcttgatcaaagaatccgtccccgccatcgttttctggtttccttgaagaaagctccaaagggcccatttcctctgagctcctttgtgcccacagatgagcgtttttgccagaggtgggctgggactagcttggaggcataccatacattcagacagaggttgctgctaacaagtttcacagagaagtctggaaggaaaacactagtctcaagacggtagatgcctaggtggtgggagtttgtttctcttgagcccacgctcctcctaacagtaagatgatctctttctgattttagagtttgtttggtagcagtctgcatacgcatagtactgattagtgattagttcacagttctcaggaaatgggcttggttgctgacttggtacttgatgttcac

SEQ ID NO: 1866 - DNA, 747 bp, Zea mays
  misc_feature (461)..(463): n is a, c, g, or t
  misc_feature (478)..(664): n is a, c, g, or t
  misc_feature (672)..(741): n is a, c, g, or t
attttgaagcccaagtctttcagcaacagaaggatgaagtctcttttcacctcatagtcctagccaaagtcatcacaattgcaaggtaagacagctcaaactgaaagaagcatggttagaattaaggctcacttttctcagggatatgtagtaatctgctgtgcttgttaatgcaatcaatgcagcttcttggaatggtgcaggagctgaatctgttaattttatgtggatatttctaatagctgaggcgatgcttgctgctgcacaagcccaaccgagtctccaacctaatcagtccagacaggtagtttgtcaagtgtcatctcacaagtcttgctatttctatagctggttgtgtcactacaaactgtgcagcaaattctgagttgtgctcaccagtcacactgtaagtttttgacagtgaggatgtgatgatggtcctctcttgcatccctggaagnnnagccagtgagatatnnnnnnnnnnnnnnnnnnnnnnnnnnnnnnnnnnnnnnnnnnnnnnnnnnnnnnnnnnnnnnnnnnnnnnnnnnnnnnnnnnnnnnnnnnnnnnnnnnnnnnnnnnnnnnnnnnnnnnnnnnnnnnnnnnnnnnnnnnnnnnnnnnnnnnnnnnnnnnnnnnnnnnnnnnnnnnnnnnnnnnnnnnncccccccnnnnnnnnnnnnnnnnnnnnnnnnnnnnnnnnnnnnnnnnnnnnnnnnnnnnnnnnnnnnnnnnnnnnnncccccc

SEQ ID NO: 1867 - DNA, 344 bp, Zea mays
cggcagagggacggcgggcagagcgacgacgggcaggcggtcggggccgagctgtgcccgacggtggcgttcgaggggcgtctcgttgctgcttagggaagaaggttggaaatcgatctcagtgcgtggctccggcgttggagatgtaccagtgtccgctggcgtctcaggcagccgcgtgctcgctcgggctccgaacagccaaatctccggtgagggtggaggcgagccttcacatgcctgcacgatggagatgtgcccgcttgcgtcgaagttggagatgcagcaagccgaagtcaaagttcagactccggggaggagcgcgtggctgagatgaagccaac

SEQ ID NO: 1868 - DNA, 1013 bp, Zea mays
gcgcgctgcggcgcgcggtgatggagttcacatctaagaagacggcttcgcttgccctcctctgcctctagctctcctgcctcctcctccttcttcttcttccccggtcttcctctgctgcgcctctgtccagtaagcacacaccagtcatccgtcgtccttgcgttcttcttcttcgttggctagcctatgtatctgtctgtctatctataccatgctttctctcactagctacctgctgtcctgttgtgtttcgcaggaagcctgtcgctgacgaggaaccgcctgcagcccgcggatgaccctgctccggaggttcccgctcccgcccagcaggtcggtcgcgctcgctcgctcgctcgatctctttctcgtcctgcggcttggtagatttcgtcgcgtatccacaccacaacaactgcgcacaaaaagcttgtgcttgggggcaggggggcactccactcacatgcactgttagctaggtagctgggcatgcagtgcagggctgcactgcaggccggccatagtgcaggtcacatgcatggccactcgcacacacagttgcaaacttgcaattcgcgtgccccaccccactcacgagtcacgacacctttcccgccacaaaggcaaaaataaaggtttgtgcgtgcaacaacacaatcgtgtcaactttacactacttgcacgctagctgtccgtcagttgactgctcgtcgatgtcatcatcaagtctttttgtaaatatctgacgcacacgcacgcactactaccaataacgaacccagctaatctttactaattgtctgtgtacgtcgtcgtctctgtacttaattacttatacagggtgcggatgcgggtgctggtgctggtgcggtgggagctcgagaccccggcggcgaggtggcggcgaggatggacatcgaggtcaacgactaccctgggtccggtgccaacaaccgccatgaaccgaggagccctgggaggccatgaccatgaggttgaagctagcccat

SEQ ID NO: 1869 - DNA, 380 bp, Zea mays
gtgatagtactcatgcatgttagaaggatcttgatatggtcccctatcccactcctccctgcaccatatgatccaacatcacctccctccgtcaccatgactgtcatcgtctccatgatgacctacactagggtcgattgtgctatcatcactgtctttatcctcttcttcttcgatttgatcggtgaatttgactctttttccttttctttctgatggactaagtcttgtcttccgcatgctaaggtgggggtcgccaactgtttcatcggtccatgctttcacttcctctgtgtctccttgttcgtgtacaagtgatgtaaacaatatgctagaaagaggagtgtcactgttaggtgagtcttcgtccaatgttgaag

SEQ ID NO: 1870 - DNA, 361 bp, Zea mays
gctgcacttgtgatggcagaagttgtgacagtttgtttcccctgaaaattgtagatttgcatctgatttcctgtccaacagctaggtccctttcagagaagagagttgcttgttttgattcccacatccggaatctgaagttcagagatgtctccaaacaaccagaagatatggacgtaagcaactaccaaagatcattcttattggagatattcagcgcaaagcccacccaccaaataatcctgatgttcttctttccctagctgttgcagagaggtcggaactgtttggggctttcactagccaattaaaatattaagtagcaagctgagtaccatgtcagtattaaatctgtctctgt

SEQ ID NO: 1871 - DNA, 415 bp, Zea mays
ttttattttttttagcatttaggaaaaatgaacacctaacttgaatagggtaatagctccaaacatatcagaaaggtgctgtatgcagcatatggcatgactgtaaaacttagctgactgtaaatgcagctgaaacatttatgtggtggtatggttaaccttagtatgtgagtcctgcagaatcatgaagttctcttctggcagtggagtgaatcaggtgtacatggaactagcctatttgtttgactttaatctgtactggcttctagtgttattacaatgtttttgtctctatgaattacagctgcaacagtcaaaacagacagttttaatccgaagcgaaaaggtaagtcgagactgataccccatgaagagaaaactagaaaaggtctcacctttaggaaaaataaatgtg

SEQ ID NO: 1872 - DNA, 247 bp, Zea mays
  misc_feature (13)..(13): n is a, c, g, or t
gaaccctctcctngccatcccacctctccccagacgcgcgctgcgggtgctggctcggcgggtgcggcgacatctgctcctgcgccgagggtgttcgacggaatgacgcataatgagagaggtagccagcggttcttctctgactgtacttttttccccattatcgaaattgatgatttgatgtgctatagtagtgtcagtgctacgtagggctggactggactgaaaatatgccctgctgctgcat

SEQ ID NO: 1873 - DNA, 388 bp, Zea mays
tctatattgacaggcctgcgtacgtacataaaggtggtctgatcgtaaatttggtggggctttctcttccttccaccgtctcgagccgtttcttgagaacaggtacctcgtcgacactcgcattcctacagcttcgtgcctccagttcattgtgtcactgcctgtcgtaatcccttcttgttagcagcagcactagtagctatggcctacggagtactactgctgctgttctccacgatgatctttatgaaaaaggagatacaactgtttcagcgtgtgtgtgtttcaagatgaagatggttgtgtttcaccggtgcaaaacatttcggttgcacagtcgctctctcatataagtgaaactgttaaagaagtccaagtaccaagtctc

SEQ ID NO: 1874 - DNA, 358 bp, Zea mays
acatttctaggttgtaagaaaaatggatattggcccatttgactaaatgattttggtgttttatgatcgacataatctgtggactaatgtatttgctagtgtttatgtttgtagttcacaggatgtgaagaggattcaactgaggctctgaggatgtaacacctcaaaagaagacctaaaagatgcgtagaagtctaagactcaagaccaaaagatgcccaagaaaatagtgaagaaatacatgaagtgggtaatcggctagcgctctggtggcgcatcagacatattcggtgtgtaccgaatagtctgtgcagagaggtccacaaactggactctcggttgttgtagcactagattg

SEQ ID NO: 1875 - DNA, 249 bp, Zea mays
aggtggaggaggccaaggccttggtcaggccgctgctggacgaggtgatggtcctggacttcgtcgtcggagatgctccaacgcccgcgagcctctgattacaggctgcagggtctcagtttcgggattctgagtgtgttgttgatgtcggaataatggatagatggactccctggtcctggtcctgcagcttttcaacttgtgatttgtgaaattgggaatgacagtgcaatgaataagaattgcttc

SEQ ID NO: 1876 - DNA, 365 bp, Zea mays
gagtgggtgatgacggagctagtccggcatccacgcatcctgaagaaggcgcaggacgaggtgcggcgtgtggtcggtggcaagggccgcgtggaggagtcggacgtcggcgagctccactacatgcgcgccatcatcaaggagaccttccggctgcacccggccgtgccgctgctggtgccgcgggagtccgtggcggcctgcacgctcggcggctaccacatcccggccaagacccgcgtgttcatcaacaccttcgccatgggccgggacccggagatctgggacaacccgctggagtaccggccggagcggttcgagaacggcggcggcggcgagatcgacctcaaggacccggactacaa

SEQ ID NO: 1877 - DNA, 509 bp, Zea mays
gatacgcacctcctccagagtaagaattttctctgcttcccggttaggaagaaacaacattctgatttaatctgtattttttccaaacaaattgacatatctaggagcatttgttgcagcttttgagctctaattatttaaagttcaaacaactcaatctatttgattttaattgtaattacaacgcagtagtattgttctattgtcttattgtgagtggttcatggttcaaacttttttgacgccttaaaaaatttatatctccaactttttctttggtgcaaaatttggcccagtacagacaaaagcttttatgacatggtttagtagccatctgtttggtaaatatttgttatttccatgtatggtaaccgatttctccaaagggatacatttgtagaactaatcatttactcttgatggtttgtaggcatttcgtttgttactcatccatcggacatgcatttggtcccaaaaaaagggtcaagctcctatcactgttcatcatt

SEQ ID NO: 1878 - DNA, 347 bp, Zea mays
agtgggcggcagccggcattgaagatgatttcctgccactggaggacagaaccatgcagcatggggagcagcagcagacaacgaaaaattaagcaaatctccaataaaaatgagagaggatcttgaaagaagaagaaagggagagaaggcggctgcatgaactagtcctcagactagaagagggttaccctagggcatcctaatgtgggtagcatgcagggatgggcaagcatacgccaacccatttttttcctttacttcttattttgttgcctttattacttcgtattgatcttctataactagcttgttcatcgacctcgattaactagggtcacatgttccaa

SEQ ID NO: 1879 - DNA, 266 bp, Zea mays
atgataatagagaaaaagcaagcaggagggatgggcgagtgagatgcttcgttcacgtttcagtgatggttgaagctggtgccattggggatgcccagacgcgcttcgttcacgttccagcgatggttgaagctggtgccattggtgatgcccagacacgagcgtgtgcagcctggttgacgtcagacgagccaggcacgctggacgggcctaaggcgttcgacgaaatacctccccaagagtgcgacgtgtgccagaccgacata

SEQ ID NO: 1880 - DNA, 1064 bp, Zea mays
  misc_feature (999)..(1001): n is a, c, g, or t
gtcgcgctccggtctccagctgacgaagcaggtaacgaccattcttccccgcctccgccgccactcgtgttaggttgctcacgtgatctcgctgttgggagttagagctgtctcttcttgcttgagtctcctctcatctgcggggacctcggagccttccctcgcccgcccaccttcgtgattcttcgcacccgaaccttggctttgctcttgctcctctggttgctggggtttctggggaccggcttgcttctagagctgaatcacactcacctcgagtataaaaccagccgccttcggatcttctcccccttcttctcgcggggggttcttcgccatttcggagttgcaaattgcaatcccacctgggatttctgtcggctgcttaggtttctccgcgtcgcgagctttgatgagaggttattcccgcatttagtggagctggttctcatctgctcctcgcctccctcattactgtctctactgaatcctatttcagggtctcgtttgctttttttttttgtctcgcaaccttttagggactatttgttgctggtatactctgttcagcatcattacttgaaccagatttgcaattagcgctgcattggcaactacgctgccgagcatgttacttcttttatcagcagctgacgcagtgacgcctgactggctgtaaaatctgtatctggtttaccaggatgcactgtgacgcgctggcccatggtgagcttctgatgccaattaggactaaacatgcttcctcgctgcgctcaagtgggagaacaagaaatcagcctagacactagtcatctgctgcaagcagaaaatggtatagcacagtgctcctggactacatttcacctgtgcccaatacttgctggtagcagcaattcctgatcattagaaatcgtgtttgcgcctgcagcacccttattcacttaagagttccaagggagcaccaattctgccacggccagtcttcgttttcttcatcgnnncatttggtttctatgtatgctatctctccttcaatcagataacgctagagaacaacagagagg

SEQ ID NO: 1881 - DNA, 369 bp, Zea mays
atgttgcttgctaccctgtggtcatgctttccgattttctagtggcaggagctttgccttgcattcaagtagggggaaacataatgcttgattagaattgatatatccgggctgcaaaacgagctattgctggcttgccacaaaacatgaagcagttatctggacatggtgtgtttgatgtcgtgtgcgttacgtgcattagctaactggacaggcctgcaatgtaagacaaggtaccatttcatcagaatcaaacactccacataatttgacatgatcaaggcattagtaattagatgcccatatctttatggcttgcattattgtctcatagagggacgtttctctattattgtttgtaatttggta

SEQ ID NO: 1882 - DNA, 148 bp, Zea mays
catccccacgaaaagccgagggttggactcactccaccggaagcgtgtgtacgcacggacccctcggccctcgcccccgcacggccatggcagccgccgtctccccctcatcctcgcccctgtccacaaaccctatgtagcacaggag

SEQ ID NO: 1883 - DNA, 523 bp, Zea mays
ttgcctggagagatcgttcttgcttcgcttgacggatttggtacgttgctgttactaacacttgtatcataaggccaagtgcccgtgtggcattactcgtttgtcatttcaccctagcacatgctctgtggataggtggctgaatgctttgcattctgcttgccaccgtggttttggtttatgcacccaactttcgctgacattgtcttccttcgttgtcgccgacgccataaacagggaagatctgcgacgccgtggaggtggccggaaagaacgttttgtccacgtcgtcaactgtgacgaccggtctagtatctcacaggtacggagacaaagccgccgccgcaacgaacgaagggctggacgccgccgggcacgccatcgggacggcatgggccgtgttcaagatccggcaggccttgaaccccaagagcgtcctcaaacccacggcgctggccacgtccaccatcagggccaacgtcgccgagcttcgcgcgatgcacggcagcagcaagtagctcgc

SEQ ID NO: 1884 - DNA, 320 bp, Zea mays
cagacgtcgcagcggtggctccggcttcctgctgatgcgtgaatgcgacgacgaggcaaggaaacggatgcgacgatgatggtgagcttttgcagtgctcccagcatgagctcgcgggcgcttgctggttgttgccggcgacttggggaagtcttcccgtgcgacggaggcacctaggcgcgcgacagagatctgcgcgatgtggtaaatgacggcgggacgcaaggcagtgcggcgcggatggctgtcgagtagcgaaaagttagagggctgcgaggcgtggggagcggggcacagatttgaaggacgacggttgcaaa

SEQ ID NO: 1885 - DNA, 403 bp, Zea mays
atgatgatgatgtgcatgcagtcaccctgcccgagccagtgaagctgcggcggacggcggcggcggagcatgccccgctgtccgagttccaggaggagctggtgcagctcgccgcggtgctcaacggcgaccacaccaaggagtcgtacccgcaagggctcgtcgagggcatgacggtggcggaggcggccaggtactgcgtcgacgccttcaaggccttcttggacgagtgcgagaaatgcaaggaccgcggcggcgaggacggctcccacatccccacggtgaagccgacgacgacggggaaggagaaggacaagagcaagagcagcttcgcttccaagtcgctgtcctgccttccctgctgtgtccgtccctcttcctcgtgacctccctctccttctac

SEQ ID NO: 1886 - DNA, 471 bp, Zea mays
caggtcctgcgcgacgtccaccgcctcggctccgggcgggacctcatcgcggcgaggaaggcgtcggccgtcgtcgacttcgccggagaccaggtggtgggttcatccggtgcgcgtgtgtgcgcgccgccgtggaacgatccgatccgatccgatccacccaccgatcgccaaccgccgattactattgtctgtctcgctttttttttctctgatggaaaatctggaaacgttggtgcaggtcgtcgcttacttcttgatatcgggcatgtccgcggcggcgccggtgacggactacatgcgccaggcggcggacaacctgttcacggactcggcggcggcggcgatcagcatggccttcttcgcgttcgtggccattggcctctctgctctcgtctccgggtacaacctctccatggaggctcttgtatagcctgtgaatcacaactctaccatctcatgtgtgatgtg

SEQ ID NO: 1887 - DNA, 484 bp, Zea mays
  misc_feature (382)..(389): n is a, c, g, or t
  misc_feature (394)..(408): n is a, c, g, or t
  misc_feature (414)..(420): n is a, c, g, or t
  misc_feature (439)..(439): n is a, c, g, or t
  misc_feature (441)..(441): n is a, c, g, or t
  misc_feature (448)..(458): n is a, c, g, or t
  misc_feature (475)..(477): n is a, c, g, or t
acatccctcacgaaacacctcctgtcaatctgcacattcttctcggcaacacacaacgacaccgccccgaccacaacacaagtcacaaatacagctccacccagaacgctgttcagcccaacatcaccagcaccgctccccataaacgccgcaatgctagcaaacacgtcaggggctccattaccaaaggggagcagcgtcacgccagccaaggtcggcgggagccgcaacagtgccgacatcttctcaaggctgcagcagaagtagtcggcagcagtattgcccagcatatagaacagcgcggccaggcataccccgagcaccgcgtagcccagcaccctgaacctctcgcatctgcagtagaagaagcctaggtagtcgnnnnnnnnaatcnnnnnnnnnnnnnnncctaannnnnnngcagagaaaattcttactntngaggagnnnnnnnnnnnttctgcacctctgagcnnncgcttct

SEQ ID NO: 1888 - DNA, 478 bp, Zea mays
  misc_feature (470)..(473): n is a, c, g, or t
gctctccatgatgctcagatggaccacttgaaaatgctaaagcttcctgtctcagtcccacatgcatcagactactctgccgtcaacatcttcgtccttgtcgatccatcgctgcacgtcttcctccatgcctcagtagtgtccagacatgggcgcggtgctcctctgtacgtctggctccagggttagtacattcctcctctaatacttgctttccccttctccacacctcctattcatatcagggatccctagatctgaaatttctccaactctatcttcctcgttgctaaaaatctttgcttctgcctaccaccagccaccatggtcatgacagtgtttggtgtggtactgttgctgggtgtgccctagacctcgtcagtggtggatttggaccctgggcctgagttatgccccgatgcatggtgcctttagagagggggagagggtctagatatctaccgttcgtnnnncatat

SEQ ID NO: 1889 - DNA, 429 bp, Zea mays
  misc_feature (73)..(74): n is a, c, g, or t
ctacagcctcgccgacatctcctaccacgtcgtcaagctggtagctagctagctagctttgccgacaccaccnncgcgcgcgcgcgcgcgcgttacatgaatgtttaatttgctgccatgcatgcataatgcagggcatccggccggacatcccgaggtgctgcccgcgggcgctggtggagatcatgacgcggtgttgggacggcaacccggacaaccggccggagatgtcggaggtggtggcgctgctggagaagatcgacaccagcagcggcaagggcggcatgacgcccgtcgacgacgtcgcgcaggggtgctcctgcttcggcttcaaccaccgcagcgtcgcctaggctagctcccgtcagctgacaccgcagttattaagttattattaataataattaagctacatacacacgtactacc

SEQ ID NO: 1890 - DNA, 207 bp, Zea mays
gcgccgatgaacgcaagcagcggtgccctggacagagcaaacgagggatagaagcggtgtgcatctaatgggaaggagaacgtatgatttatagcagggttaattttggctatggagatagggcttatccgtcgtggtgacaggaacaaatatatgcgcttcgcctgtgatgcaagaaggtgatttataacgggattagttctgcca

SEQ ID NO: 1891 - DNA, 461 bp, Zea mays
tcaacggtctggctgaagtgagtttttttttaatctgttgtccttccatcctaattaatgaatcttgcattgaggtgaggtggtgatgatcgtcgtcctcttctgttttgcaggattcctacctttggcagtggcgacaccgcagcctgccggacacatgtatacgaaaaggagtgcgacggtgtcgttccaaggcttgtttccgaaagggtcgatccatcggaactggcctcgatgcttcaagggaacaaggtggtggatgcgttcgtctcggtggaaacattcgaccactaccaaagcgctggcattcggttggttgccaataggctggatgtgcacttcaaaaggcaacagcaggcctagctagttccttatggtgctctccggtcaggccgaggctggattgaaggggattgacccatccaattctcctgtgattctcttgttaccgaatcgatcca

SEQ ID NO: 1892 - DNA, 402 bp, Zea mays
gtttgtaccataaatcttccgatccttgagagattttccatatccatttaaccaacaagcattcattcatcactcgagtatcaataatacctagacccccttggtcctttggcctggtcaacatctcccacctcaccatgtggtatttcttcttatcctctgcaccttgccagaagaaattcgccctaatagcatccattttctgatgaatattcttgggcaaaaggtggaaccccgtcatatacaatggcaggctacttaggcaagagttagttaaaataagccttcagcagagagatacttacccttccatggatctaatctttttttccatttttttccaaaataggaagaaactccgatgaattaagatgtccatccgaaataggaatccctaggtac

SEQ ID NO: 1893 - DNA, 285 bp, Zea mays
ggaggagcggtggatgaagctgtgaaggggaaggaaggcaaggcaggggagattgcggtttgaaattgaattgggtagagttttgagctgcggagtgcggatggggattttggggagggcgagcgactgctgtctgtctctgtgtccgtgcttgattttttttatgtgtgatgaggagagttattaataaatggtttggcatatatacttacgtaaatgctactgacacagcggtagtgtacacagcctgtgcgagttttctagtatgaaagtcgtttagggctt

SEQ ID NO: 1894 - DNA, 673 bp, Zea mays
tgatttgtatttgcttcctgtgagtaccacacaagattcggtgttgtagtctctgccagtgctttaattcacgccacttagctgtctatgttttatctcatgctttattgtgccttttttgtgtgttttatgcctttgttccttaaacagctgtcttactgagggtaattaccagttgtggttcagaaggtacagggaagggaaaaataaagcgctcggtaagaaagtacctgtttgagtagtaattctggttattctcaaaatgtggctttcacaggagttgcactattatttgcaatttgtatgctgcgattgtatgtttcagtgtagttggattttgctgtgaaggcctgaacaatgttcttgttgttgaacttttgaaatgtaaatggtggcaggttatagagcttgcggagaaggaacatattgagtggcgcgaagagaactctggaactgtagcccttcgacttggtgggccaagagagtatcggttccttgagcatgaaagcgattctgaccaagtggggaactttaacatagattaacttttgatctaatctatgtattctcgtattgatgtgttatagttatggatgctgcctaggttgcggtgtaggctgtagttctgacacagaagctcggtattgtagttgggtaaattatggtgtgatgt

SEQ ID NO: 1895 - DNA, 650 bp, Zea mays
gctgacggaaacagggccaaaaagatccccatccaggagctcccctgcatcggcacacctcctattgtctgctggtaattccacttcgtcctatttccttctattcatatagtttgagtctttgacaatatatgtcaggaccttgattgggaaatcataaagtacttctgaacactattgccactccctgcataaatgcaactacacatgcgaggctagaaaaaagtaaaatacgtgtggagcatccgagcatgtaactttatacatgtatatggtaacgatggtaccacttgtactgataaatgagtcaaacttttctaatctacagaataattatgaggaatatttgaagttggatacaagagttgagttcctgcatacaactcagatgtgtaattttagtagaatgtattcgttaattgtgcttactattattgattgcagatcagagctacggcctccctcgacctccctgaatttctctgtgatgaactatggttgcaagcattaaatttgtagatgtatgatcgaccgaatagatgtattctctattatatgccttgtgatgttgatctagatgaatggcaacttgtgtattcatttgtaggtgtatgatggacgaaagttgtctcggccttgtgatgttgtag

SEQ ID NO: 1896 - DNA, 924 bp, Zea mays
ttgctcggcgtcgcactagaacacgcaggagacagcatattttgaaacgtgagtaaactttggtccctgtgtttcccttcaatggtagtcatttgccataatccagagctgtggaaatgattaaaacttcgaaagggtatgggttcaaaattttcattgttttttatataaacttgagtacttgctgggcctgtttggtaggctgcacgagtgctgggcctggctgacgggcttcagcttctcgtgtttggtaggttcgagagcctcgaggtctaggctgagactgcttaaagcagtcaaaagcctgcaccgaggaaacggaaatgaagttcgttttatgaacttgttaaaaactgatgcgacctttgttttatgaacttgttaaacactgatgcgagaatgatcaacaattctgtattgatgcatgcattgtgctgtacctaatttgttcgaagcgaaccaaactcaccaacgaaattgtgctttctacaggttagctgaacagtagtaatatacaaagacgatagatcggtgctcatttgcaaacattaaagcttccggagatggtggagaatcagagatgggatgaaggagcctgcacgtcatcctctttaaatcacgaggtccatctgctgttctgaactttgtagggtaggaaaattaagtatgtactccctctagtcgcagaaacttgtcatttaggacagatatggtcaaacctttaaaagtgcaagtatttacattatttactttggaaccatgtaggtctaatgtcgatctgcattcgagattcatgcaaaatctcttatatcggaagggttttaagaatatattctagaatagtggtaaaaacatgcactgaagatcgtgcaaaatcaaatgtgtcaagttgtgaccagatggagtgtacatgtttaacataaa

SEQ ID NO: 1897 - DNA, 439 bp, Zea mays
catgactttttttagtatgaaaacaaagagttccggcttttgcatcaaatgcgcacaaccattacacgtcaattattaactcaatgaacaggtgcttgaataatgaagctaacttgatggaactaaatatcgtgactatggataacactagccacactcaagtcttgcatttgatcaccatccatgattcacaaagacttccatcgccaccacttcaaaggcttgacacacatcgagaatttgttgatgtgtttctttcttctataggagtctccagaacctgaaccaatgagtacctctgaaaatgacctgcacaattgatggtattggtttgtgattaaaagccacctcatttcaattaagccaaatagaccaaaataaagctgatgttccagtaagaagtaattttttgtatcccagatcacaattacttgccaag

SEQ ID NO: 1898 - DNA, 809 bp, Zea mays
  misc_feature (730)..(743): n is a, c, g, or t
  misc_feature (761)..(787): n is a, c, g, or t
gcagaagttacagaacaatgtcccaggggtcgagaaagtaagagcataggctcaacaattacagatgttactactcatgacacacatagttgttgtctgaatactatgaatgaattggcccttgttaggaagcaacttcaagagatggagaggaagcaagaaattttttttgatttgttgcaggtaactgtcatgctttgagttgtgaagatatcgtcaatttgatttgtgtctatatttacctaattatgagtcgtatatatatcgatcaatgtggtaatagtgtaagttataatgcaaggctaataactccagctatatggatgcataataccatttcaaattagttgcagttcttcattgtgcactttatgttcttatgctagcatacaatattgttaagcttcttggttatttacatggttcttaagacggtaaggcgccggaccaccgcctagacgcctaggcgacgcctaaggcgagcaaggcgacgccttatcaacctgagaatcagcaaaacaacccatggaggaggaagaaaaagaaaaaaagaaaaagaaaaaaggagaaggaaggggtaggaggcccagcccaccagccagcccatataatccttcctctggcaaccctaggttgcctctctcccccacgattcagctaccgctgcccctgattgagccgccgccgccgatttggacgctgccgccaacgattcagccttcgccgcccnnnnnnnnnnnnnngccgctcccgattcgacnnnnnnnnnnnnnnnnnnnnnnnnnnntttcccttcccctctgccctat

SEQ ID NO: 1899 - DNA, 350 bp, Zea mays
tctctggagcagctcagcgtgctgtcggaggagtccgtctccattgacgagacgctcagctcgaacgcatccggtgtgtatgctggatactatcttcaaatcctccacttcattatttcatttatacttgctaggtaatgagcacgggtgtgactagggtatggcatcacattagtctttagggggttatatcatgtgtgttgattgggggtcgagcacaatgaggttatgtcatatattcacgatatactttagatttctatgaattttcagaatccttctgagtctctggttggattgtggaaaacgtgcacaatcttagcttgctggaactggaattgcttcttgac

SEQ ID NO: 1900 - DNA, 618 bp, Zea mays
ctaccggggaggtacgtaaaacgcgcgcccgcgcgcatcgcaaaccaaaccgtgttttcttggttcttccgggcgcacccaaaacctgacgttttcgcccgcggcacagcggctgcattgcgacggctcgagacagcggagcccatggacaccgcgcagggcttgcgggagaaggcggacgtgaacaaggtaaaaatacaaagacgcccgccgccgtgctgcggtgcgggctagggtcaaggaaaggcggctcttttttctgatggtctctttcctggcccggggtttttcgattctccggctcgatcttccggcgtgcagggcgcggaggaggacctgagcacgacagggttcggcgccgagtcggagagggaggtgccgacgggaccggaccccatccaccaccacgcccgggggccaaggcggcagtcgccttgatcgtcatgcgcgcgcgacacggcggcggaggatcctcgcttcctggaagtttgtggtcttgatcaggcgggcgtgaaccggattccacgatgatcctgctctttctttgttcttaattgtatctgccatgcacctttggttctaattccattgttgtagtagggaagcagcatccaccta

SEQ ID NO: 1901 - DNA, 399 bp, Zea mays
  misc_feature (251)..(355): n is a, c, g, or t
  misc_feature (363)..(394): n is a, c, g, or t
agtgctactccagtattctgcaaagccagggcaagctatccaacctttcttttgtgggaaggtttttacagaacggaattgggtcaaagagactgtattaggctttgtagttttgataaccctggtattgaccacatccatcttagctgacaaattggtagggtctgaggtaagttttccatcgagcatattgattcctctcatgctgcgcattaaggttgctctactacactacaatagctttttttttnnnnnnnnnnnnnnnnnnnnnnnnnnnnnnnnnnnnnnnnnnnnnnnnnnnnnnnnnnnnnnnnnnnnnnnnnnnnnnnnnnnnnnnnnnnnnnnnnnnnnnnnngggggttnnnnnnnnnnnnnnnnnnnnnnnnnnnnnnnnaaaaa

SEQ ID NO: 1902 - DNA, 417 bp, Zea mays
  misc_feature (409)..(411): n is a, c, g, or t
tgatggacccggacgagatcatggtgcctctggacgacgggcggacggcgccgccgacgtcgacgattttctcgaccacgaccacgacgtcctactctgcagcctccgactccgtgtcgtcgtccttgagccgcgacgaggacccgctgttcccgctcatggacttggagttccccgacatcgcgttccagatggggctactagacgacatggtcgcgtcgtgggacgactccttggcgcagcagccgctgtcgccatcccctgtctacgacgacgactatgcaaaccagctgcagatcaggagcggcgttgcgtttgaccaggagccagggaacaagattgtgctcttctctagctattaggcagttaacccctttaataaatgagatatgcacctccttacaccttnnnggtcac

SEQ ID NO: 1903 - DNA, 429 bp, Zea mays
ttcaaaacgttgttttcatatgctcataaagttacacgaaattatctgccataccattattcctttcctattaagccgatgtagctccctccccgttcaaggcatccacgccgactgcaatatcgtggccacacgttttcatcttcgttgcacgcgtggcaagtccggcatcctaccttcctagggaaaaaaaagctgaaaaatccaactccgcagtactgtcttacttatcttcgctacactacatctggatgctgcttcttatcttcgctacacaagcatgtctccaactccgcagtgctgtcttggaaaaaaggggtctgtaccttctctcaccccgacggcgcttcctacttcctagggcgaccgcggcggcgccacatgcttcgccagcgtcggtcttcccgtcgtcatttctacttcttctgc

SEQ ID NO: 1904 - DNA, 429 bp, Zea mays
agcagatccagacggggccgactgcgcaacctgttcgaccggtcctgcaccgcctctcgatcgccgagcttggctctcgatcccgccgctggggcacggttgggggcttgactcacatttggtgctaaaaatttactattctagagcattttgcctcctcattcattaactcagattgttgagatggcaaaagatgatgtttattccgcctgaaatcttatttgcacaatacataggcatttttatggcatttctagcagctgaaacaataaatactgtttgtcggttcactgaagcatatatcgtttctaatttggtaattgagcctcacttagatgatggcatcaaatgtttgaccttgatgttctgctaggtaacattagttggttacttttatctggatcatgttcatcacggtagcatcatatg

SEQ ID NO: 1905 - DNA, 212 bp, Zea mays
gaccgtcgctcctgcgacctacctttctgctgcttccacatacacgctatctcctgctcgtcatggttgacacagatgctgctcgcctcgccagggagctacgagaaaaagcagcagctgacgcagaggccgaacgtgcacggcaagctgaaatcatattccatctttaaccaaatcattctattctaacagtttggttgagttctggtctc

SEQ ID NO: 1906 - DNA, 901 bp, Zea mays
  misc_feature (633)..(633): n is a, c, g, or t
cagttttctccacatcttatcttcagctcctctatcggtagctgttgcagagtgaagtacatgtgatgagttagcttggttagggtgagcaactctgagctgaaactttggcagttgaattcgagaatcggatggaaccaaatctgattgcaaaagcaagccaagacttggttttctccaatatctcatgttcagttggtcagatgatgtgtatgtgtactggtgcactgcagcttggacatgacttgtctgaagaatttgaagctgaaggtgagtgttggagggaaccaaatctccagctgcatgcacagcacaaggtttggttacctccaatgtctcatcttcaactgtctcaaatcaatgcaactttgcaggcattttcaggatcattatccttatccttcacagagtgaccaaatacagtattttcagttaaccaaatagtgagctacaattgattggaagctaatggtatctgagttgatgagttgctccatatcttgttatacaattgattggaagctacaagcaagataggtgatatcactatctggaatatgtaaatggtgtggacaaataaaatatgagaactatgattgaaaacataatattattaattatccactatatgcnccacatcaattttgtaaacatatttatacaccgattagaatgttttgatttttttttgtatttttggacacttttttttgtttatttccactgttgctcgccctctctaattgtcttctgttttagtgtttaccaacactggtcggctcgagaaaaaaatctgggagaagaaaagaaaagggagagggcaatagtgtggactctggaggacggtgtggtgcttcagctttcatcatgctagatgctggtgttgccaatctaagcctca

SEQ ID NO: 1907 - DNA, 376 bp, Zea mays
gacatgtgtattcatgttttcgagtgatttggcactatgaatgcgctagatggttggttgctttttttttgttaattgctcaggtgatatatgctgtatttctagtcactagtgttgtattgtttgtgcttgtgctaagatgatctcttttgcacttgtaacaggggctcattcaagtactctactgatcgaaaatggatggcgtctgtgatggttcattcttttgcacgtcttctacacgggtacattgacggttgatggagatggatggtggtgtagctgttttgtttagcaattagcactctaggtgttggaccactgttttgttaatggatgctatgtaacagtagtatataactaatgtgaacttgtttag

SEQ ID NO: 1908 - DNA, 638 bp, Zea mays
tttttttcccgatgcgacaccactcaacctgatttatgatcccataaaacatttgcaaatccgcagctcgaattgctatcgaatgcggtgtcgccggcattatcgtgtccaaccacgggggccgccagctagactatcttcctgcaaccatcagctgcctggaagaggtatgcaaatcaatcacagcacagctgcctaggacacctctggtccatggcctgatgctaacttaccttggaaaggggaaacttcaggttgtgagagaagcgaagggccgccgtgtgcctgtgttcctcgacggcggcatccgccgtggcactgacgtgttcaaggccttggcgctgggagcctcaggagtgtttgtaagtctgcaggagcatttgtttgttgtacatgtactgcgtcatgcatattcatgcttgtcctctgtcagattggaaggcccgtactgttcgccctcgccgtggacggcagggcaggggtgaggaatgcgctgcggatgctgagggatgagctcgagatcaccatggcgctgagcggctgcgcgtcgctgaaagatatcacccgcgatcgcgttatcaccgagagcgacatgatccgtcgctctcggatgtaggcttcgattcgtttgctgttgt

SEQ ID NO: 1909 - DNA, 1469 bp, Zea mays
  misc_feature (398)..(399): n is a, c, g, or t
  misc_feature (454)..(454): n is a, c, g, or t
  misc_feature (461)..(461): n is a, c, g, or t
  misc_feature (471)..(471): n is a, c, g, or t
  misc_feature (473)..(473): n is a, c, g, or t
  misc_feature (477)..(484): n is a, c, g, or t
  misc_feature (489)..(492): n is a, c, g, or t
  misc_feature (495)..(499): n is a, c, g, or t
  misc_feature (502)..(507): n is a, c, g, or t
  misc_feature (510)..(511): n is a, c, g, or t
  misc_feature (517)..(535): n is a, c, g, or t
  misc_feature (541)..(545): n is a, c, g, or t
  misc_feature (548)..(564): n is a, c, g, or t
  misc_feature (568)..(572): n is a, c, g, or t
  misc_feature (574)..(580): n is a, c, g, or t
  misc_feature (582)..(590): n is a, c, g, or t
  misc_feature (592)..(594): n is a, c, g, or t
  misc_feature (597)..(597): n is a, c, g, or t
  misc_feature (599)..(599): n is a, c, g, or t
  misc_feature (602)..(602): n is a, c, g, or t
  misc_feature (605)..(622): n is a, c, g, or t
  misc_feature (629)..(642): n is a, c, g, or t
  misc_feature (649)..(657): n is a, c, g, or t
  misc_feature (663)..(668): n is a, c, g, or t
  misc_feature (670)..(670): n is a, c, g, or t
  misc_feature (672)..(678): n is a, c, g, or t
  misc_feature (680)..(685): n is a, c, g, or t
  misc_feature (688)..(700): n is a, c, g, or t
  misc_feature (702)..(706): n is a, c, g, or t
  misc_feature (709)..(709): n is a, c, g, or t
  misc_feature (713)..(726): n is a, c, g, or t
  misc_feature (728)..(734): n is a, c, g, or t
  misc_feature (744)..(744): n is a, c, g, or t
  misc_feature (750)..(756): n is a, c, g, or t
  misc_feature (758)..(760): n is a, c, g, or t
  misc_feature (764)..(770): n is a, c, g, or t
  misc_feature (774)..(776): n is a, c, g, or t
  misc_feature (779)..(780): n is a, c, g, or t
  misc_feature (791)..(794): n is a, c, g, or t
  misc_feature (805)..(805): n is a, c, g, or t
  misc_feature (807)..(814): n is a, c, g, or t
  misc_feature (818)..(819): n is a, c, g, or t
  misc_feature (827)..(828): n is a, c, g, or t
  misc_feature (830)..(846): n is a, c, g, or t
  misc_feature (848)..(856): n is a, c, g, or t
  misc_feature (862)..(864): n is a, c, g, or t
  misc_feature (877)..(879): n is a, c, g, or t
  misc_feature (881)..(893): n is a, c, g, or t
  misc_feature (899)..(901): n is a, c, g, or t
  misc_feature (909)..(916): n is a, c, g, or t
  misc_feature (919)..(924): n is a, c, g, or t
  misc_feature (927)..(927): n is a, c, g, or t
  misc_feature (929)..(933): n is a, c, g, or t
  misc_feature (935)..(937): n is a, c, g, or t
  misc_feature (939)..(943): n is a, c, g, or t
  misc_feature (945)..(945): n is a, c, g, or t
  misc_feature (949)..(960): n is a, c, g, or t
  misc_feature (963)..(968): n is a, c, g, or t
  misc_feature (970)..(972): n is a, c, g, or t
  misc_feature (974)..(985): n is a, c, g, or t
  misc_feature (988)..(1006): n is a, c, g, or t
  misc_feature (1010)..(1013): n is a, c, g, or t
  misc_feature (1015)..(1017): n is a, c, g, or t
  misc_feature (1019)..(1019): n is a, c, g, or t
  misc_feature (1021)..(1026): n is a, c, g, or t
  misc_feature (1030)..(1049): n is a, c, g, or t
  misc_feature (1052)..(1057): n is a, c, g, or t
  misc_feature (1059)..(1068): n is a, c, g, or t
  misc_feature (1070)..(1073): n is a, c, g, or t
  misc_feature (1075)..(1082): n is a, c, g, or t
  misc_feature (1088)..(1096): n is a, c, g, or t
  misc_feature (1098)..(1106): n is a, c, g, or t
  misc_feature (1108)..(1112): n is a, c, g, or t
  misc_feature (1115)..(1121): n is a, c, g, or t
  misc_feature (1123)..(1130): n is a, c, g, or t
  misc_feature (1132)..(1135): n is a, c, g, or t
  misc_feature (1139)..(1156): n is a, c, g, or t
  misc_feature (1158)..(1160): n is a, c, g, or t
  misc_feature (1163)..(1174): n is a, c, g, or t
  misc_feature (1176)..(1187): n is a, c, g, or t
  misc_feature (1191)..(1193): n is a, c, g, or t
  misc_feature (1195)..(1198): n is a, c, g, or t
  misc_feature (1203)..(1210): n is a, c, g, or t
  misc_feature (1217)..(1218): n is a, c, g, or t
  misc_feature (1220)..(1220): n is a, c, g, or t
  misc_feature (1223)..(1225): n is a, c, g, or t
  misc_feature (1228)..(1228): n is a, c, g, or t
  misc_feature (1230)..(1230): n is a, c, g, or t
  misc_feature (1236)..(1238): n is a, c, g, or t
  misc_feature (1248)..(1250): n is a, c, g, or t
  misc_feature (1254)..(1258): n is a, c, g, or t
  misc_feature (1260)..(1263): n is a, c, g, or t
  misc_feature (1265)..(1268): n is a, c, g, or t
  misc_feature (1274)..(1274): n is a, c, g, or t
  misc_feature (1276)..(1276): n is a, c, g, or t
  misc_feature (1278)..(1283): n is a, c, g, or t
  misc_feature (1285)..(1285): n is a, c, g, or t
  misc_feature (1289)..(1297): n is a, c, g, or t
  misc_feature (1300)..(1300): n is a, c, g, or t
  misc_feature (1302)..(1313): n is a, c, g, or t
  misc_feature (1317)..(1323): n is a, c, g, or t
  misc_feature (1326)..(1334): n is a, c, g, or t
  misc_feature (1337)..(1352): n is a, c, g, or t
  misc_feature (1358)..(1368): n is a, c, g, or t
  misc_feature (1371)..(1381): n is a, c, g, or t
  misc_feature (1384)..(1390): n is a, c, g, or t
  misc_feature (1393)..(1403): n is a, c, g, or t
  misc_feature (1405)..(1419): n is a, c, g, or t
  misc_feature (1424)..(1426): n is a, c, g, or t
  misc_feature (1429)..(1436): n is a, c, g, or t
  misc_feature (1438)..(1441): n is a, c, g, or t
  misc_feature (1448)..(1448): n is a, c, g, or t
  misc_feature (1450)..(1453): n is a, c, g, or t
  misc_feature (1459)..(1462): n is a, c, g, or t
tcttccctcccggaacctgagggcaagggcgttgccgcccagccgtgccacccacgatcgggtgcgtagccatggccgtcgaagcgcatcgcctcctcttggcaggaggacacaggcagcagcaacagcagcagcagctcgccagcgcggggtggccttgggccggcgccgacgaagataggtgcgcgacgacggcgagaccgagccaacatcatcaccatcaacaacaacagcagcaacagcaggagttgaggctccacaacgcctcgtgcgtgggcgtcctggctccacgggtctcgacgatcgctgccggcggacagatgttcctgggcgacgcggcggagagcgacgtcacgttcggaggaggaggagctgtgctacagatgctggagtacttnnttgatatgatccaaatttgaggctttcattgtgatcatcacctgaggatgctacngatggtntcctgaccgnanggannnnnnnngatannnngtnnnnntgnnnnnnttnnactttnnnnnnnnnnnnnnnnnnncccccnnnnncannnnnnnnnnnnnnnnnctcnnnnnannnnnnncnnnnnnnnncnnnccntntancannnnnnnnnnnnnnnnnntcttacnnnnnnnnnnnnnnacgaccnnnnnnnnntacttnnnnnncngnnnnnnntnnnnnnctnnnnnnnnnnnnncnnnnnctnaccnnnnnnnnnnnnnngnnnnnnnctccccttcnctcctnnnnnnncnnntttnnnnnnntccnnnccnnccctttcccannnntcctccctccntnnnnnnnnctcnncctctacnncnnnnnnnnnnnnnnnnntnnnnnnnnnatcagnnncaatcttacccannnannnnnnnnnnnnnctcccnnnatgaaaannnnnnnncannnnnntanannnnncnnncnnnnntncaannnnnnnnnnnnacnnnnnnannncnnnnnnnnnnnnacnnnnnnnnnnnnnnnnnnntacnnnncnnncntnnnnnnaccnnnnnnnnnnnnnnnnnnnnttnnnnnntnnnnnnnnnncnnnntnnnnnnnnccctcnnnnnnnnntnnnnnnnnntnnnnntcnnnnnnncnnnnnnnncnnnnttcnnnnnnnnnnnnnnnnnntnnntcnnnnnnnnnnnngnnnnnnnnnnnncctnnntnnnncttannnnnnnntcccctnntntannnccncntcttcnnnttctacattnnncccnnnnncnnnnannnnctcctncncnnnnnntnttgnnnnnnnnnttncnnnnnnnnnnnntacnnnnnnnatnnnnnnnnntannnnnnnnnnnnnnnncttgannnnnnnnnnntannnnnnnnnnnaannnnnnnatnnnnnnnnnnntnnnnnnnnnnnnnnntcctnnntannnnnnnntnnnntcttcantnnnntccctnnnnccacata

SEQ ID NO: 1910 - DNA, 392 bp, Zea mays
gtgcggggccgtccaagcgcgcgaccacgtaggtcgactccgccagaccgccactccggcagtccggcctctgtgtcaccggaaacttgtcccgataagtataccccctccatgtcttgtgatctgaactgctgtttgcctgtttctcccttacgataagttacatccgtccacagcatttcatgaattgaatggtgtaagtggtaatctatggtgtctccatcggtggaggcgtgggagatccgagatccgactgaaggctgcaaacacgaataccattgctctcatcaattataaatcacaaatcgctatatattccatttctgcaaactgcaacgctaacagtttttgttccattcgattcttcattttctgctgagtcttgtcttatt

SEQ ID NO: 1911 - DNA, 373 bp, Zea mays
agtactatgtcaaactttttgtcggatatgttccgaggacagtgactaaagaagacgtgagcattacttccatgctactatcttgtcttcttgcgtagtgatttttatttttttctagcatcttttatttgaactttattctggatacgatttcatttgtacttatggtgtgttatcattgtttatcaccgtgcacaaaacaaactagaagcttctaactaagaccctgtttggatcctgtacggtccaaagttggctaaagttaaggactaagtgctcatgttcatattctagaatggcaagcaaatggtgcacggagagcattgacagctctagcgtcagtagcagattcatcacaggcgttgttcactta

SEQ ID NO: 1912 - DNA, 224 bp, Zea mays
tttcacagaaaccaatatcttgggtgttttttactggacaatcatagttagttgtgctcatcgtcgtgtacatgaaacaccgagtagtaagtcagctatgtttcacaaaacagatatcaaatcggaaccagtggtgagcgggtgtgtttcacaaagttaggtttgaatacaaggaccatgtttgttttacatttaaatcatattttacgactgcactaccatga

SEQ ID NO: 1913 - DNA, 249 bp, Zea mays
  misc_feature (7)..(7): n is a, c, g, or t
  misc_feature (21)..(21): n is a, c, g, or t
atgactngtgttccaaaaatnactgcattatcatatggaatggttcctgtcactgcataacttatctttcctgtggtctctttccgttgtttattctttgttgatgcatgggtttgagggtgttgtcttttcttttggaccttattgatctccacatccttcttaggacaaccattaacaagatggccggtatcaccacagccaaagcaagcacgacttgataagttacatggtggagttgtctttacg

SEQ ID NO: 1914 - DNA, 455 bp, Zea mays
cgccgtcatccctcgcgtcctcccacctctccccaatcgcggcggtgtccactcccgccgtcccacatcagcttcgcatcggctgctcccgccgccgcgccgggcgcatcgttgccatggctggatccggcaaggtgcgccgccgccgccgttctttaaccagccgtctttaatctgcccctgtgatttctgcgctcatgctcccgcttgactctcctttgcagttcttcgtcggaggcaactggaagtgcgtaagtgcttgttctgcctctccagctttacgcgccttggggtctagaactgatgatcctggagatgctatgtaactgtatgatcttttggctgctgccgcattgggcatttcaacgggaacgggacgagattttgtcgtcatccatatatacatcgtggtttactctgtccatggccacttctacaaatagaatcgcttgtct

SEQ ID NO: 1915 - DNA, 693 bp, Zea mays
gcgaggtcgtggcgtggactccaaatccttcctcttcaggactcaacagcggagttcgctccgaccacgggccctgctgccatggcggcggcggcagatcttggtgagtccgggccaccgcggtgggcatagccgataggctcgttgctcgttcttccttcgcatgcgttggtttctatgcttatgcacttgtaggctcacctggatttctcgttttggcattattgtactgcaatgcatctacaaaagtcttatagatatgcattcatagtcaaagcaatctatctaaaaaaaatcttacaatttgagtatttgccagttaatgtgcggtgtccgtggtagcggggagcctccttaaatctggtgcatccataatgatttcttttccttgtctggatcagagcctcagttggggatatcgccggcgacacccgacattgtccgcaagctagctcgaccgtccgggacaaccaccgcagttggctattgctgcactgctctgtacaccagcacggctgctggccccggaaaggtggacggcgatggccttgcctcggtgccgttgcatgcccatgaacattctcagtccgccgcactggataatttggtccaagtggactgtgatcccgtgggcactcaggagtccagcaccttgcctgcactggtgggcgagtcctctggcaaggttgcaca

SEQ ID NO: 1916 - DNA, 693 bp, Zea mays
  misc_feature (687)..(688): n is a, c, g, or t
gcgaggtcgtggcgtggactccaaatccttcctcttcaggactcaacagcggagttcgctccgaccacgggccctgctgccatggcggcggcggcagatcttggtgagtccgggccaccgcggtgggcatagccgataggctcgttgctcgttcttccttcgcatgcgttggtttctatgcttatgcacttgtaggctcacctggatttctcgttttggcattattgtactgcaatgcatctacaaaagtcttatagatatgcattcatagtcaaagcaatctatctaaaaaaaatcttacaatttgagtatttgccagttaatgtgcggtgtccgtggtagcggggagcctccttaaatctggtgcatccataatgatttcttttccttgtctggatcagagcctcagttggggatatcgccggcgacacccgacattgtccgcaagctagctcgaccgtccgggacaaccaccgcagttggctattgctgcactgctctgtacaccagcacggctgctggccccggaaaggtggacggcgatggccttgcctcggtgccgttgcatgcccatgaacattctcagtccgccgcactggataatttggtccaagtggactgtgatcccgtgggcactcaggagtccagcaccttgcctgcactggtgggcgagtcctctggcaaggnngcaca

SEQ ID NO: 1917 - DNA, 463 bp, Zea mays
  misc_feature (454)..(456): n is a, c, g, or t
catggtagcatcgatccatgaaagcggtgaaagctagcttcgcccctgcggcagcgtcttcgtgaaacgaatcgaaatgaactgggggtgtctgtctgtctgtctgtctggctggctctccttttcggcatgcgagcgtcgaaattgttttgctttattagtattaattaattttttttgtttcggtttcggggcgggcgggtggattccgaggacggagatgcatgcagtgcagatgcggtgcctcccgatcgcggatttcaaaactgcttccgaattggagaatgtcggcgggaagaatgaggaatggatttgtggacttccaggcaggttggcacttggcacagcgcagcgcagcagtctcggccaaacaaaaaacaaaattggtagtttttttttcctttttgctgcattttttatttggtctaggttttgtggtactcagcatttctgnnnacacctt

SEQ ID NO: 1918 - DNA, 463 bp, Zea mays
  misc_feature (8)..(8): n is a, c, g, or t
  misc_feature (86)..(86): n is a, c, g, or t
  misc_feature (99)..(99): n is a, c, g, or t
  misc_feature (103)..(110): n is a, c, g, or t
  misc_feature (158)..(162): n is a, c, g, or t
  misc_feature (170)..(173): n is a, c, g, or t
  misc_feature (391)..(399): n is a, c, g, or t
  misc_feature (424)..(424): n is a, c, g, or t
  misc_feature (428)..(428): n is a, c, g, or t
  misc_feature (438)..(438): n is a, c, g, or t
  misc_feature (443)..(443): n is a, c, g, or t
  misc_feature (454)..(456): n is a, c, g, or t
catggtancatcgatccatgaaagcggtgaaagctagcttcgcccctgcggcagcgtcttcgtgaaacgaatcgaaatgaactggnggtgtctgtctgnctgnnnnnnnngctggctctccttttcggcatgcgagcgtcgaaattgttttgctttannnnnattaattnnnnttttttgtttcggtttcggggcgggcgggtggattccgaggacggagatgcatgcagtgcagatgcggtgcctcccgatcgcggatttcaaaactgcttccgaattggagaatgtcggcgggaagaatgaggaatggatttgtggacttccaggcaggttggcacttggcacagcgcagcgcagcagtctcggccaaacaaaaaacaaaattggtagnnnnnnnnncctttttgctgcattttttatttgntctnggttttgtgntactnagcatttctgnnnacacctt

SEQ ID NO: 1919 - DNA, 368 bp, Zea mays
atttttaccaggttctaagattaatgagagctcccctcaagaagcagtagcaggccacagcaggtgagtgaagccagaggtgaagcttgcattttcaggacatttgatattcagtttgggtcaaacttgatttttttggcattgttacaagatatgagcaagggtttcagcataatggttggcctatctttgaactgcaggcacctccatgttcaaagatgattattgctttattatgatgttacatgactggcttgaatgtcatcattttggagtgtctgacctatatgcttctcttgctttgtgcagcccgaatagtagcattgatattctggcatcagtccggcttaaatgaacagtatgtatgt

SEQ ID NO: 1920 - DNA, 757 bp, Zea mays
  misc_feature (701)..(703): n is a, c, g, or t
  misc_feature (706)..(706): n is a, c, g, or t
  misc_feature (708)..(721): n is a, c, g, or t
  misc_feature (727)..(730): n is a, c, g, or t
  misc_feature (732)..(734): n is a, c, g, or t
  misc_feature (736)..(737): n is a, c, g, or t
  misc_feature (747)..(749): n is a, c, g, or t
  misc_feature (751)..(751): n is a, c, g, or t
cacttatgttgtaagctctctatgtacttagtgcataagttgtgttctatctgaaggagtgctctgccttctaggatcacaatgcttcatttgtaggtcggttctgccactcggaagcaagtatgactagttctgctgcctatcgtgcactaaagtatggctgtctttgctgcctatcgtgcactaaagtatggctggctctgctacttatcatgcactaagtaaactagagactaaatgtgaactattgtaatatattgatgtatgttattttgattgttgtatatctacatgtgtcgtcccataagtagaaccaattctagaagagaacccggaggagccagaagacaaagaacgtgacaccacggacgtgcaactaaatgaaggtaagtctcaccgacctcttactttgatcatgtttgttcctaagtgaaaaatatataaaacttgctagacataggagttgcatgagataacacacctaatattgagtgaatgagagaaactatgaattgatgacgtgatgcatgttgattgcatgaatattgataccttgacacttgatgaaactagatgggaatgaaaccagagcagcatggtaagtgctggtgcatgcgctaccgtggtggtagacttgcaatcgagttgtcgtggtgatgtatcgggtttgctagttttggttggtggctgctctagtgaannntangnnnnnnnnnnnnnnctaatnnnntnnntnnataagtcatnnnantgccta

SEQ ID NO: 1921 - DNA, 311 bp, Zea mays
gaatatcttgtgcaaccaatcgctcagcctcaagccatggctattggaagtgaattagatggagttgaccctgatgatgctgacgaggacaaggaagaagtcgacaacgatgatgatggggccacagatcagccttcatcctcgcatggagccaagcggaagagagatgatgatgatctgtcaggcagtggtgatgacagtgaggatgacggtgttgaggacttgaggcccttcaagcacaagtgatggagcagccaatgtacattgatccctccctcccccttcttcagctagaagtaagcagcaagatc

SEQ ID NO: 1922 - DNA, 355 bp, Zea mays
agctggaatcctgcaaggccccacatgctggcttctgctagcgacgaccgcacggttcgaatatgggtagggcgcaaaaatgcaacaaagtaaacgctgttgaagtgtgaagttttgtatgtctgtgtaaatagttgtacatctggactgcatccacaaacctgtttgggacaatgctctgttcttcacccctgatgaatatgtcgtcgtagctatttgttcagaaataaacctgcaacagccataggtagccggtgctgctgtgtccagatgtgtgcctggctaaccggtgagttttgacatgtgtacaggacaaagatgcatcagaactttgtacatcttgttagtatatgcc

SEQ ID NO: 1923 - DNA, 294 bp, Zea mays
tctgcgtattgcaggatagcaaggggagcctgtaacaatagggtgatggatgatcccgttcgatttgatcagagcttggagcatatcagctactaggaggaacaggtaaggagatagaggctcactctgtctaaggcccttcttacatgagaatggggattacaagaaaaagaaatcggaacttcagaatattatttgctctttagatgctgaagccgaagttagggatctgaatgtggatgaactagaatgtttggcccagtctagagatcacctgatcaagctattgagaga

SEQ ID NO: 1924 - DNA, 410 bp, Zea mays
atattcgctaatctttagtctgattataagaaccggtactaaaacttaatctttagtactagttattggcatgcaccggtaataaaaggtttctctttagtactcgttctagctaagaacctttaccaaagagtaactttatcaattcgggctcttggcttgtcataatcgttgaaattgtataatcattgaaatttcgttcgagatcgtggcttgttataaatacatgctctgtcaatcactcttgagtagatttaggacctaattctttttcatagatgtagggcgtgatttctgcatactaacgtgcaattcatgtatgattcatttgagttaatgttttgcctctagcatgggtgaggatcgtcgatggatgtatgaaggctgaaagaagacatagactgcatcga

SEQ ID NO: 1925 - DNA, 410 bp, Zea mays
  misc_feature (78)..(79): n is a, c, g, or t
  misc_feature (88)..(88): n is a, c, g, or t
  misc_feature (127)..(130): n is a, c, g, or t
  misc_feature (145)..(145): n is a, c, g, or t
  misc_feature (150)..(150): n is a, c, g, or t
  misc_feature (287)..(287): n is a, c, g, or t
  misc_feature (295)..(295): n is a, c, g, or t
  misc_feature (308)..(308): n is a, c, g, or t
  misc_feature (367)..(367): n is a, c, g, or t
atattcgctaatctttagtctgattataagaaccggtactaaaacttaatctttagtactagttattggcatgcaccnntaataaaangtttctctttagtactcgttctagctaagaacctttacnnnngagtaactttatcanttcgngctcttggcttgtcataatcgttgaaattgtataatcattgaaatttcgttcgagatcgtggcttgttataaatacatgctctgtcaatcactcttgagtagatttaggacctaattctttttcatagatgtagggngtgatttntgcatactaacgngcaattcatgtatgattcatttgagttaatgttttgcctctagcatgggtgaggatcgncgatggatgtatgaaggctgaaagaagacatagactgcatcga

SEQ ID NO: 1926 - DNA, 492 bp, Zea mays
gtatctttagcttcaaatcatcttgagcctaaagcaatgttccatttcagataaagttaagcctggtgtatttgcaaagcctgtgatggataacaaaagcaaacgtgaatttacattttcatgcttctaagttcatttcttttttgggtacataaaaggggaggctgcttcgaacccatgatctggtgactcgataaaacagctcccaccactgcaccagacctgcccttcttttttttggtacatacagtccagtaattattaatattaacttaagaacgatgtaagcatatcctaatagagtgcaaaccgttgcaacttacaggtttgataagattcgcaagcgtggtctcatcagtcctcactatagcatccggatcaagtaaaccgttttcagagaggcgttccacagcagctgaaaataattgactccaaaatgcaatcagcaaatttctaaaggacaactatttagtacaaacacatcagcgaatc

SEQ ID NO: 1927 - DNA, 426 bp, Zea mays
tcatgctgcgtcctcgccactctcgcagccacaccacaccctcgttgtcgtgtcatcgccgcaccgccgcacttatgtgctgcgcacctgcagcccttccgcaccccgcgctccaatcatcgtgcttgcaggtagagtcgccttgcgacgtcgtcatcacgactccccgcaagtcgcacgtagccgacactgtgcttgtgcgagtgcgtgattggagaacctcgtcggagaagaaaataagtgcaaggtgatggaactttctttatgttctatgccccagttaagtgttaattaagtaatgcgtaagtgttcggcgaaactgctcttttgcactcagtggcgtgaacgcgcaggtagatcgaagaaacaaatgtgtcatgcttgtttgatgtgataagtaagttggaaatacaagatatgcgaggg

SEQ ID NO: 1928 - DNA, 225 bp, Zea mays
tcagcagtcccggatgatgagcagtcgactgcggagacggtgtgccagatctcggacgcggaaaggtctgcggagagctgcgtgacctatgttggcgtggagctgaggcagaggagtgtctccgagggcgggagggtggtggaagcgtccgcggatgatgggaccagcagctgcggagacggtgtgcctctctccatggacgccgcagctgtgctcgacgccttc

SEQ ID NO: 1929 - DNA, 981 bp, Zea mays
  misc_feature (63)..(71): n is a, c, g, or t
  misc_feature (106)..(112): n is a, c, g, or t
  misc_feature (115)..(115): n is a, c, g, or t
  misc_feature (119)..(119): n is a, c, g, or t
  misc_feature (874)..(878): n is a, c, g, or t
  misc_feature (913)..(923): n is a, c, g, or t
tcatgatctcgtatctgatgattttagggtgtgtattttactgccttgtgccttttttgttgnnnnnnnnnccctttatcaactgttcgactaatctgacacaatnnnnnnnctntggnttgtgtttagagggaaagtttaagctattttcttacaataaaagactcctggaaagaattagatgaccaagcaaacaagatggtcttctgaaactaagtaaaacgttccacctttgccagtgagttatctccataaactattcattctttgccttttacactgagctcttcttaatagtagtttgcattttttgacaggaccctgaaaacaagtggagacctttcagattggttgagctcagcgtacaattatctggccatggtggattacccacttccgtcaaaatttctcaggcctttgccagccaatcctattaaaaagttagtccttaaacatcaatttccatacatcgtactacacatttctgtgtatgcttctgctcaaagaaaaaagatggacccagtgctggtagctcccacatcactggggtatggggaaagaagaaccgattaagcgaggcaagtcttatccctgcatttttgcagagaggatgcattgaacacaaaacctttggcttagtgaaaaggtttctcaccactgtgtcagacctgtccttcatgtttctgctgaaaataataataaataagtaactttcagtaacattcctgaatatgttactattccattgcattgttcacaacatcctgtcccaataggtcaataatcgtgacatgtcaacattgcaatcatgagaaccgtgttcttgtgagctaccttttacattctgtaggcatcatgtgttttattaatactnnnnngcattgcttactatattgtcctttctctgtttcannnnnnnnnnnatatcgacagtcaacctaagggtactggtactctgtaacgtatatatgcaggagtaaa

SEQ ID NO: 1930 - DNA, 346 bp, Zea mays
  misc_feature (336)..(340): n is a, c, g, or t
tactacattaaaaccagaaacttcaaagtttggcttgagttccttctctatgagcccccctgtactgctgcaaatggagtttccattgtagctgataaagtgcaggcaaggcacatgctaatgtgcataggtggcattgaaattgggctcacagtcactgaaccagtttgatattttgtagtcatatacagctgggagcaacagaagttaggtgtcgatcatcattatcccatttggttcctgttacaagggatcacattggaaggtcatcacatgattgacattgtctgtaagttggtacaatccgtttgcatgtaaaactcagctgtggagtgnnnnnttctct

SEQ ID NO: 1931 - DNA, 368 bp, Zea mays
atcaccattagtgatccaatctcagctacgttcggtgaaccatttgagaaagccaacccaagccattcctccacagcaatcgtttgtcgagctggttcaggaattgatatggttgttggccttgtttcttctagtctaggtgctgttgctagtggccaaggcaatttcaaagtcttagtttgggatcctggtggttatgcatatcacagcttggggacaagctgtatttcaagcggtggggaatgtcagcatctcagacaggagcaatgagcagacaacgagaacaagccacggcacgtgagagtccatcgtccaaacgccaaggttactgagccaatatgggccaagtagtgggtcagctatctatg

SEQ ID NO: 1932 - DNA, 963 bp, Zea mays
  misc_feature (897)..(898): n is a, c, g, or t
cgattcacgcacaggctcatcggcggcttcggccgcaactacgggggatggggatcaggcggcgcccagctgcccagatggctgttctacctcagcaaggcggcgcaccgccgtggtgtcaggctctgctttctccccaggggcatggccaggagagagcagaaccggtcgcaactcgcaacacaattacaggtgctttgccttgttgatttaatttttacttgccatcggtgtgaactggagatgttcagcaggcttgctctgcagttgttgaatgacatggcatgcagttcctttctcattattatttggaaggatcttgtttcagttcaagtatttggtgcctctaacagtgttatgagaaaagatgagatggaactttgatgataagcccatagagctgtctagttaccattcagcttaatatgcactagttaggtgataacgataatggctcattgtctgtatctagtgcaaacttatattgatatattccacccttctcagggcctgtttggatccattatccgctaatagttatctagctaatagatcacaactaacattagctgcaattagctagtttggtccaactagagaaatagttgttagttgtgtactcagctaacaattaactagacctgtttggatcaaggagataatttttaacggctaactattatctgcattggatgcaaacaagacctcggtcattttttcctacaacaaaaatatatctcagcgagccatgccacttgcatcaccttttcttgctttgctagattatgccatacgaaagctgctctaatctgaatctctatgtgcaggaaggattgcatattctggacacttgagtggaaattcaattcaactgatgttgtcctaactgatcatggnnaagtttatgatagtccagtttctctatggaaaaacatcttattcctggccctggaaggatcagct

SEQ ID NO: 1933 - DNA, 744 bp, Zea mays
ttgcttgctgtacgagtactagcatgattccccccaccgccccacctttaatcatagcacatctctgaagcctgaagcagaactccggctcgcacgaatcatcagacggggactggtcgatcgacgatcagcgcagagctagctagctgcattgacataattgtcttgtgtgctgccttgttttctgcaggtccttagtgctccatacttgaagaacaacggccatcaagtgccctacctgaaggtaggtgccgtgccgtgccagtagtcagtaccagtcactgtgcatgcatgctctccttttcattttgatggatcatggtagtcgttcgtactacctgctgctgaactgaatgaactgttcaaagctgatgccggctttatatgcgtgcgtttcgtttcagagatcaagtcctgacaggtccgaggacgacaacagccatgccggcgagagatcactcaagggccgggggctgtgcctggtcccgatatcgagcacgttcgcggtagccagcgaggtgcccgtcgatttcgggtggagtactgcatttgctgccagctttaggtagaagagaaggctgggaacgaagagcgcgccaaagctctgatcagaggcgtcgaacgagtatataactagctagctagccagctaccacagatcgatcgacctgccctgctgacgatattatatgcatatgtcgatgcgtttctgatctagtgagtctagcagtgtatggttatgcg

SEQ ID NO: 1934 - DNA, 520 bp, Zea mays
cacaggatgcaatcgtaagagttgtccgttagatcggttaactgggatccttttggtcaccgccgctactcagatttggcgatgccggcggccaaggaacccgcccaggaccgctctcttccgcctcggcgcctcttctccgccattgcctcctcgggccgtcattgtcgccggcgtgaccttccaccacgtcccaggtgaaccctccccccctcacccgaatccttcagtgcagcgcaagcccccgccgcatcgctgttgtcatctgactgaacacaacttctgctctactatattcatattcatttctccgtttcttttatgctgggtgaaagtgatacacatctgcgaaaagatgaggttgctgcacatctgcgaaaagatgaggttgctgcacatctgcgaaaagattagtgtgccactaggtgatgctttactgcctgatgctgcatctcacatctttgatgggtctggcctgattcataatccagcaccccagcacctagccgtatatactgtc

SEQ ID NO: 1935 - DNA, 461 bp, Zea mays
  misc_feature (384)..(443): n is a, c, g, or t
cgaagccccgaaactttccggatctttcttccgccgcttcatcttctttgcgcaaaactagttttgtttctcgttcttctcttcgatttcggccgaataaagatggcgtcggctgcgcgcctcctcgcgccgttctccaggcgcggcgtcgtctctgtggctctggcgggggtggagaggcggcggccggaggcggcgtcgctcctgggggcgcctgtgctggctacggtggaagcctgcgcttcgatcaaggtggtgttacagtccctgtgcgtggctcgtgagcagcggcagcgcatcgtgcttgtagattttttcttggatggtgctgcatgtatagagttgttaaggagcagtgcgtcttgaggattatttctgagtatnnnnnnnnnnnnnnnnnnnnnnnnnnnnnnnnnnnnnnnnnnnnnnnnnnnnnnnnnnnnttctaaaggacaactatt

SEQ ID NO: 1936 - DNA, 546 bp, Zea mays
gtcgatccgttccttcaaaattgattccaatcggattgctccctcaaagttgctcttcaaattctagggaataaatgctatagttggcgcacgcgcagtcgatatgggaattttgaccacccctcaactgcattggatggtccggagcaaaaacaaaggtgtcatggcttccgagtcagattattttaggcagcttattggatcgttcaggttattttctagtcattgtcctgctgcttttagtctcccacgaactactatagtgtctttgatgatgagtttctagcatcaaatttcaccaggcgtatgttggaattagtgccaaaaggtaaaggtggggatgaggttgccaagaaacttattgtcgatggagcaaatggcattggtggggtgaagctcgaacaaataaaggtggagctttcaggcatagatattagtgtgaggaattcgggcaaggaaggagaagggatactaaatcacatgtgtggcgcagactttgttcaaaaggagcgagttactccacatggatttaaccctgaagatgtt

SEQ ID NO: 1937 - DNA, 457 bp, Zea mays
agccgcctcgccagcgtcacctcgaatccaaacctgcctccgccgcctcgcggttgccccccctcgcttcgtaccatgtcgttgcgctccgatccgaaaacgtcgcgatggttttgcgtttttgttgttctttgttggtgatctaatgatgggggcagcgccgcagcggtgtcttcgccattccagacaaggaagatcgtgaagaagcgcgtcaaacagttcagcatcgacgtgctgcagtggacttcaagcggatatccgtcacatcggttctgatgtacgcgatgcgcgctctacacaagatcagaaggtcaaaggtactctgaccatcctttcagtttgtaggctcgaatcgaatcctgctcagagcttagctgcactccgttcaaccctaatccctcccaacctaggccttgtttgaatgcaatctacttgtttgagtggattaggttgggag

SEQ ID NO: 1938 - DNA, 406 bp, Zea mays
atggcatccaacaagaagcccattgctgccaccgcgctcctgttcctagcggtggcactcacgttggcggcttctgtccgggctcaggcactactggctccgacgcctgcgcctgcgccatcccaaaatccctgccccgccggtttcaacaacttacttgcgtttgggatagccaagaaggaatttcttcttaataacggtactatgctgctattgttcccgtctcggggcacccaaagcaccacatcaatggcgccgtctgcggctaagggagtgcgaagtgtagtctgcatctgctttctctctacaaaccgtatattaattggcggccccctcacatgccagcagctggtgtagtctggccttcttcgctgaaccccatgctcaacatgtgtccggctcgcac

SEQ ID NO: 1939 - DNA, 267 bp, Zea mays
atctcatgtatatctgcaaggagaatctgcacccacgaaaggcattgagtgcaatagaggtgaaggaactgcgcgaagccctttaagttatttaagttattgctgaaggtttggacctagattcactcttgtgctagagtttggtgtagtcctcgattataaactgtgtacaatgttaatgtagtgacatagtttgtatgatgcagttcatagtgatgtttgaaggtatttgtatgaactgtgtcctggacatagtttgtatgatgc

SEQ ID NO: 1940 - DNA, 352 bp, Zea mays
ttaccctccccctctagcaccctctctactcccttttcccctctataaaagcaagcgccgagccccatggatccgtccctcggttaccaagcttgcttcccgcgcccttagctcgctgtctcacaaaaaccaccgccggagctctctgaccgccgtcagagcagcacgccgtcggagcaggccgccgccagagggccgccagaagtcgacgtcgcgcctccatcaaattcctctgcccgaagccgttccgtgcctccctccgtttgtcgacgtgctgctgccagagaacacagagaggttgaggaagacacaaattttgtgttctacccctgaggctatgattaattctgta

SEQ ID NO: 1941 - DNA, 714 bp, Zea mays
gtcaatggataagtttggcatgggagaaaagaaatcatgctgctcaccttctaagatcaatgatagttcaggtggagctgtgcttcgttatgctttgcacctgcgatttctgtgcccctccaagaaaaaatcctcgaaatcaatgcttcgttgcaaatctgatctatcaacggcaccatatagcagcaatacgctacctgaggaagaacggaggttctatctctacaatgatcttagagttgtatttcctcaaaggcactcagatgcagatgaaggcgaggtacacaaaatttaatcttggcactggcagcactaccttttcatttctttcttccatcatcagtcagaattcgggtcagtttacattagtttttttggacaaaatacacatgcttaatacgatattctgtttttttggacaaaaatgcacctgcttaatatgatattctgttatttactgttgtttacgctagaccatctttttgatcttccttatgatttcgaaataattatttaagcttgctctaatagcctatacgtgtctatcagactgttccttgactgtttcttgttctgttataaatccgtagaatttaatgtgataggtttcatctttgttgcagctgcgagtggagcatgatttccccgccgatcccaagtactttgacataagcaactgatggttgcgctgctgcaccggacaataataatctg

SEQ ID NO: 1942 - DNA, 392 bp, Zea mays
cccctgccatcgtcgaccgccccggccccggccagcaccaccctcggccgcgccaacccaaccccaagaagagtgcgtccgcatccaaggtgagcagggcattgctggcatggccccaagaggagacatcggccattactatcgcatggggtctgcttggatatcccaaccgctctgaccttatcccttcactttccactctctctctctcacgttcctctcccttctatcgagaacccatgaatttagatggagaatacaacgaggtgattgtgtaggtcgctaatcttgatcttatttgtcatctcccatgtcgcatgacttgtaaaaaactgatttgtggtccgtcgcagcttaggtaagcaaaatccctttgtacgctttgtattcta

SEQ ID NO: 1943 - DNA, 431 bp, Zea mays
gaagcaaatcctatagttgatctgcgcacaagctgtgagcagggtgttacgactccagaaatatatgaatcgccaaggcgaagttcttgtcaggctcagaagaacgctgctgcaccaattcaactcttggacatcaacttcccacccagggttccaaagactatatttctaccattgcctctgaagcaaatgctttctgatgagaacaatgttgaaacgtcgaagccaaaatatcggtcaaaagacaatggcttcccatcagggctgatatggcaccgcaatattgaggctgagtgtagggaccctccggtagctcttcagcatatggattgcagcagcgagggacagtcgagctcatcacctgctgagataccggagtatggatgccaagaccagtacgatagcgaggaggaaacaatgtactcagctga

SEQ ID NO: 1944 - DNA, 612 bp, Zea mays
  misc_feature (557)..(557): n is a, c, g, or t
  misc_feature (559)..(559): n is a, c, g, or t
  misc_feature (603)..(607): n is a, c, g, or t
actaaacctgtaagtaaatctacattcatttcatttacttagtcattgaactgtagctttattggttgcttattgatattggcttctctgctttatgttgattgccgagataatattttttccccatgaatccagtgaattcccagttagactagaaaatccgcatgtcatttcttcagaccaagtctgggttggagttgtgcctgtcggcccttcgggacatgctcttaattcttcttatcgtacgcgtaatactatacaatataaacaagagttgggcactgcaataggtaggccaatactaacaatatatgccgctgcttttgttctggtacagttttgctgacatatgtgctcattttatagtaaatttcgcacgcattgtgccagacggactccttgttttcttcccttcatattctatgatggacatgtgtgttgacttctggaaaaatagggtattcattggttctggaaaagtagttcttatcatttgaggtgtttacaaaattagaaattttataacttaaatctcttacagaaccattcaaattcancntctgagaacacaatttggcagcggatctgtaagcacaagcagcnnnnnataga

SEQ ID NO: 1945 - DNA, 211 bp, Zea mays
cttagaaagacgatttgattgtgttcttcttacaaggaagggaattgaggtcgctaaccattttcttgttcttttcttgttgtaatttcctcaagaaattaggtgcacgaatttcattttcagtgtctttttactttaagcgtttcatgttagtttatatgaggagggcattttttctattatttaacaagcacagatcggagcaaaggca

SEQ ID NO: 1946 - DNA, 372 bp, Zea mays
tcacaacaacacttgattttaatgaaatgagtgtgagatgaggaggtggtagagaaaattgaagtgcgggttgtgtgaatgagctcagactcctttatttataaaccatgttctattttttagttttttttaaaaaaatagagcgaaccaatgagaatgcgtcaagtggcaagaggcaaccgttaccaggtcacagaaagcaacaaatgggtcagtaccatccctggtggccggtcgatagccttgacgaccacgtgcgtgagccaaccagcgatggcaccgtggcaggcaatatcgaccgaccggttgtgccaagtgggcaggcgatagcgcccagcgctggcactagcctaagggaggtggaagggtaag

SEQ ID NO: 1947 - DNA, 435 bp, Zea mays
ttcgtcagagaaaaggattccccagagagagcatatcccctctgtggctgccggcagttcggatctgcgccataggctactgaagcaaagaaagtccaataataattcaaggtcggctgaagccctgggcaggcatgatacacatcttgaggatgagcgcaatgaccaacatcgtccgcgaggtgaacagcaggatggcctctcacggtctcgactgcatgatagaataagactacctggggagacagcgtttgacagtcttgggtcacggtcagaggagtgggatagagggtctagagccagattgtcgccaccaaaatcctcagatcttcgagggaggcttcatgaaaggctaaagggtagattgggtgaggagataccgggtagcagtgcaaaaggtttggcagtgaaggcaagtagcagtgaggatactga

SEQ ID NO: 1948 - DNA, 480 bp, Zea mays
ccaaggtacctgcgccagcttcatctttccttcgcgctgtgtccggcggcacggctcctaatttgcgctcaactttcaaactaacactgctgcttgtgtgtccgactcctccgtccgcagcaaaagatcgtgatcaaggtgccgatggcgagcgacaagtcccggtccaaggcaatggcgctggtggcggccgcgggcggggtcaactccgtggccatcgccggcgacggcaaggaccaggtggtcgtcgttggcgagggcgtcgactccatcaagctcaccaccatcctgcgcaagaagatgggcgacgcgcagctcgtcgaggtcgccgaggacaagaagaaggaggagaagaagcccgaccccgtcgccgaagctgcggcggcgtactacaaccagtactactaccactacccaccgccgcccgcggtcgtctacgacccctacccacggtcgggcaacacctgctccataatgtag

SEQ ID NO: 1949 - DNA, 609 bp, Zea mays
tatggatacaggcgctgaaactcacatgacatccaactccggtaatctttgcacctcgcagcttccttctttttctactccgtccaatattgtcgttggaaatggttctcttttacctgtcactcacaccggctctgccacccttcctgccatatgtggtcctcttcatttaaataatgttcttgtttctcctcacctcattaaaaatctcatttccgttcgacagtttactattgacaataaatgctctgttgaatttgatccctctggcttttctgtgaaggacctcaaaacccggaacgtgatcgtcaggtgcaatagttccggtccgctatacccgcttctatcatcggtttttcagcccttagcactcactgccggcgtctcttcatccactctttggcatcggcgtcttggacatctcggtcatgaggccttgtctagtctcgtgtcatcatgtgctatttcttgcaataagagtgattccgaacacttgtgtcatgcttgtcaattaggtcgtcatgtacgtctcccctttcccacctccagttcgcgagcaatcaataattttgatttaatccattgtgatctttggacatcccctgttcc

SEQ ID NO: 1950 - DNA, 405 bp, Zea mays
  misc_feature (396)..(399): n is a, c, g, or t
caaatttactagcaaatggttgatgttttctttttcctgatcacatagtagacagcgagctggatgaggcaagtttcttttggctaaacggtcagccgtccagcatctgcaactagccaaacaaaaaagacacacttaggtcaacctgctgaacctgacagtcagacaacaagggagcctgtccgaagtcctggaagattttcaaatacagctaagctcgcccttcttcatgaatatcgtaatcctgttaaactagacaattaggacgactatgaatgatttagttttcaaagcaatgcaaccaaacttgcagacaagtcgaagtgccctccaaaaagagcttggcgagctctcctttagagctaaacagagatcgagccacttttttgagtcatnnnnccaaag

SEQ ID NO: 1951 - DNA, 414 bp, Zea mays
agctatctaccgcaccagcggcctctagtgtctcctctatcccttccctcgcaaagcaatcacacacgcgctttctctgtgccgccaccaccaccagcagcaccccgtctcgctccccgcccccgacgcccggcgggacatgaagaaagacgaggaggacgccaatgccaccgtccccggcgacgacgacgcacgacgttccgcgctccccgtccgcctgctgccgctccggtgacggtgacccctacttagctctctccttcgtcctcgccttctgagtcgtcgtccttcttgcctctatggagcgagctcgccgtcgccgtcgccgtcgccgtcgtcgtggtgcagaccagcggctcagcggattgaggagagccctggcggcggagaaggcgtcgtacgtgttctggtgat

SEQ ID NO: 1952 - DNA, 370 bp, Zea mays
  misc_feature (359)..(366): n is a, c, g, or t
aactgaccatcccctgtgaaaactgccattcaaatacctcaggagttttcatctgtaccataggggaacacaattcttaccatctgtatcatattggtgcatcattctttcctatactgtagctgcgcaaaaaggggctctgggtctgggctgatccttggtcgcagaataacatcagaaggctagaagattgaatgcttggttgatcaagacgaagaaaggaggcggatattatgaggtggcaagtttatatgctttacatccatccatttaattatttttacactctagcattgaaattttgttctggtagttttgtgattgcttcggtaggttcgagatgattgtagtagagatgnnnnnnnnttct

SEQ ID NO: 1953 - DNA, 904 bp, Zea mays
cactgtttgcatttttgtttgttcttacttaaggatcttccaatatttttctgtagataatgatgtatctgtggagtcaattaatgaagaagaatgccaaccatctacctctgaaaaagaagacgacaataatacacattctgcgtctgcattttcagctaaaaaatgccaagcaattgaagaaaaaagaatatcaaagaaattgcctggagttcaggtcagctgttcttttctcctcggtggataccatcaaactgattttttgttggttattctcaagctgttggtgaatgaagatcttattttccttttgttgctgtttgcttgtttccgtgcaacaaagcagcaccaactttctaatattcaagttggaaggtggcataacatccccaaaattagtgctgggcattgccttttgtatcagaaatgatcaaatcgagggcttttatttctgagtcagctgtagtttctttcttccattatgttgcctatcatgattacagtcttgtacttgctttttattcagtgaaattagcaatctattgtgccattttgccatgtactcaacttgttcacttcttttattttctcatttcttttgtgttggtagtacaagattttcaaactaatttttagtttccatgtcattaactcgcccaaggtgtttcattaccatagggaacttcctcgatattgaagtttctttcacggggccaatctaccttacatgagaaaagaaaatctgatggactaatttgcagtcagcaaggtttggtggactgcaagatgcaatgatgcagacattgatttaaccactgccacgtttttttcgtttgctgaatatattcatgatgacattaggtcccgggagttcttcggaagcatacaaagctggagcacacaa

SEQ ID NO: 1954 - DNA, 1243 bp, Zea mays
  misc_feature (683)..(685): n is a, c, g, or t
  misc_feature (719)..(725): n is a, c, g, or t
  misc_feature (730)..(734): n is a, c, g, or t
  misc_feature (751)..(751): n is a, c, g, or t
  misc_feature (771)..(791): n is a, c, g, or t
  misc_feature (794)..(801): n is a, c, g, or t
  misc_feature (804)..(806): n is a, c, g, or t
  misc_feature (810)..(1240): n is a, c, g, or t
tgaccaataaaactccacctgcgtccgttagtctctcagcctcgctcctagcctataaatcgaacaccgcggatctacgtgcttgttactagcctctcttttcttctctcacgctgtcctatgtgctgctcacggagccgagccaccgccgtcatcatccttcgccgccgtgccgtttcagagcctatccgccgccggtgaagacttcctcgtgaccttggacgcccgctcttccactttcctgtgctcggcaacgccccggttcgcctcgacgccgccagccgtggtcccatccacctctgcgcaagtaacagcaaggtgaacgagattgaatctagcccctaatactgtgtaaaaattatttagacaaatttttccagctcaaaaggaagtgaaaataagcccctgtgattttatgtgctatcacgatccaatttctatatcgttacgtaattttagttgtatattttcttttagtgtaaaaatcaagtgtataccgaacgattaatttcatatgtatgtgatggtttattttaattagtgtatgctgtctttcacctttgtgtattttaatttaattatgattgttgacattaatttaaatatagtttgttagagtaaaagattaagggataggtaaaccatatatttataacaataatactagatgaataattctacgnnngtctttgctcaggatgaattatagattttagtcnnnnnnnatgtnnnnntatgtgcgattatatgnaaattgctagtcatgctagnnnnnnnnnnnnnnnnnnnnnatnnnnnnnntgnnnactnnnnnnnnnnnnnnnnnnnnnnnnnnnnnnnnnnnnnnnnnnnnnnnnnnnnnnnnnnnnnnnnnnnnnnnnnnnnnnnnnnnnnnnnnnnnnnnnnnnnnnnnnnnnnnnnnnnnnnnnnnnnnnnnnnnnnnnnnnnnnnnnnnnnnnnnnnnnnnnnnnnnnnnnnnnnnnnnnnnnnnnnnnnnnnnnnnnnnnnnnnnnnnnnnnnnnnnnnnnnnnnnnnnnnnnnnnnnnnnnnnnnnnnnnnnnnnnnnnnnnnnnnnnnnnnnnnnnnnnnnnnnnnnnnnnnnnnnnnnnnnnnnnnnnnnnnnnnnnnnnnnnnnnnnnnnnnnnnnnnnnnnnnnnnnnnnnnnnnnnnnnnnnnnnnnnnnnnnnnnnnnnnnnnnnnnnnnnnnnnnnnnnnnnnnnnnnnnnnnnnnnnnnnnnnnttt

SEQ ID NO: 1955 - DNA, 385 bp, Zea mays
agctggcgtctgtaagggaagtacttaaaaagtcagaaggagaactcgagatcacctcgaagcagttagttttggtttcagaagcacatagtgaccttaataaagaattgctggatgcatataagcagttagagtccacgcaaagtgagctagtgaaagagcgtaaaatcaatgctactcttaacatggagcttgaggctttggtgaaacaatcagtgatagagtccgaagcaagaaaaactcttcaagtcgacttggatgaggccactagatcactaaatgaggtgaataagagtacactctgtctgtctaagcagctggaaacaactaattccaagatttctgctattaaagaggagaaagatatgctgtcaatgttccttga

SEQ ID NO: 1956 - DNA, 648 bp, Zea mays
cgaggatgctgtcattgcgctgccacgccgccgcgccggcgacccgcggcgtcgcatgtgaacacggggcgcgttcatcgtgttgtcttctttctttgccccccgtctctctgtctctctctctctctgtttgtttctttctgttcttggcctcagattggatctctcatctacccggcctttcttaccatagttttataatccctgcaggtttccacctaggcagagataaataagatctgcggaatcaagaagctctgtccaaggaggaagccagcggcacggcagtgccctcggcggtgatgaagtacgtctccgggccgtacttcgaaccggacttcgacccgctactcgaccgcttcggcaccccagggtacgcatcatcctccgctatcttgctccgcgacccccctttctcttctgacgagcttcgcgtggttgtagggtcgtcgtcgacaatgagacacgcgaggactgcacgctcgtcaaggtaaacagagcatagcatggcatgcacagcacaggaccaggacgtcctcgttctgatttcgtgggcctccccgttcccaggttgacagcgtgaaccgggacggcgtgctgctggagatggtgcagctgctcaccgatctcgacctcgtcatctccaag

SEQ ID NO: 1957 - DNA, 368 bp, Zea mays
cacactacagatttggacaaagtgatatttatgtgtgggagctgagccaacgaggtgtagtgcttgtatgccacgtttttgaacctttggtgtgctggcactctaggaatcctccttcatcaagcgtggatgagctccactgcacctgcccctatattcagtaccttgggctgccgtattgagtgaagatttcttccttgccctcaaattctagccaaagttcactgcttgagtgtgcagtccttatgtactgctggtataaccccctccctagcccaggtttgcccccttctccccatggactggatgcgctcagtgacccctccccctgcctatttattcagtgtgttccacgagtgagttcaaaa

SEQ ID NO: 1958 - DNA, 380 bp, Zea mays
tttttctattacagttcagttcccaacagagatcataggacccgacagttagttttatgcttttagcatactgagtgtaacaacaatttccttttttatggttctcgtagctgcacttgagttagttgtatatgtaagtttgcacctctagctgatgtgggtgttttgcatttgcaccaatccacaactgggtttgatatgctatgctgaacatcagtgagcaccacaaattttcagtgtcctcgttttgccagaagttcaggatttgctcaagttgttcaactggattgattacatgtgcggatgatgtgcctcataactatttagcgaagcagcaaggtcttgctttaaggaaattcttgtcaagaacaaagtgtcaa

SEQ ID NO: 1959 - DNA, 515 bp, Zea mays
tactgtacccagaagttgccttcacaggagatacaaagtctgattttattcttgacccaagaaatgcagatgccttgagagcaaaggttctcataactgaggtattgtgtctttacacatccagtatttgttcttacatactgtaaatgaagaaataattgcactagcctgttcatcagatgtacttcaaatatgaaacatgaagaacaatttgaagttcttcgcgtttttttattattggtaccaacatagttttgcactcttcaggcaacgttcctagatgaccatgttgatgttgagcatgctagggaacatggccacatgcatctttctgaggtgacaatttatgtgccattactccctcaacctgccgatgaggcttttggaactcctgatgaatataagaaattattactgttttagttgctaactgacacccactatgtcgtgtatagataatggagcatttccagtggttcaggaacgaaacaatcgtactcactcatttctcaaat

SEQ ID NO: 1960 - DNA, 400 bp, Zea mays
ctgttcgcggacagcttcaggggagacctcgttggtgtcttcatatgccttgtgatcggatgctacctgctccaagagcacatcaaggcgtcaggtggattcaggaacgccttcaggaagggcaatggtgtgtcgaactccatcggcatcctcctgctcttcatctaccctgtctgggccggtgtgctgcaagtcctgtaggcacccaccattgcctcagtgtttcccctgtgcggtccaggcgtccagctccgttcccgttcgtgcccgtgcaaatgctccctctatggtgatccgtgatcctgtgtcacgagtaggtgatgtttttatgtgtgcttgagttgatcggttgggcatgttgccatgttggtggacagttttgtttatctcatttgttgta

SEQ ID NO: 1961 - DNA, 399 bp, Zea mays
cagtctgaagctcctgctaagagctttattttggtttagaacaggtacacagaagaaatctttcaatgaggtactcagaatggctagtattgctgaatcttgcaaaacattgtgatggggggaaaattaccggcagcactgtgtatatattcttttcactaaggtttgtgccggagctgcgcctgcaaagtccaagcatgttgacttgactagttattgtcgatagcaaaagtcttcctcctggcaatacagaatgcaacaactgaactactgaaggcacttggaactagagagttttgactagttcggtaccccttctatatttgcacatatactgataattttcacaatttgatattttgaaaataacatgattcgtgtaagacagtagaaactgaa

SEQ ID NO: 1962 - DNA, 367 bp, Zea mays
  misc_feature (361)..(361): n is a, c, g, or t
agatattagaggaaaacaaacaaccagcaaaatgtataggaactagccaccatcaccacttttctagatttggtttcaggttatctatgatgttcttgctccaatttggtgtccgcaagagtcatcccttccttgcttcaaacaagtgcaaatgtttagcagatttacaattttttatttgcttctataaccatagggaatctgctctcataataagtgatccagaaattcaataattattacgagagtcgtcgtgttagcatgggattattaaggggctctgcaaaaaatgaggctgagcttctggatctcgagaaaaatataaaggtctatcaatatatgtatagtatgtatgcttgtnaccatt

SEQ ID NO: 1963 - DNA, 520 bp, Zea mays
ttggaattgagaaggcggaaataatgaggcacctttgctaccgtgatgctgctggtgctgtcaggcatactggtgaagagccgttcaagtgagtgttttccttaatgccatcagcttttatttacctggtatataatcagtgtcaactatatactagtgcatttaaactatgttgtgtgtgtgtgtgtgtgtgtgtgtgacagtgacttcatgaaagtagcacggaggctcaccattatagagggcacggaggggagactgcagaaacctctcgtggaatacatggtcgagcgggcttgattgcatggtggttcggacaaggcaatctgaaacttgtgcaagactgagcttagagcgaagtaactgctgtgtgttttcatttgtgtttgtctgccgccgaagcagaatcgcgatgcttgtctggtcgtgtggaaaaccttggtgtacgcttcgtgacttggtcgttagaactctgtcgtggtcagttgtgttttgcttggtcgaagttgatgaataacct

SEQ ID NO: 1964 - DNA, 570 bp, Zea mays
ctccgacaaaaaaaacacttaaatttcctttactatgtaactctctaactctttattggacaatgatgtagggtgttaaatctgttacattctcggatgtagacaacactatgtaagtatatttacattaccatttcattggtctcactattatgtgctggtactagacactcctatttaatatcatacattttcatgtttcaaaaccataaaccaatagaagaaagaactgaaaagcagacgttgaatctggctctttaccagcttaatacaacaaatttacatcccaccatacttaactgttcaatcaaacttcattgtagggcaaagattttttaccatccaatactcctgaaagttcctccaacacattagaaaaccctgcaaaaaggttcttacaacacctttttccttttgaactgaaagcatttcctttacaatgccacatattcccacttaacacatgcctcataaaaaacatcaccacaggctcaaacagacctctgcaaaagttggcaaactgagttagcagatcgactcataagttcaatattagagacgaccttcttg

SEQ ID NO: 1965 - DNA, 778 bp, Zea mays
acttgcacatccgccatgtaacaacattcttgatgtcaatcggcttcttgattcagtatgtacttatatcctggttcttctacattgttcaaaatccgctggaaaaaaaaggatatctccgtgcagttcattttttttctcgaaaaacgcaggagtgtttgacacttgttagagcataatttcattactctcatacggtggtaacacgaaaaacctttttaatataagttgataagtcctgagaagagttataatttgtgtataggttttggaaacatctcagcatgttggaaggtcgtcagtgtcaacaaaccaggatctgcctttcaaggacgtagccaaccaatgtgaagcacttctgattgggaagcagcaaaagctatctgagtgcatgagtgtctgtgaaaaagaggttagagatccttagcaccttgaactgtccacagttaaacagctgccaataagtagaacagtattcattggcggttggacgttatgtgaactgagtacatttttgtcacttatttttattttgcatttcctttaaaaagttgctgtttcaatattttatctgataggtgaatttaaaatgagatattgagattcaacccaggtggaactaaatgtgcatgtgctcacaaggttcttaactttcaggatggtgaatcttccgtcgagcagtcatctcggcaggatcctcaagcagatacgtttctctgcacagctgatgaacaatggcaccccaattcctgtaagctgccagcgctgtgtccctacg

SEQ ID NO: 1966 - DNA, 365 bp, Zea mays
tcgtggagccagctcagcaggcagctcggtgaggttagcggagtacagttttgaggcgccaagaactagtttagaggtagaggtctattgtgtggcagtgaattcgtcaccgggattgaacacatgggactgggaggtggcttgccgtttggtacagcttagtatgctgacattttcaatattttgtactcggaatttcgtaacagtttatccttctcaatgtatattactattaatgcctgtttggatcacattaattgaaacaaatatctagaaattgtttctcattttattattaggttacttttcaactcctgagaaccaatcagggcattaatgtaatgaatgatgatgctacaggatcc

SEQ ID NO: 1967 - DNA, 514 bp, Zea mays
cgatgtcgtcgatcccatcgttcttctaacacaaccacggtacggcgtagcgtccgacttgcaaaatctcgcccaatgcctgtaatccagcgtgctcagcgcaacctctgcaaaaaagctcgggcttctaaacgatgaatccagtaactttgagaccgccttacaaaaattcttatccatgttccaggggaccctaccacaagaggttcttgcagccctgacgtctgccttcaacctcgatgggtcggcgaaggagaacttcgaggatgctttgcttgcgatggtagaggaaggaattgtggatctacaagatggccttggtagcctgcgcattgatgaactgcatgcgactgcgtgatccagcgacctgcgactaagggccttttcctctaattcatgttttcatcagacctcgatcctttgcctcatttgtgtgtcgaggtttcagtttgttgcatgtgctcgatgtatgttttggacatcttaagtgtggctcttttgtctgtctcgcgcc

SEQ ID NO: 1968 - DNA, 1062 bp, Zea mays
tgcaagcttcttgaccctagtaacatatattttccttcaaaagtgatttcaaactcagattgcactcagcgacatcagaaaggtcttgatgtgattcttggagctgaaagtgttgcagtgattcttgatgacactgagtatgtaagtgttattgttaaataactattttcagaagtatgtgtggtttctattcagtagagcaggctgattcggagcaattttattgtatgcaaccaaaagtcacattatttgacatgaattcagtggccaaactaggtcttaatgtctcattatagaatactccggtcatttgtaagtgtttctggtcagtaactgctatttgtttcctgtttgcttccaacatatagatttaaaagtagaaacatctatccacaattatcaaagcataatgattatcctcaatgtgtagaagctggtaggaccctgttattcgtgcttagagtgatcaagatttctctttttattgtcatttgtcatttatggctggccgccctgaaaatggaactttgtttcaggtatggcagaagcataaagagaacctgattctgatggagagatatcatttctttgcttcaagctgccgccaatttggttttggtgttaggtctttgtcagaatcgttgcaagatgaaagggagagtgatggtgctttggctaccgttttagatgtcttgaagcgcatacacgctactttctttgacatggttggtttcttcagttcaacgtttcatcacattttattgtctattcctcacagtagattggactcttgtaagaacagaagtttttcatttctaaccatctgtccttgtacctctcttatgtaggctgctgaaactgatctttcttcacgggatataagacaggtaggctttgtatataaccttcacgctgccttttatgctttaagaatcatttatgtttttcttaagagtagatgagttgcgtttaccagctttaaaataactgaactatagcttgcttaatacatcttttatgtggtgtggcttacagatttcatttgcaattgcctgtttcttg

SEQ ID NO: 1969 - DNA, 307 bp, Zea mays
tgcatccttgatcgcggaagctgctcggcagcgtgagcagcaatggcggcccgccccgttgtttgagtcacggcaacaacggccgcctccgtcgcgaaaaccgcagcaacagagccgcctctaactctctggctcaaccgccgccgccgcctaggccggcacaacgcgactagcgtcatctcaacgctcttgagtggcaaccgaaggcttgactcctacaaatgttcacggtaggccaaaaaaaactttttttttgtttggcggcgtggttgtcgacgaaaggtggccatcggcttgctgaggacaa

SEQ ID NO: 1970 - DNA, 1375 bp, Zea mays
  misc_feature (1361)..(1363): n is a, c, g, or t
ggggccgcctccttctactactacttgctgtcatcttcatacttgcttccgggagcgaatcacacgtcgagtccattattcttatttcatcatgctttcattaggaaatagtaattgcatatatagcatatatacaagcctgaagagtagttgacaccgtccggacacactatggtttatggctttatgcaccacagtaacactgcacacgcatgggcggacccacatagggttctaggtgggccatgtcacaccctaagtcacagcccaccaagaccccgtctcgtcctggtatctcctgcttcccagttcccttttgtccttcgcgactccagcgccaggccaccgccgccgcgtcctggatggcaggatgtcgccgccgctaccagctgccacacgcctggtatccacgctccactcctccacgcaccacgcgcaggcacgtagcccgtctcgtgtccagcgtccagcaccccgtgtccacagccgcacgtccaatcgtcccaggtttttaatttttcactacagttgcgttttttgtattttttaccggtgaagagatgttttcggccgatttttcaatttctgatcttttcatttatgtcgttctctgtcatgtcgtgaatcgtatatatacacacacgcatccgtgtctaaagttttattgtgctggattagtagtatatatacagattataatagaaatttagtcttaattgtgattacttaaaggagcaacattgatttgtctttaatagagcagggttgattatatagaattgtatattaaaaatttactacaccattgacacaccctatataaaaatctaggtccgccggcttacaatccaatgcacattatttttaatgattttgtatattgatatgctatggcagtgacttaaggaaaccttgattttaattttttaaacacctagcattaatgccacgtaacagatcctacttttctttttgcagagcttggttaatccagatcctcctcctccggtatatcgctggcctccatgaaatttgatatgcttatgctacacactacattaatgccacgtaacagatcctacttttctgtttgcagagcttcgttaatccacatcgtcctcctctggtatatcgcgggcctccatgaaatttgatatgcttatgctacacactactggagaaagtgcaatatgtactagttagcaatgcaactggctgcagtaccagattctcaacgatgctggatatctataactaaaaacccaaatctttagtccgggttgtatagatcatatactaaatagtgaactttagtacttgtttttggcttgaatatgtactaaaggatccgtttttagtannnagttctatagaa

SEQ ID NO: 1971 - DNA, 1175 bp, Zea mays
  misc_feature (405)..(406): n is a, c, g, or t
  misc_feature (456)..(457): n is a, c, g, or t
  misc_feature (459)..(465): n is a, c, g, or t
  misc_feature (468)..(468): n is a, c, g, or t
  misc_feature (470)..(473): n is a, c, g, or t
  misc_feature (476)..(477): n is a, c, g, or t
  misc_feature (479)..(479): n is a, c, g, or t
  misc_feature (481)..(481): n is a, c, g, or t
  misc_feature (483)..(486): n is a, c, g, or t
  misc_feature (495)..(497): n is a, c, g, or t
  misc_feature (520)..(532): n is a, c, g, or t
  misc_feature (536)..(543): n is a, c, g, or t
  misc_feature (550)..(556): n is a, c, g, or t
  misc_feature (558)..(576): n is a, c, g, or t
  misc_feature (585)..(601): n is a, c, g, or t
  misc_feature (605)..(612): n is a, c, g, or t
  misc_feature (618)..(619): n is a, c, g, or t
  misc_feature (621)..(627): n is a, c, g, or t
  misc_feature (629)..(630): n is a, c, g, or t
  misc_feature (632)..(640): n is a, c, g, or t
  misc_feature (643)..(662): n is a, c, g, or t
  misc_feature (665)..(665): n is a, c, g, or t
  misc_feature (667)..(670): n is a, c, g, or t
  misc_feature (675)..(681): n is a, c, g, or t
  misc_feature (684)..(698): n is a, c, g, or t
  misc_feature (702)..(703): n is a, c, g, or t
  misc_feature (712)..(719): n is a, c, g, or t
  misc_feature (721)..(731): n is a, c, g, or t
  misc_feature (734)..(781): n is a, c, g, or t
  misc_feature (785)..(785): n is a, c, g, or t
  misc_feature (787)..(829): n is a, c, g, or t
  misc_feature (832)..(842): n is a, c, g, or t
  misc_feature (844)..(859): n is a, c, g, or t
  misc_feature (861)..(864): n is a, c, g, or t
  misc_feature (873)..(887): n is a, c, g, or t
  misc_feature (889)..(901): n is a, c, g, or t
  misc_feature (906)..(911): n is a, c, g, or t
  misc_feature (913)..(932): n is a, c, g, or t
  misc_feature (936)..(957): n is a, c, g, or t
  misc_feature (959)..(982): n is a, c, g, or t
  misc_feature (984)..(998): n is a, c, g, or t
  misc_feature (1001)..(1001): n is a, c, g, or t
  misc_feature (1004)..(1004): n is a, c, g, or t
  misc_feature (1007)..(1022): n is a, c, g, or t
  misc_feature (1024)..(1025): n is a, c, g, or t
  misc_feature (1027)..(1039): n is a, c, g, or t
  misc_feature (1044)..(1052): n is a, c, g, or t
  misc_feature (1058)..(1058): n is a, c, g, or t
  misc_feature (1063)..(1065): n is a, c, g, or t
  misc_feature (1069)..(1075): n is a, c, g, or t
  misc_feature (1077)..(1078): n is a, c, g, or t
  misc_feature (1080)..(1084): n is a, c, g, or t
  misc_feature (1086)..(1095): n is a, c, g, or t
  misc_feature (1097)..(1100): n is a, c, g, or t
  misc_feature (1104)..(1106): n is a, c, g, or t
  misc_feature (1109)..(1116): n is a, c, g, or t
  misc_feature (1118)..(1120): n is a, c, g, or t
  misc_feature (1123)..(1133): n is a, c, g, or t
  misc_feature (1136)..(1141): n is a, c, g, or t
  misc_feature (1146)..(1155): n is a, c, g, or t
  misc_feature (1157)..(1160): n is a, c, g, or t
  misc_feature (1162)..(1164): n is a, c, g, or t
  misc_feature (1168)..(1169): n is a, c, g, or t
tcagcgaagagcacctcaagtcaacggtcggggtggacgcagtagtcaaaccagcggtggccgcggacaggggagaggccgagtgcaggaccggaaccgcacacccatttctgcttcagaccttgacgccgaactcgacaagtaccatgcagcggcagcgaaggaggaatgaggctctggcgttctcttctactaatctatttacacaggtggaaaggcgttctcttctgggggcgttcagaagcatgaagtttactatcttagccctagtgttctacgctagaattcttttcgaccaggattctgttttgtgtgtaggatgaacttgtggttctactttgcaggatcttatttgctgctttgtgggcacgaatattgagaacaactggaaaccgactttgtaannttagattagtagaagagaacgccagagcctcattcctccttcgctgccgnntnnnnnnnatngnnnnaannancnannnntaccaaggnnnaaaaaaaatgggggggcaggctnnnnnnnnnnnnnagcnnnnnnnntgggccnnnnnnncnnnnnnnnnnnnnnnnnnngcccccccnnnnnnnnnnnnnnnnngggnnnnnnnnacaaanntnnnnnnngnngnnnnnnnnnacnnnnnnnnnnnnnnnnnnnnaangnnnncgccnnnnnnngcnnnnnnnnnnnnnnngganntatcagcannnnnnnnannnnnnnnnnnagnnnnnnnnnnnnnnnnnnnnnnnnnnnnnnnnnnnnnnnnnnnnnnnnccgntnnnnnnnnnnnnnnnnnnnnnnnnnnnnnnnnnnnnnnnnnnngcnnnnnnnnnnncnnnnnnnnnnnnnnnntnnnncagaattannnnnnnnnnnnnnnannnnnnnnnnnnnccgcnnnnnntnnnnnnnnnnnnnnnnnnnngcgnnnnnnnnnnnnnnnnnnnnnnannnnnnnnnnnnnnnnnnnnnnnncnnnnnnnnnnnnnnnganccngtnnnnnnnnnnnnnnnnannannnnnnnnnnnnnccttnnnnnnnnntaattnatatnnnctgnnnnnnnanntnnnnnannnnnnnnnnannnncaannnctnnnnnnnncnnntcnnnnnnnnnnntcnnnnnnccccnnnnnnnnnncnnnncnnntccnnctcccg

SEQ ID NO: 1972 - DNA, 379 bp, Zea mays
tgcggctgatttggcgattagacccgcccgggttggatctgagataggctagctgcctgctactggttattcagtggtggaaaaatggttatggtgtagttttagtttaatctggttagttgagctgcaattcagccaggtgggactgaaatttaggagtgaaattaggtggcgtttggttcacagatgaaattttcaggagtatgaatgtatgatgggagaaatgtcgatttcttttatttattttggtagtgatatagtgaattagatactcatttgcaatatttggcgtgatggcaatgtactgtgtaatggcatagcagcgcgatgcacaaatcaaaacaagagctgaaggataatcttctccgcataagagatt

SEQ ID NO: 1973 - DNA, 392 bp, Zea mays
atttccccgcatgctctccgcccgctgcttgcttcgggcccgggtgttgcggttccgaggactccaggggcctgctagcgctcggatccgtggggttcgggctccgtctctgcgaattccgttgcggttcttcctcaccgagcggtcggagctgggggcgtcgagttctagggtttcgggctcgattgattcatgtcgttcgcgggggcgtttcttgttttgcttagtcttaaggtcatgcgaacacagctataggttaggagcttgatttgagctcactgttcgagtttgtgattggcttgcaacatccgagtcccaacccgtgtgcgggtgcgagtgcgagtctagtagactggagttttgtagctctccctattgcagcatctgattct

SEQ ID NO: 1974 - DNA, 378 bp, Zea mays
catttatttagattcacaagtcatgttggaacaaaaagtgctgtcggaacttgaattacctcctggcatccgatatgtgtatgctgtgcttttctaagatggttttttgttcgtatttctgctctgtggtcatgtggcagctgtaaacctctctgcctggactgtctggaattgctacatacaaaccaactatgttcgagtttctgaaccagcccctcttttcttttctgcagggtttctgtggaagcatggaggaacctacacattctgtatctgtacatcgtccaaccattggcgctgtcgctacgtgtgaagtacacaccgtgtacttgtgcagaccttgtaatttttacttgcctggtagtgggaaataaatcg

SEQ ID NO: 1975 - DNA, 249 bp, Zea mays
gctagcgcgagctaccccggttggtggtggtggtgaatccttcacttgcctgtggccttcacgcttcacggatccgacgcagcgaaccgcagtctgcacggatctgcatcatgccgtcgtccaccctcgccgactcgttgagcgcggacggctccacttcaacacctccacagcggcgccacagtgactccagtgctccatcgcccctacacggctgcacgtgatcagtcgaccacgtgtctggcacct

SEQ ID NO: 1976 - DNA, 309 bp, Zea mays
aaaagtcaacaaccagaacatctaatgtgtccagcaattccttgtcacgccaaagttcctaatagatgactcagaacgatagcaacgtgaggaaattcaacaatgtcgatgtgctttcgttttcagagctgttcatgattcgaagagttgcatatatctattgccttaaccacaaccctaactatgtacaagtacaaaggcgaaaaataccggtttatcctggttcattgtttgcttaaagtgcaaaccggcattggtaaacctcatacctttttttcacacttctgtccagaataaacattcaagagc

SEQ ID NO: 1977 - DNA, 418 bp, Zea mays
atctgctgctgttctcatccatgagcatctttgtcaaagtttcaatcttatgtgacatgctaactttgtgcaccacaagtagctgttttttttggaacacgcatgagagcgagtatcttatattaaagagaaggcagaaatggttcagtaatgacctttacaattaagccactcttacgccaccagtcgatcagaggggttgtaagttgtagcactgaaaaacaaagatttcccaaggattctaggataatgacccgataaagaagtggctgcttggtagttacaaacccacttctcatctcacagtggatcttttctttaagaaaaaaaaacagacttgtgggtcatttgttgcttttcagtctgcagtcacttcacttgtccatgttttttcagtagtcatattaggaactcctaa

SEQ ID NO: 1978 - DNA, 388 bp, Zea mays
gaagagcccatcccagggagcgagctctggacggatgggctcatctgtgcttttgagctggtcaagagtcacaggaagcctgttcagcacaaatcatggctggcaactgagcagatacaggagaagggccccactatgtgcacgaggaagcactcaagaaggaatgggcaccagatcactgagccgaaagtggatgagagcattgtgttggaaaacccccagcagactgatttcagtaacgatccttcagtgctcaaagataggccattgtatgctggggagattttggatcataaatgggtgcctattggatggaataggatcgccgagctggtcctgagggttcagtcagactccagctgggagaatgagttgatggagatgagtg

SEQ ID NO: 1979 - DNA, 386 bp, Zea mays
cctcaacgccggtgaggcccacctcttcctctccacactcccgctccctgtggttcaataccaccacccatgaggtcagtacagcgatgggcgaacgacgcaccgggtcgctgggtcgccggcgaggggcgaacgatgccatgctaagccgtcggcgaggggcggacaacgtggacataggcagatccatggagggcggcactgcaggttataggcaagattgcagggaggtcgtcagatcttggagtggagggagctgtcggtgtttggtaacgacggcacactacaggttgtaccacgcagtacttttgagaggacgacaatgtcgatctcagctcgatggttcgtgttgagcacgacgaaacacagcgaattatataggtttg

SEQ ID NO: 1980 - DNA, 760 bp, Zea mays
  misc_feature (606)..(607): n is a, c, g, or t
  misc_feature (686)..(689): n is a, c, g, or t
  misc_feature (734)..(738): n is a, c, g, or t
atactgctgctcatgttcatatttcaatttctccccaaggtctaccatagtatacacatcatgaggaaaatgcagaaggtgacaggttacatctttggatcgatatggtggggatttggtttaaatctatttgcctatttcattgcttctcatgtgagtattcccttcctcattagtcaattatactgtagaaaatacaggttaaatcttctggacatggaatcccagtgtcgctctcgtagtattgatatggttgctgatggcttagtattgtcactgttgttgatcataatattgctgaacatggaaactgccccccaacaactaaatcataaggattgattaagaaactgggtttctatctaatgtccaccaataaacatgtccagtgagttaaaattgtaaaagaacaaccttcatttttttttgcctaaataagaattcctgtctgcaattttttcggctcatccttcaacctatagaattggtactagacttaagactaatgcagaccgaataatctgggtaattcgatcattcatcaatgctctgccatttccagattgcgggtgggtgctggtatgttcttgcgatccagcgcatcgnntcctgcctccaggaagaatgcaagagaaacaacagttgcgatctaatatcgctagcttgttccaaggagatatgttttnnnnctccgtggtcatcgaatgttaacggattcgcgtgcgatacgaacnnnnnctcctttagccaacaaaatgtg

SEQ ID NO: 1981 - DNA, 385 bp, Zea mays
gggtggataagtctaagaactctaaacaaccgcagcggtatcactatgacccacagttgacacgagatttcggggtaaaggcaagagagaaaaggtaggttccgtctgccaaagttcacagatcaaagcactacatgccgtgaacagcactccccgcgtccggggaacggcaattctcggaggttcagacaggattggaacggagaagggtgaggaggaggccaaaatccagcatccccacccccctcagatcacacctggacgcccaaaccaaatcgaaattcagcaaggagaggatgtacctggcggaatctcgcagcagcccggtgccgatcgagccctagggtggagactagtcgaactcctccaatggactcatctgcta

SEQ ID NO: 1982 - DNA, 614 bp, Zea mays
  misc_feature (412)..(416): n is a, c, g, or t
  misc_feature (424)..(440): n is a, c, g, or t
  misc_feature (442)..(447): n is a, c, g, or t
  misc_feature (465)..(474): n is a, c, g, or t
  misc_feature (481)..(485): n is a, c, g, or t
  misc_feature (492)..(505): n is a, c, g, or t
  misc_feature (518)..(519): n is a, c, g, or t
  misc_feature (530)..(546): n is a, c, g, or t
  misc_feature (549)..(558): n is a, c, g, or t
  misc_feature (564)..(576): n is a, c, g, or t
  misc_feature (587)..(605): n is a, c, g, or t
gtcggagaagttggctgtgttgccaggatgtaatagaaaagggctcagaatgttgctgatccttgttaactggataatatggcggaaaaggaacgcaaggacttttgatcgtaggtttttgaccagtcagcagagcataacttcggttaagtgtgaggcgtcagcctggatggcggccggggctaggcaattggctactctcttaccttcgtcaacttagttgggttactacttgtgggttgttttcttagtgggctagtggcggagggatgcttaataagcccctgacgcacttctcatcataattgtattgactttcttgccttagagcattcctctctttattaatatataagggtttcaaaaaaaatgcatagcagataatttctggacagtatgtaggagatctggnnnnntgatctcnnnnnnnnnnnnnnnnnannnnnngctatgcattttttttgnnnnnnnnnnatattannnnngagaggnnnnnnnnnnnnnnagaaagtcaatannattatgatgannnnnnnnnnnnnnnnntannnnnnnnnnctccgnnnnnnnnnnnnnaagaaaacaannnnnnnnnnnnnnnnnnnctaagttga

SEQ ID NO: 1983 - DNA, 400 bp, Zea mays
atctcgtttcgggccatgccctcgatgtcattatctggcttgaggtttgtcgtggagaagcaaagggatgtttacatgtgctctattctaagtcttagggtctgggattaattgggtacgattcgttctagaggatgatgcgagtaagtgcttaagtgccctgctaattttttcagctacctctttcgaatttgttgtctacctgtttgttaggcaagcatggagtattcgcttggttctactcaagaagggaatcaaggaattcaggactttatgcactgattgtaatagtccaacgaaagagcggatccacatgttaaaaatctcagcaagtgttcctttctgacagagtttcaacttatgtgttactaatgtagaagggatctcaattacttgctga

SEQ ID NO: 1984 - DNA, 257 bp, Zea mays
agtggtgcagttttggtaagggtcctaggttcagaaatgttgcttctggccaagggaacttggggggttttgccgttttggtagctgccgctggtcgcctgtcgaaagtgtggcctcagctgaactgcatcatgaatctttggtgcagcgcatttaataggatgggtttgctatgtcagtgtttgtgtgttaggagtagcttgagtataaagctggttcaaaggcacgggacacctggcgctttgcctgctgctgct

SEQ ID NO: 1985 - DNA, 363 bp, Zea mays
ctcgcctctcgcccaccatggtgctcgtcatgtcgctctgcttcatcggcttcgtcaccgccctccacatcttcggcaagctctaccgctcccgcacggccgcggcctccgcgtgatccgatccggtccggtcccaccgctcttgtggatccacacaacggatcagactaccagatcagacggtgactttttttttgggtgatgaattatgtatggggagaagcccagcttgttgtgttgcctagcttttgcttgatccttactttctcaacttagatctcagctagatctgcagatggaaaccgtacatgtcatcttaatgggggccctttctgttattttcttctcttcccttaccctaaa

SEQ ID NO: 1986 - DNA, 559 bp, Zea mays
attcccttcttctctgtgattttgtttcatatctcgcagattagcatgtctcttgcgttctaaaagactaggagagaaacgtgtgtgaacattactgctgaaatatttttttaccaaacacgagttgaatcatttatgctactcaattttcttatgaaattcctgatgtacatacaaacactcatttgggttttcccattttttcacactcagcggctcttactgcaatacgagatactgtactactgtggatggtcgagaagcgagcagagcttgacggtcgttcgccgttggaacgttcgtgtgggcgacactgatggcatgatgcatctgtcagcaagatctctagttttttcacgctgttgaatcgacaggtatagcagacaaatacagaaaaagggctggcctggttaaaaaacggttcaggttagcaagcagtctggcccggttcacaatcgaaaaagggcccgtatcgagaagttagcttcacgtttgagagaaggtgtatgctctgcttccaatccagttattagctgcagcttctccttgtgtcgtgtgt

SEQ ID NO: 1987 - DNA, 237 bp, Zea mays
  misc_feature (83)..(83): n is a, c, g, or t
atttctaccgtttcttccttccctcattcctcctctccattacgagcagtagcagcagcgccattgatagtctctttgatgangccagtgaccctttcttcttccctccctctctctataaaaggcagcagagcctccccattcctgcctactcgagtttgcctctctctctagcactcctcgctcatagctagtgccattgccgttcgtcgccggagcccgtggagttcgccggag

SEQ ID NO: 1988 - DNA, 587 bp, Zea mays
  misc_feature (380)..(383): n is a, c, g, or t
  misc_feature (392)..(399): n is a, c, g, or t
  misc_feature (409)..(420): n is a, c, g, or t
  misc_feature (424)..(448): n is a, c, g, or t
  misc_feature (483)..(485): n is a, c, g, or t
  misc_feature (499)..(509): n is a, c, g, or t
  misc_feature (511)..(517): n is a, c, g, or t
  misc_feature (533)..(533): n is a, c, g, or t
  misc_feature (537)..(548): n is a, c, g, or t
  misc_feature (556)..(573): n is a, c, g, or t
  misc_feature (582)..(582): n is a, c, g, or t
tctgatctatgtgtaggagacattgtttgatgaatttgttgttgcccatatccttgggtggtttggcaaagctgtgatgatacgaaatcaacttctactttgggtcttgtcgatcggctttgagctactgaaactctgaaaggaagcagtagtagagggaggctacagcaccaggcaccgaccttttttttcctctaaaggatctttccgtgctcgctgaatcctattctgttcttttagcttcattcgtctccatggacagcacgacgacaagtctgctcttcacgcattctgacgaggacgacaatggggtgttgatctggcgatctgccacctactattgatctaatattaagtttataatttttaggggtttcttnnnnccataatgnnnnnnnngatttgatcnnnnnnnnnnnntatnnnnnnnnnnnnnnnnnnnnnnnnncaacccatacaaaattacattcatgccctttacannngataataattctannnnnnnnnnntnnnnnnnaaatagccttttcatntttnnnnnnnnnnnnctttctgnnnnnnnnnnnnnnnnnncctgcttanacctt

SEQ ID NO: 1989 - DNA, 479 bp, Zea mays
  misc_feature (471)..(474): n is a, c, g, or t
cgcccttctccggcggcgtcgcagtgagcccggcatggccatgctactccgccgccgactcccgctgctccgcctcctccggccgctgcatactggatcgatggcttcgatctcttcgtcctccacacctccccctccccctccccctcctcttcagaaacctcacgccgccttcgtggggccaagatcacgccgcctgcggttccccaatgccgcgcccgttgagtcggggcggggggctgggaaatcatctcccgctgccgcctatctcgctatgggcgcggccgccgccctcgcgtcactgccggtggcctacgcagacagcaatgagcaggttttgtcaattggcttttctaccattgctcgattttttttgtttttgtttttgtcattctgggagtgaggtttgcatgggttgagcacttgagcttcgtttgcgtttgcagggagcggtcgacacagtagcgagtnnnngatca

SEQ ID NO: 1990 - DNA, 345 bp, Zea mays
tgaagagcgcaaccaaggtctaaagatgctgtgttcacaacgcaggaggctgtcactgaaatcggagccgcggctgcctagagtagaaaatgcctgtgaaaaggagactaagcgacccaataattttcctctaagcgatgagaaactcaatgaactgccatcatctgaaccaatccccaaaggtgaacccgtggcacccagtgaactcccattttcggcgccagcagtcctcaaaagtcaaaccagggcccttggctctgctggtggacagaaagactccagctcaggcaattcctgtgtcaatgaaaacacgcttgccatcgagaatgctgttgtttcagacag

SEQ ID NO: 1991 - DNA, 476 bp, Zea mays
gattctggcagcgcttgtggtgatgataaatcgtcaagtgccaaagaagacttctgcaagtccggtgtttcagaaaacacccccgcaaagtttgcctccacaccagcgaggctaatggcgcctacgccaggcctcaagacgccaaagagaccaatctctgccacaggttatgataccccgcctctgagaacggcgaagagatcagctcgcgcgaagctgtttaccactccaacaaagaataacagtacgggtggagagagccaaagcgcaagcgtatctggcgctagcgccgacgacgacttgctcagcttccttccacagtccctccttcagtcggtaagcccctgctgatacctagaacggtttctcagttgactgtctggtgtgttatatgaacagagagtaacatgtgtgctactgcttacaggtgaaggagaaggaagacagggctttggtagagaaagaatccggttata

SEQ ID NO: 1992 - DNA, 367 bp, Zea mays
acatcagacttcagagaaagtatttagaaaaagagtatcacactatcccttggcttacatactaacataacatgctttctttcaggaggcgccttgaagggacaagaattaccactcaaaacatgcaagtttgctagacacttctcttgttttgctcttggactatgctctgttgctatctactgcttacttgtgtgatggtactgcagaggcaagacaggatttgactttgcaattcgaacaccttgcacgccatcgagatgggaggagtatgatgaagaaatgactgcagcctgggaggtacagttcaaatttattgtaatgttgcttatgacttttttttccccgagtttggagaaggtttgat

SEQ ID NO: 1993 - DNA, 254 bp, Zea mays
agggtagtatatgtgcattcatcgtttttcattagccttgattaggccaaagtgatagtttatgcttggtcatcgagagtttggtgatcagacgatgaagattgtgagtggcacaacttaagaggtaaacagttgtgtgattcaacatagtagagtgacaaatgatcgactcatagagagccctcgtatgagacgtgagcgacactccttcataggtgttctaataaggattagttagaagtgtcaactcttga

SEQ ID NO: 1994 - DNA, 405 bp, Zea mays
gttcagagcattggatcatggagtggacagaccatcttagatgatgagatcctggatgaagaaaacacaggagtgtctcctggttttgttcccagtctagatgttctgatggacaggaccgctaagttgaaacgatatcttaactccaaggatttccttgatctttggaggagtatagcggaaggctttgactactacatctacagcagcatacgatgggccgaagtaagtttctctgatcctggaatcgcccagctaagagttgatataaaagcccttctccacatctttaggcccttctgttcaagacctgaagcttttctcccttttctaagtgaatccctgaggttgttaaccatgaaaaaatcagatgcacagtgcttgctggaaacactaatggatgac

SEQ ID NO: 1995 - DNA, 1043 bp, Zea mays
  misc_feature (999)..(1035): n is a, c, g, or t
tcttttataatacacagggttaatatctttggactttaaaaaattgaaaccagcaagaaccttgtctctgaatatcaatatctcaatatttatcatctcaatgtccaaatgctgatttcaacatccttcctgcagagctgtttgttttgcagtagtagccatacttgttgcattggtggcatctagtccaacgaaaggctggagtggccgcagtttgagtctacttgacccgtaagttcttctagaataaaaatacattttattttgctgatcatgcatggctgacctgacttgggaactaataaacatgaaataacacttaatgatgacttggctgttattaggttttagtgtatctgacgaaatgatcttgacatttgatgcttaggatcttagacaaatataagtgtacatcaccaaattcaccattgcaacgtcttatttacctttctggtgttgctttgcatgtggcgtcctgtttcagcgtgtttgttctgcttttctcatattaatcgctgcaacttcaatcttgttttctgacagaacttatgcaagcaagtacatccccatcattgctagtgtcagtgaacaccaacctcctacctggccctcgtattttatggacattaatgtgttggccttcctgattcctgctgggattattgtaagaattatactttgttaattcaaactgtaccggcaatactcttagttctgattaatcgatttttacatgattcacagtcatgcttcttgcctctttctgatgcaagctccttcatggtcttgtacttagtcactgcagtgtatttttctggagtaatggtaagaatccttgcggtaggaagaatctcttgcacttttttttattatttacttgttataactttctgtggcatccatgctttgctaggtacggcttatgcttgtccttgctcctgctgcgtgtattttatctgggattgctctatctgaagttttcagtgtgctcacacgatnnnnnnnnnnnnnnnnnnnnnnnnnnnnnnnnnnnnnaaaaaaaa

SEQ ID NO: 1996 - DNA, 702 bp, Zea mays
  misc_feature (690)..(690): n is a, c, g, or t
atgcttcacctagtattcatagcctctccccttctgctttccatttttttttgtaactgaccacttgtcaatcggcagccacttttgaggatctttgagccaattctgaagaatgccagcaaagagttgcttcatggaagccacaccagatctgtttcaatctcaactccttccaatagcgggataatgaaatttgcaaagaaacaattaacttgccttgggtgcaaagctgttatcaggtgacacatgcactacattgcacagatgcaataactatgcaaccagtgcctataaactcttaaccgtttgcgctgcattttcaccctgcagtggtgccagtcagacactttgctcacattgcaagggaagagaagcagagttgtactgcaaaacagtagcaaatggtacgtgctgtacactctgaaatgcatctacattctgcctttggaagcactatgcccctgagctcaccactgacagatcaaaattttgatttccgcagtttctgacctggagatgctctttgggaggctatggacacaatgccaggagtgccaaggatctctgcaccaggacgtcctctgcacaaggttttctgttttcccctcaatccaacacctgctcattacttggttccagtcacaagcttaaaactcctcgtatgcaatcgaaccactgcagtcgggattnccccattttcta

SEQ ID NO: 1997 - DNA, 523 bp, Zea mays
ccctcttcttcgtctccaaagagacaaaacccaagagaggatcgtacgtcgtagggatcttgttcaatggcggacgcggacctgacaccaaaccactcgctcctcctcaagatgcctgcggcttcggcccacgcccactccccaagcctctcgagcctcctgttatacggccaggagagccatggcgaagcagcgcctgcaaacgcaaatgcaaatgcggcagcagcaacggtggaggacgccgcctcacttgagacctcttctgcagtggttgacagtgcatctccaatggagaggaagaggaaggctacagcagaagacagtgctgcaatcagctctcctcaaccaaaggtacgtagcaactagcaacttgcatacgcagcagccacgccattgccatttcttctgcaacattaaataaaaaaatgcattttggcttataggactgcaagcaggagagcaagagcaggagggggaagaggccccgaaaggagaccgaggagaagagcagcactgatgaaga

SEQ ID NO: 1998 - DNA, 372 bp, Zea mays
agatctcgccacgaacctataatgcaggcgaatcgaataagacagatggaaggggattgggtggcacgcctcacctccgtctctgggagcgggcggcactccatgagctgttcgatctgcgcatcaagaccaccgcatcccccgccgccacgcgaactcgcgaggtcctccatcccttccacggctgccggcgcagcacctgatctacctagctctggcggaaacttgtcgccggcgtgagcgcgaggggtagggagctcgcggaggggcgcgggaggagaaaagtggggcggcacggaggaaagggtgtaatgaagaggaagagggcgggagaatgtggggcctgcaagtcagtggctcacggtatcaacg

SEQ ID NO: 1999 - DNA, 350 bp, Zea mays
cgggggcccgggctggctgtttgctgtgaagaactttgctcttcttgtgctcactttgccgaatcacatactcttcaaccgcttcatgtgggattatgtcagacagacagatgccaagctactgctgacgctacctctcaacttgccttcgattataatgacagacatacttactattcgggtgttaggattgctaggagctatgtactctcttgcccagtacatgatatcaaggcgcataagaattgctgggatgagatacatttgaaataggtcatgtaactttctgaggtaaatctggttacaccttaccaagtcgctgcctgtagagtatgatttcctgaagccat

SEQ ID NO: 2000 - DNA, 220 bp, Zea mays
acggttctcgggtgccctgttggttggcagagttagagtgtgctcctctgctcctgcttcctggcgtggcgtgcatgtgtatggcgtggctagacagctagacccagaccaagaccatgcagtgggattgtgggaaactgggtctgggagtgcacaagcggccgtacgtgtctcgcgggccgagcatgcacgcatcttggtcagcagctaatctgatgta

SEQ ID NO: 2001 - DNA, 310 bp, Zea mays
gggcggtgacgaagagcgcgacaacgtagaacgcagatcgaagcgttctcgccccgaggaaggccgcgaccgcgatagagagcggcacaggtaccgcgacggcgaccggcaccgcagcagtcgggagcggcgggaccgtgaccgtgacgtcaaggagaaagagcagggcagggagaacgacaaggacaggaggagccgcgaccgcgaacgggagaaggaggagagggagaaggataggcagcggaggagtcggagccggtccgagcggcgccgtgatgacgaagagcgtgatcgctaccgtgaacgcgat

SEQ ID NO: 2002 - DNA, 779 bp, Zea mays
tctgtggtacttccggcatcgcgaactgaagtttaccaccgatccgttggctccttggcattccttttcctccagcagcggcaaagcctccatctttttgccaaccgacttgaggaatggggtgcatgaagctgcttggagtagacgcaagctttatggaaggtcagattcttgtttttcattaatccattcatgtatggagctggtcggctgttgaatcggtccctgtttctgtttctttttccttcataaatttttaaaaaatacttcatctggttattagatgcgtatcgtttctatttatatagcttccaattggttacatgcatgcagtttgatttgaatccatcggttctcgatacgcatccttgtttctgtttcttgttcttagtttcgttcacagtttttttttagaaaaaacccgggccttttcgttttactttatttgattagatgcgtattgcttttttcatgtgggtatatgtatgtttttttatttgaatgaatcgatttcgattgacatggatctcaatagacctcgtagttcatcctctcttcttttctctcgaaggataagttacatacacaatccagtctccattacgatatttggtccttaactacccagatttctgagcatactcgtggttctgcttctgcagaattctagtacttcattcccaacaagcaatcagataaaaacgaaaggagcaacttcaacagaacctgcggctccagtgattggaccgaccgatatttgcaaactgctgaaattgaat

SEQ ID NO: 2003 - DNA, 696 bp, Zea mays
taattcccttgatcccaaacacgccctagaagaaaatccttcatcttgtgttctgatgtgccaaatcacaagtttcacaccagaaatactagaagaaagtccttcaccttgtgttcagatgtgccaaatcacatgtttcacatccctctctccaaagggcttgcacttaacgtggtgggttttttggcagtacatcacgtacaagcatattaaggacagattcggtgaccgcctatggcttgatgttatttccaaatgcgatcttttgggaaagaaagagcccataagttttcacgatgctgatgaagatgtagcacggtacagaagattggggccagaaggcgccctccaagtatctgtgcagaccgaaatcggcgtctaggaagtggcagtgctgctgcaggtgcttctggagggagtaaatcatcggggggtggctcagattttggatatggttcagcgagcaaggagttatagaggatgatgaccactcaccaccgtaagatcgatatgatccgtcccaaggaatttattcctgccctttttgttatcgcgtgttgttttattaccacgcaccagtcaatagtgtggaggcaatatacattgattccccttgactggacaatacaaagataaccttatgtatttcattttttgcttacttaacattgccatgtaaaccagaatagctgagga

SEQ ID NO: 2004 - DNA, 271 bp, Zea mays
  misc_feature (261)..(261): n is a, c, g, or t
tctcttgatttgagaaatgatactcaagctcgatctaggtgatcgcttgagagagggaaatggttgaaagagacctgtcctaagtggactcctcaatggagacataggtttcctttaggaaccaacctctgataaataaactacctgtttctcttgtgttgtgatttacttgcgatttacttctcccttccctcttctaagttctcttgcttgtgtttgattcaaattcatgtattgctcccgaagcaattccgcaatcanaaagagcaag

SEQ ID NO: 2005 - DNA, 361 bp, Zea mays
atctagccaaccttaccgtctgatgcgcgcgaggtgcgctgcgggaatctgggatcgaggctgcggcatcaggccacacagctgccatggcggtttatggtggttctccggtttgagcgatgctgacgcggtggttcttcaatttgggtgatgagatgctaactgatgcctctgcggatgtttggatgtgcccgtgtaggtatcttgcgtgactcgatgcataagctctggccacccgtggaaagcagaagacttggaggaagaagcgaaagtaatgattgtttctcttccatatgtttttgtcatttggattcatttagctttgcttttgttctatagtttatggtgcttcttgattaga

SEQ ID NO: 2006 - DNA, 235 bp, Zea mays
tattgagagaaagttcttgcaccaagacgtgtggcatcaaatgataatgatcaaagcaatattgctggatcaaggattgtcttaccaatagtcagtctacaatcagaatacctcaaagctgatcctgagaagagtgaggcaagcaaaaatgtacctattattaataggtcaaaaaaggtatcaaaggtaatatcttgatatcaaatgttgtgaaaatatatataatatattttgt

SEQ ID NO: 2007 - DNA, 244 bp, Zea mays
tgtttaggcaccttataactataaatattcttagcgtttgattcattttttccttttggggctgacctaacaacaaatgttagatgatgacactatctgctgcctatctgagtgttgtttgggttcctgactgagcattaccattgtaacgagaaagcgatgtaaaagcccttgctgctgtgctgacgaaagaggattcctttccaatgttacacgatgagtccggttgatttgtgtaacatgt

SEQ ID NO: 2008 - DNA, 367 bp, Zea mays
cgagagaaggtgccaaatgacgccaaaaggggtaacaagatctacaagaaagagcttgctctttctctgctcctgctcaccgctgcgactcggagcctcttgtctgctcaggggattcatttctacttccttctgttccaggggatgtcattccttgccgttggcctcgatctaattggtgaacagataagttgattccttgcatgctattgttcttgttcagacagcatgggaatcacacatatgttcatacatacagtgatatcaaaattctaaatttcccattcatggtttagcgttttgcttcagaattgcaaccctgctcaacgacaaaggggagcgcaactgcctccagaaagcccaacag

SEQ ID NO: 2009 - DNA, 371 bp, Zea mays
cgtcgtccacacccggcctccaccattgctgggcctcgtgggtcgccgtattcttctcctcctcgccgtcgcgcggctgggaagctcatgtccgtcctgcctgcccacgcggccatacgcacggcagccagaaacaaaagcccaagtcctgtacctccaaacgtgcgatttgccacattttcaaccaatattgtcatgaccttctgacagttaagcatgcagaaagcacattttcaataatctggaggcagactctattggcatttctttcttcaagacaaccaactgataaataaatttcatctcccgattttcaatatctgggggaacaaatgggaggacaaattcttgcacttcgttacagaccagtg

SEQ ID NO: 2010 - DNA, 807 bp, Zea mays
  misc_feature (756)..(757): n is a, c, g, or t
cctcctttccttcaatcaagtccatttccactccctgtctaccctctccctcgtctctggtgggcggtggcctcgcctccctttccccgtcgccctgatggctccctctgcagctctcgctccggtggccttccgctccgccttctcgactccgctcgcgtcgaaccctacccgtaagtcccgaagctccagcttttacgccccattttggtcggttcttcctcgagttacgatttggaggcgggagtaagtgagaaatctggaatcggttcctccccaacggctggacagcgcattatccatgtgctgagtgtctgatttggggtagagttccattggaggtagggcgtcgaccggggtcccgtgcgggagcatcaggcgcggtttggtttcgttgggacttgtgagcagctatcactgatggtagccggctgcctggcttggagccgttgagctcgagtcagaactgtttatcttggaacgattactcagctggacctgctgatgaacaattacgagcatgagaaaattactctaggtttttagattgactatggactcttgttgctttgttgaacacttgaaccaaacttctataaaatggactcttgcgcacttattctagactgacattcttttgtaccgagtcaccagtgcatacatacttgctgataatttgatgttggattgggtaacatctgaacatcttgtgcccactcttgactgttgttcaggtaatagaataaacatagaagnnactttctgtttgccgtgttccgcaaggaagagagctagttatagatcttt

SEQ ID NO: 2011 - DNA, 369 bp, Zea mays
tttggctagccaaaataatggaaaagggaaatataatgtgacaggtgcctattttgggtaaaatgttagtctatacatgctaaacaggcctttgccagtgatatcgtcatcgctactatgtgccctcactctttcacagcccatcatatgttcataaatcaagggcagaccatcaaagattaagagcctctagggtcttgtcctccgttcccaagttcttattccttattttttctctgcaatttctcttttgtaagcctgcaactattctttaaatttgttgctctcttcaaagtttacctttctcttcaaagctttctcctatcggaagcaactgtctagcttgattttaaggtctatgcacccttc

SEQ ID NO: 2012 - DNA, 443 bp, Zea mays
actttcttccctgcgcgcggcggcggcggccaccaatggaagacggcggcatgtgcgagctcgtgatcggcgaccaccgcaacctccggcaccgcctgtcgggagccgaggacctcttcagcatcgtcgggacgtgggaggagcgcacgaacggcgccagtggtggtggtggtggtggaggcggttcttctgcggctgctgcccgagcatatagccagggctgcactgctggcaccgtgggagctaaaacggcggctgggaccaacaacagccggcggcgcacgggcgacgaggagaaaggcggcagcgctcccgcgcagaagaagcacaagggttcgtcggcggtgtcggatgacgagggggcggcgaagatgtcacacatcgcggtggagcgcaaccggaggaaacagatgaacgagcacagggcggggtttttggggggg

SEQ ID NO: 2013 - DNA, 372 bp, Zea mays
  misc_feature (206)..(340): n is a, c, g, or t
  misc_feature (346)..(367): n is a, c, g, or t
cctctatttttgtttcgtgtagttctcctcacaagcttcctgctactgttctccgaattcggctggtgggtgagagaaataatttgccgcatggatttggtttggtctgcgcagatacgggcgcacgaggtggcgatcgcggagctagacaacctgaatccctcccgggtcagcctcttcccctctgtctccctcccttgcttgcnnnnnnnnnnnnnnnnnnnnnnnnnnnnnnnnnnnnnnnnnnnnnnnnnnnnnnnnnnnnnnnnnnnnnnnnnnnnnnnnnnnnnnnnnnnnnnnnnnnnnnnnnnnnnnnnnnnnnnnnnnnnnnnnnnnnnnnttatannnnnnnnnnnnnnnnnnnnnngaact

SEQ ID NO: 2014 - DNA, 344 bp, Zea mays
ctcttggtgcgtgctcatatcatggccaagatttgctcatgcctctttccacttcaagcatgcatatgcgtcgtctctgctggcagcccggccgttctgacgctagctgatcgatctactccatcaccgagctggctcttctatggattattcgtcctcgtccaccgtgggacgccatgatagcaatattaagctagcaggtttggtcgatcgatcggctcgtgtcgtgtgtgcctggctccctgtatgccacacatgtagccaacccgtggcgtgattggatgctgtgggtggcgtgcaaggagccaagcatgcataacaggccatgatcacttcctctctat

SEQ ID NO: 2015 - DNA, 1389 bp, Zea mays
  misc_feature (62)..(64): n is a, c, g, or t
  misc_feature (242)..(242): n is a, c, g, or t
  misc_feature (244)..(251): n is a, c, g, or t
  misc_feature (262)..(262): n is a, c, g, or t
  misc_feature (269)..(269): n is a, c, g, or t
  misc_feature (302)..(305): n is a, c, g, or t
  misc_feature (316)..(320): n is a, c, g, or t
  misc_feature (337)..(338): n is a, c, g, or t
  misc_feature (340)..(341): n is a, c, g, or t
  misc_feature (343)..(345): n is a, c, g, or t
  misc_feature (348)..(353): n is a, c, g, or t
  misc_feature (355)..(356): n is a, c, g, or t
  misc_feature (362)..(365): n is a, c, g, or t
  misc_feature (367)..(367): n is a, c, g, or t
  misc_feature (379)..(380): n is a, c, g, or t
  misc_feature (390)..(392): n is a, c, g, or t
  misc_feature (395)..(395): n is a, c, g, or t
  misc_feature (400)..(401): n is a, c, g, or t
  misc_feature (404)..(404): n is a, c, g, or t
  misc_feature (411)..(419): n is a, c, g, or t
  misc_feature (422)..(435): n is a, c, g, or t
  misc_feature (438)..(439): n is a, c, g, or t
  misc_feature (441)..(450): n is a, c, g, or t
  misc_feature (452)..(457): n is a, c, g, or t
  misc_feature (463)..(480): n is a, c, g, or t
  misc_feature (490)..(498): n is a, c, g, or t
  misc_feature (500)..(500): n is a, c, g, or t
  misc_feature (502)..(504): n is a, c, g, or t
  misc_feature (508)..(513): n is a, c, g, or t
  misc_feature (515)..(519): n is a, c, g, or t
  misc_feature (532)..(541): n is a, c, g, or t
  misc_feature (544)..(549): n is a, c, g, or t
  misc_feature (557)..(559): n is a, c, g, or t
  misc_feature (565)..(566): n is a, c, g, or t
  misc_feature (571)..(574): n is a, c, g, or t
  misc_feature (576)..(576): n is a, c, g, or t
  misc_feature (584)..(587): n is a, c, g, or t
  misc_feature (592)..(594): n is a, c, g, or t
  misc_feature (601)..(603): n is a, c, g, or t
  misc_feature (605)..(607): n is a, c, g, or t
  misc_feature (609)..(611): n is a, c, g, or t
  misc_feature (616)..(622): n is a, c, g, or t
  misc_feature (631)..(648): n is a, c, g, or t
  misc_feature (652)..(653): n is a, c, g, or t
  misc_feature (655)..(656): n is a, c, g, or t
  misc_feature (664)..(671): n is a, c, g, or t
  misc_feature (673)..(674): n is a, c, g, or t
  misc_feature (677)..(678): n is a, c, g, or t
  misc_feature (684)..(685): n is a, c, g, or t
  misc_feature (688)..(688): n is a, c, g, or t
  misc_feature (691)..(697): n is a, c, g, or t
  misc_feature (700)..(701): n is a, c, g, or t
  misc_feature (707)..(711): n is a, c, g, or t
  misc_feature (716)..(717): n is a, c, g, or t
  misc_feature (720)..(720): n is a, c, g, or t
  misc_feature (722)..(722): n is a, c, g, or t
  misc_feature (726)..(731): n is a, c, g, or t
  misc_feature (734)..(735): n is a, c, g, or t
  misc_feature (742)..(742): n is a, c, g, or t
  misc_feature (744)..(746): n is a, c, g, or t
  misc_feature (749)..(750): n is a, c, g, or t
  misc_feature (752)..(757): n is a, c, g, or t
  misc_feature (759)..(759): n is a, c, g, or t
  misc_feature (761)..(762): n is a, c, g, or t
  misc_feature (765)..(768): n is a, c, g, or t
  misc_feature (770)..(774): n is a, c, g, or t
  misc_feature (779)..(779): n is a, c, g, or t
  misc_feature (781)..(789): n is a, c, g, or t
  misc_feature (795)..(810): n is a, c, g, or t
  misc_feature (814)..(816): n is a, c, g, or t
  misc_feature (821)..(825): n is a, c, g, or t
  misc_feature (840)..(840): n is a, c, g, or t
  misc_feature (842)..(848): n is a, c, g, or t
  misc_feature (856)..(857): n is a, c, g, or t
  misc_feature (862)..(862): n is a, c, g, or t
  misc_feature (869)..(872): n is a, c, g, or t
  misc_feature (879)..(886): n is a, c, g, or t
  misc_feature (889)..(900): n is a, c, g, or t
  misc_feature (904)..(917): n is a, c, g, or t
  misc_feature (919)..(924): n is a, c, g, or t
  misc_feature (926)..(931): n is a, c, g, or t
  misc_feature (935)..(940): n is a, c, g, or t
  misc_feature (942)..(944): n is a, c, g, or t
  misc_feature (948)..(960): n is a, c, g, or t
  misc_feature (966)..(969): n is a, c, g, or t
  misc_feature (971)..(974): n is a, c, g, or t
  misc_feature (977)..(980): n is a, c, g, or t
  misc_feature (982)..(988): n is a, c, g, or t
  misc_feature (991)..(993): n is a, c, g, or t
  misc_feature (995)..(996): n is a, c, g, or t
  misc_feature (998)..(998): n is a, c, g, or t
  misc_feature (1002)..(1002): n is a, c, g, or t
  misc_feature (1005)..(1012): n is a, c, g, or t
  misc_feature (1018)..(1024): n is a, c, g, or t
  misc_feature (1026)..(1039): n is a, c, g, or t
  misc_feature (1047)..(1048): n is a, c, g, or t
  misc_feature (1051)..(1064): n is a, c, g, or t
  misc_feature (1066)..(1073): n is a, c, g, or t
  misc_feature (1076)..(1099): n is a, c, g, or t
  misc_feature (1102)..(1103): n is a, c, g, or t
  misc_feature (1109)..(1111): n is a, c, g, or t
  misc_feature (1118)..(1120): n is a, c, g, or t
  misc_feature (1131)..(1137): n is a, c, g, or t
  misc_feature (1141)..(1166): n is a, c, g, or t
  misc_feature (1170)..(1199): n is a, c, g, or t
  misc_feature (1201)..(1211): n is a, c, g, or t
  misc_feature (1217)..(1222): n is a, c, g, or t
  misc_feature (1225)..(1228): n is a, c, g, or t
  misc_feature (1232)..(1232): n is a, c, g, or t
  misc_feature (1234)..(1244): n is a, c, g, or t
  misc_feature (1252)..(1257): n is a, c, g, or t
  misc_feature (1261)..(1274): n is a, c, g, or t
  misc_feature (1276)..(1280): n is a, c, g, or t
  misc_feature (1282)..(1284): n is a, c, g, or t
  misc_feature (1286)..(1289): n is a, c, g, or t
  misc_feature (1291)..(1301): n is a, c, g, or t
  misc_feature (1305)..(1305): n is a, c, g, or t
  misc_feature (1307)..(1314): n is a, c, g, or t
  misc_feature (1316)..(1319): n is a, c, g, or t
  misc_feature (1322)..(1326): n is a, c, g, or t
  misc_feature (1331)..(1332): n is a, c, g, or t
  misc_feature (1335)..(1356): n is a, c, g, or t
  misc_feature (1358)..(1360): n is a, c, g, or t
  misc_feature (1362)..(1364): n is a, c, g, or t
  misc_feature (1366)..(1368): n is a, c, g, or t
  misc_feature (1374)..(1385): n is a, c, g, or t
tgaacgcggtttggaggtggagaggaggcgccttctcatgtccgggctcgtgtcttctttcnnntcgtgctcccgatttcaggtagtgttcacgggcctccgctcctattgattcgttgctatcgcacttcgccagttcagggtcttctgaatggaacatctatcattttttactctctgctaatgtccactaactgaatttgtcaggcatgtcagtagagcacgacgcgagcacacatccnannnnnnnnttttcatgagntcaattntaccaaggataacttcctctgtgaactcaatannnncttgctagatnnnnngtgctttcccgcgcttnncnnannnagnnnnnntnnacatannnncnacaaaggaagannatttcttgannnatntctanncancatatannnnnnnnnacnnnnnnnnnnnnnntgnngnnnnnnnnnnannnnnntacccnnnnnnnnnnnnnnnnnnattgcaattnnnnnnnnnanannnctannnnnncnnnnngaacggagtactnnnnnnnnnnaannnnnntattttannnatatcnnacaannnntnactccggnnnncaccnnntaaagcnnncnnntnnnatgannnnnnncctataaannnnnnnnnnnnnnnnnnctcnnannctttaatnnnnnnnntnntcnncccccnnatnttnnnnnnnctnntttttnnnnnttttnnaancncctnnnnnncgnnacttcantnnntcnntnnnnnnangnnatnnnntnnnnnttcangnnnnnnnnnaactcnnnnnnnnnnnnnnnnttcnnnccccnnnnnaaaatttttcttggncnnnnnnnatattacnncctcnccccacnnnncaaccannnnnnnntannnnnnnnnnnnaaannnnnnnnnnnnnncnnnnnncnnnnnncccnnnnnncnnntccnnnnnnnnnnnnntcctcnnnnannnncannnnannnnnnntcnnntnncncctnacnnnnnnnncctccnnnnnnncnnnnnnnnnnnnnncttagtgnnctnnnnnnnnnnnnnntnnnnnnnnctnnnnnnnnnnnnnnnnnnnnnnnnctnnccttcnnntcccccnnncccctttcatnnnnnnncttnnnnnnnnnnnnnnnnnnnnnnnnnnctcnnnnnnnnnnnnnnnnnnnnnnnnnnnnnngnnnnnnnnnnnccaaannnnnnccnnnnactncnnnnnnnnnnntctccccnnnnnntcannnnnnnnnnnnnntnnnnnannntnnnncnnnnnnnnnnntctnannnnnnnncnnnnctnnnnnttctnncannnnnnnnnnnnnnnnnnnnnncnnncnnntnnntacatnnnnnnnnnnnntgac

SEQ ID NO: 2016 - DNA, 351 bp, Zea mays
gtccagcaccagcaccagcacgtcgtcatctgaataacccagcccagtccttggactgcgagatctctgaacccccagctcatcagctcacaggcacaaaggagaacagtcttaaggtgaaactgctgcaagcaaggctagaggggcagcacgctcggctgagcgcgtcagtgttccccctgatcagcacaagaaggaagtgatgccactcgtgagcttccatgatttcgatccgcaacacagagttgcaattgtaagatagctgaatattgttagctcgaggcaattggactcggtgtgaatcctagatccagccgcgtatgttgtagatttgatctgctaactgccaga

SEQ ID NO: 2017 - DNA, 441 bp, Zea mays
tcttaagaggtcggaacaaagaagaggagaaaatgtattgaatgtggtgaactaggccagatagccaaacattgccatggaggtcctacagctaaagagaagaggagggtctcttcttcaggaaatacaatagccatgagtaacaatgatccaagtgaagcacaaacatcaaagtaatcattgatttctcattttctgaaattaacaatttacttgtcaactaattcatttttgctttgtaatatgttatgctagtgatagtgcaagtgcagctcctgaaggaagaggaagaggaaggggaagagggaggctagcaacattacttgggcttgaatgattatgagacttatatgctaggtgccttatatgttaggtgccttcttttgtatgaacttgaacatgtgatgattatgggacgtctgtaatgattatgaggattct

SEQ ID NO: 2018 - DNA, 660 bp, Zea mays
ccgtcagcatgagcgaccgcaggtacgggtactcgtacccgccgccccagggtaagctatatgcagaagcagaagacaacggattatactactaccgcgttcattcagttacatgcaccgcatgtatgtatggtaattgcttgactattatatatgctcctgggaacgcagggtactacaacaacggaccaccggtgatggcgccgccgccgtaccagtacgcagctcctccaccgccgaggagggagccgagcttccttgaaggatggtaagcagccacgcgcgcacacgatctactagctagcttgcttggagcacgaaaactagctatgcccggcccattggagagagatagagagagaggggaaaaattagtatttggataaaaactaaaccatcactaaataatctgaacagttcgatgtttctcatttcactcgatcttggacacatgaatgcagtctcgccgctctgtgctgctgctgcctcatagacgagtgctgctgcgacccgtcggtgatattcgtgagctgatccggccgcagtccgcagcacatgccatgccaccgtcccagcccaagagacatgtcgcatgcatacgtgtgtcggtgtgtgttcgcatgcacttcgcgcctctgttggtgatatatgatgtttttt

SEQ ID NO: 2019 - DNA, 331 bp, Zea mays
actgtatcccccctcctctcgctaaccctttgtctccttcccccacaaaaccacctccgccccctcctcccaccagtacctgtgagttgtgagctccttgctgcggctgcttgctcccctcatctctagcctgtacactggttggagtggttgccagtgttcccccccacctgctcctctcgatccactccatcccctttggccatgggtgtgcaagcatacatctacggtaattgcatgcttctcctgccttgaagcggaagccttagccttagcctgccgcctgggggaaaccttctgtttcgccgctgccgctgctgtggtataaagg

SEQ ID NO: 2020 - DNA, 814 bp, Zea mays
tttcttgtgaaattatgttggatttcctaatttattttgagttcactaccaattgcatgtcttaccgatttagtaatttgtgaattgtgcagtcagatattttgttcagaatgatgtttttatctgtcgaaatatcttctgtgcgatttatctaaatcaacatattattgcaggaatgcatcaaaagagaaagagattaacctcctgaggaaatcgttggatgataccaaaaaaattttgcatgaaaaggagcaatgtttactgaaagaacaagtacttcttaatcagagggatgacagcatccttgagagacttgcgtacataactcgctcagagaaaaggttggaggaggaaaagttaaatctcgaagatgaaagaaaggttcttttggaagagaagaataagctggatttgaacatacaggcaattatatccagggaggaagtatgtgttgtttcattttattcttttttagctagcagaattgcattatgaagcttatgacagaagtttgtttcactcttctattcttagcagtttgttactgagattatgacacaaaatgctatattgtaggctataattcagaaggaatccatacttgacaaacgtgaaagtgaactattgattctccaagagaccattgcaagcaaagaaagggtatgattttctagtatcatccaatgtggcacagtttatcttgagtccatacttctgaatcagtgtttatcttgagttcacacttatgaaatctgaatcattatgatatttgctgtaggctgaaatagaaaggctccgtcaagaggaagaaatg

SEQ ID NO: 2021 - DNA, 315 bp, Zea mays
ctgcacttctgcctgcaagagctcctgctgctggtggaacatagtagctagtagtagctaggtgaggaggagaaccagcccggcgaccagcgaccagccctaagattagctcgttccggttgtgcgagccggcgaccagcccggcgctggcctccatccccctggcgctaccagatctcaagatccagattgtttctaagcaattccagattctttctatcacacgtctcttcccctctctctctctccctactctcccctgccggcttcttggctttctctctccactctactctgtggtgtgaactgtgaaga

SEQ ID NO: 2022 - DNA, 382 bp, Zea mays
ccttcgccgacctctggacccgcaacggcctcttctgcccgccgtctccctgccagttctaggcagggcaggtgcagccgggcaggatgctcgccgtccaataacacggccggcggcgccacgccatgcacgtacccttgcatactgtattaattaaccactagatttagctttagctactactaccaccaccacccagaaaaaaaggtcatttctaccattaacgagaaggcaaaagcagctcacgcgagaccgagatcgacgctattatcggaggtccccggccggcgagctgcatcttgcatagttgcatgaatttagtgcttaattaaggtgagcgcaaagaaggctatgcaagatcatttgctgttgctgctgtaaa

SEQ ID NO: 2023 - DNA, 301 bp, Zea mays
agctagggagttcccttgggagcacccaatgaccgacgctgctggtcagggagggggaggaggggaaggtggaggttccatgaatggctatggttcaggatctggctccggctacggatccgctggagctaccaacactcctggtgggccgtatgggaccggtagctccatggctagtgtagatggcggtggcggcggcggcggcgttaatggtgggtctggagctggttctgggtcttcggcaagtcgtagctacactgttggcttctatggtggagggtactcagatgcacaaggcagg

SEQ ID NO: 2024 - DNA, 247 bp, Zea mays
gttgctgctcttgtaggatctcggccactactccctgtctctggctccctgctggcggcaagcaatgaagcaagtagcaacaatcagggcagtactccaatagtattctctccactctccaacctccaattgctgtccagttcaaccggcaccatgtctcagcaagagaagcaaacaggcatgtattcttcaatagatgttcatgtttatactctttttttttgcaaatccgctaaaaggtttagct

SEQ ID NO: 2025 - DNA, 406 bp, Zea mays
agatcgatctaacaaaataactcagatctgtttgtgtgtcagctcgacaagtgcagttaatactagcatgcttgttgtcggcacctaaaaacagtgaagcaggtaacgatatcaatttgatcttgcgtccaactatttcaatgactgaaaatacagtacatgtcatagctgcattctgggtgccatcctcgatcatggaaaacaacattctctatcaaattatatctcctcatgtaagcaaatgtagcctcttcttctgtaatatgattagtttgaacattgatactgaattatatgcacaaacatacagtaggctattattctcttttgtgcaggatggtgctcaaattttgaaaaatagatgtaggtgatccaattagattttactaccatggttcattgagcg

SEQ ID NO: 2026 - DNA, 317 bp, Zea mays
gtgtccaatgacaacaacctgcaagttgctggtgttggcaaatattatgtagtagatctttttcttagatatgtacttttgagtatggttatgaggattttcatgggtctggttttgcttttcatgttataattctattagtcttcctgtttgcatgagagtaaagcagttgttacccccaagaaccatatgctacatggtcaagaaagctgagagcgggtggtggccaagactgctgaaaaggaggccaaggcacctgtgttcttgaaggctgactaggacaaatggcaggatgaggatgatcaagatgttggatg

SEQ ID NO: 2027 - DNA, 335 bp, Zea mays
ggatatctgatttttatagagaatcctttactttccattggaagatgttgtgccttatttgtcgctaaaaagtttttggttccttatctgccaaccactcttaactttcttatccaccacttctataaatttctcagttagttgctgttaagtggtaccgaaatagacttttttgccacttccatgtgtacaccatgtagtaagataagatttgtcctggtttccttctttaccactgataatgtaaacatatgactattctggactttgtatgacgccatgtacagatgtggtctcttacatcacttttaataaagtgcatacatcagcacaag

SEQ ID NO: 2028 - DNA, 412 bp, Zea mays
attctgatctatgatcacagaaggaataatctttggtatgtacaacttgtcagttcgatcaactcttatgtataccttcttccatttgatatgagaatgctcggtgaaaaactagagacgttttcctcaactagaacaattcatcattggacagtcatgcaactattgagatcaccaatcctggatccactctggagcagtgagatcatctgggtcttcaatcggcacggaaggagatgcggacaagtcctcattaagagtttctatacagtagttgatgcgctcagtgatttcttcaggtgctgcacaagtcccagatgctattcgctcccaatcagtgccatcaaaccaggggtgtttcttcacagcttcagcaccactggttccaaggcgcgcgttttcgtcgaccacg

SEQ ID NO: 2029 - DNA, 395 bp, Zea mays
ttgccgaggagctcgtcggagaggtccctcggcaccacctgcaccaagccacagctgctgccttccgaggacgacgagtccgccgcttcctcggcagacggagacaggtcgggcggcaggctcatgaggtccagcagcgacggtgatggcggcatgctggctcctgtcctgatcaggcaggcaggcggacagtaagaatgcatgaggaacaaacaaggatgggtggatggagatggataggtagatagataggtgagctgttgtactttcttggtagcggggcaagatgcctgtggtgtgggggcactgcgcggatggccggatgggacggacggaggggctcctgctgcctgctgcctgctggcttgcttgttgtctttgggtagatcaaaaaa

SEQ ID NO: 2030 - DNA, 371 bp, Zea mays
  misc_feature (18)..(18): n is a, c, g, or t
gggacgagtcctgctccnagtgaagaggcgacacgagcgggtccttctgggatgtcacaagtggcaccggcgcctcattcatgtgagtttgtttcttttccgtttatgcttctgcaactgttgtagatcgttatctgaaaaaaaaacacacttggtttatctgtgttcaagtagactatgcacgttggaagtaaaacaccgtgcgaaggttaacaatacatgatgtttgtggtgtttgcagcttatgccaccaggatgcagggcgatgttccctgctgctgggtcctttttgtcctcgcgctatgcgtcctaacgagcctgctacgatgagaaggaagtgcacggccggccaacgagatgtacatcagcga

SEQ ID NO: 2031 - DNA, 441 bp, Zea mays
tcgagcgcatgcggcggcacccctcttgacattgacaaggtgttcgacaggatggtggccctctccggtgtcagcgttcaggcggcgcccggcggcaacggcgtcgtcgggagcaacgacttatcagttgaggacgctttcctctagttctcgttcttgctgtttaattacgatgaatataatatgcatgcatgttgtttcttaattttggatggaacgaacacaggtggtgatcttcgccctgatcgacaacgtcttcggcaacgtcaagtcggacatctatgacatggtctctgcttccactccttgttagccatcgtcaccaagctacgtacgtgtctacatacaggatcgagatttgcagtcactagcctcaagtgattggatcatgcatgtgattagctctagtcttgatgtgatcatgcacataagcaaacaccg

SEQ ID NO: 2032 - DNA, 395 bp, Zea mays
ccttaattgcttcatcacacatacatttttgtagagttgccttgattagagctcatgctacacgtcaatcaggagttctcgggaatgttcaaagatttttcttgaggtttatcatttcaagtttcccaaaatcatttgcagaataccaccatattgttgctatttcagacatgcaaaaatcttctggttgatttgatgcaactagaattattgatggaatatgcaggcctaaatgagacgtcacgtacatattcttgcggaattaccctgaccaaactctggccatatgcccatatgtcaacaaaagttttccaagatattcagaaatttctcctgaaatttatttgatcgcacattttaggcacatgtaagataaattttgtaggcaccatatc

SEQ ID NO: 2033 - DNA, 223 bp, Zea mays
  misc_feature (212)..(212): n is a, c, g, or t
cacgattaactcaggaattttatgtaatgttgatgcaaggacactgacttttatcatcagaaagacttcctactgttgatggtatggattctagcagctggattttagtttttgtatttggtgaactttgttcaacacactcgttgaagttaacagtaacagatacaagtctattatcctgatatttttaatatgcatttgcaggcattagnataaatcatat

SEQ ID NO: 2034 - DNA, 242 bp, Zea mays
  misc_feature (202)..(202): n is a, c, g, or t
  misc_feature (210)..(210): n is a, c, g, or t
  misc_feature (228)..(228): n is a, c, g, or t
aaaattattacatacatggtgtattgagaaagtctacttttttcacgtattgtagcaattgttacccgtcagcctagcgaaacttctgggtacgcatgagcctgaaattcgttcctacggatagtcgaactcgggacctgagaagtgttacttagatcacctaaccaactcggctagagaccatttcgtttggtacacatgnatggaagncattattatgttgaaggntacacctcttgccc

SEQ ID NO: 2035 - DNA, 474 bp, Zea mays
gctgaataccgttgaagctacaagaaccagtcgaactgaaccgacttcagttgaaacatcaactgttgctgaaatggcaacagataaaatgaccacttatcatggtaaatgaacagcgtccttctgttatgtttttccattcttacctgtgttgtgcttgattgcatttttattattcccttgtaatgtgtgtgcagtggaagagcacttatccatgtcgtatgcaagggtatttgaaaagatgaacatatgtaagacagcggaattggatgagaaatttgatgaagtgcctcctggaatggagactggcttagtccctttaccacttatggacaaaaatatatatcagccttcaaagtcagtgaactctattcctttgatttctagatatataacattggctctctgtcggcaaaaactacatgagaatgttgtgagagagtggacatatctcttctcagatacaattagcag

SEQ ID NO: 2036 - DNA, 324 bp, Zea mays
gggcgggcggctagctcatggctacgctacaagatggcggcgcatgcatgtgtctcaacagctagccgcatgcatcctgcattcctgctgcattgctacacatatcggccggcattatttcagaacaagcatgatgcatgctcactactgaagcaggtcatatcgagtagtatatacatgaccagtgaccttttttaacggaactttgggagtaatcatggatgcatggtagctacgtagaattcatcaagcaagagagcgtagaatttatgcaaaagaagaagaagagttaatttgcgtgtaatttcatgcccatgctttcag

SEQ ID NO: 2037 - DNA, 324 bp, Zea mays
  misc_feature (68)..(72): n is a, c, g, or t
  misc_feature (76)..(78): n is a, c, g, or t
  misc_feature (83)..(83): n is a, c, g, or t
  misc_feature (105)..(105): n is a, c, g, or t
  misc_feature (110)..(110): n is a, c, g, or t
  misc_feature (121)..(121): n is a, c, g, or t
  misc_feature (177)..(178): n is a, c, g, or t
  misc_feature (182)..(182): n is a, c, g, or t
  misc_feature (234)..(236): n is a, c, g, or t
  misc_feature (240)..(257): n is a, c, g, or t
  misc_feature (259)..(262): n is a, c, g, or t
  misc_feature (321)..(322): n is a, c, g, or t
gggcgggcggctagctcatggctacgctacaagatggcggcgcatgcatgtgtctcaacagctagccnnnnncatnnngcatncctgctgcattgctacacatancggcnggcattatttnagaacaagcatgatgcatgctcactactgaagcaggtcatatcgagtagtatatanntgancagtgaccttttttaacggaactttgggagtaatcatggatgcatggtagcnnngtannnnnnnnnnnnnnnnnnannnnagaatttatgcaaaagaagaagaagagttaatttgcgtgtaatttcatgcccatgcttnnag

SEQ ID NO: 2038 - DNA, 767 bp, Zea mays
ggactcaccaagtgtaagttaaatcatgcttatcaaataccttttcattcttgaacttccatttaatgatagatgtttcattcatcctcaggtgagtcgaaagctaacctattctccagcaaaggataaacctgaggtaagtctatttgatatttgatatgaaggaaacaatccaccatgttctacaccaacacttgaaagaaaaaaaatgaaatatgacatcttttttgaatattttcaatatatgattttttttcaaaaaactttaccaactgttcttaatttcccttttactcttatacaaataatttaactattgcacagacaaaccctcttgatgctgataaaaatagagctcctgcaacaacacttgaatcacctacaaaaaggtctgtagttctcatctcatcatatagtactacttccattagtacattcgctatactatacagctaaactttcatcctacattcatccaggatcaaacaagaccctaagaatcaacaagagtagacgttgtgtgcaacacagtaaggtaaacaatgcagctacaacttcaaatagactaaaactttactctatgattgaaatatcctaccattattggctgcaggaatacttctgaacatcacgcccaaacttcaacaaacgaagcatattcctcactattttgtctataaatattatgtgtgccttcttctatgaagcaaaccttaccctcgatatgctatatataatatctatgtattgtcatgtaatataaccat

SEQ ID NO: 2039 - DNA, 519 bp, Zea mays
gaaggtccatcgcaaatccaacctgcaaaggctgaagatgaatacgatttcttgcacgacggcagaaggcaggccgaagccaggctacagagagcacttgcccgggtgcactctatgtcacagtacccagaagcgagagagcagtaccacaggcttacaacctgcgttgctgaaatgaaacagtccagggtatggtttgatcgctcgctcctatgctttcgaagcttgctgcaggacgtgttttattttccctcggggtttgatcatgatttgatgctggctactttggaacagatgatgcaggatgagatgctaagccaggcggctggtggtgcggacgatttcatggctggactggaggacttgatctgcatagatgatgccccgccccgatgtctgccattcggtgaagctgagcctttttacatcagataggcagggaggcggtttccttgctccccttttgtcagactagccctgtaaatattcttcagctagttgttcaccccgactgtttac

SEQ ID NO: 2040 - DNA, 882 bp, Zea mays
  misc_feature (871)..(875): n is a, c, g, or t
gggaaatgctgaaaacccacccgcaatagtttttcataaggattctccaaaaggattcaagaggcttctaaagtttgctcgaaaaaacaagggagacaacaatgctaacggctgggcaagcccctcggtagtttcagaaggagaagatgaactagaagaaccaagaggcactagtgatggtacaaattcaagcaggagaacttttgatggttcaaagactaatagcatcttatcaggtacctttccgaaccatggttttgaagatggttctgcatccaagtcttaacttttataggagcaatctcagtaccgatatagttggtgtctgtcaaggctttttgataattacatccatgatttaaaaatgattatatggtctgaccttgtgctgacaccaggtagtgatgatatgagagtttgtatagacaagcacatttccaattacgttaacctcatggcatcacgcacaaattttacagctttacctacccactactaggcagaacttttttgttgaagcatttcatctttctatgcttgatcaaattagctcagtagtgttaatgtttgaaggtcatgcatttcttggagaaaaggttttcatggtcatgcataaatcttagcatattcattttcagctcaatcaactaccggcagcttcaactctttgaactcggataagctacgggagagatcaggtgctgccacatcaacaagaggttagttctcgccaaacaatgtaatgtgatgtgatcgaattaggacgttgctaacccatctgtcacggtacttccagcatcaaggtcgttcttctcactctcaaacttccggagcagcaggtcaaatgagtcgaagcttcgatagtgtctgnnnnngtttgtc

SEQ ID NO: 2041 - DNA, 309 bp, Zea mays
ctttctagacacgcagcctgtgaagccaaatcaccaataaacaagagagagagagagaggcagggaggacatggagtaatagctagagagacggagctcgtggccggcccgtcgttaagatctaaccgcggctttaatctagcgatcgcgataggtaactaaacaagcacgtacgctagggtaggtacaagctcgggtcctggacgtccgcccagcagctcccggcgctccagtacgccgcggctgacgcggcgtcgccgagctcgaatatcccagcggcgtccagggatgcgaacggcgccatgatgt

SEQ ID NO: 2042 - DNA, 569 bp, Zea mays
  misc_feature (509)..(510): n is a, c, g, or t
  misc_feature (558)..(558): n is a, c, g, or t
tctcctcagttgtcagcttatttgtgttgttaccttatgtgattaatgtgcttcaagatgtgtaagtatcgcacacttcctgcaggtgctcgctgataaaggctatgatggtatggctgcagatgtatggtcctgtggcataatcttgtttgttcttatggctggatacttaccctttgatgatgccaatctgatgagactgtacaaactggtaaattcggttaatacacttatatcttggtttccctatgaaatgcaagggtaattttgatgaacttttatttgacttccttttgtagatctgccatgcaactttttcttgcccaccatggttttcttctggagcaaggaagtttattaagcgcattctcgatcctaaccctgataccgtaagttcgaattaagatgtgccttttcattatctgtctcatctctttcatttatctgttgtattgttgtcaccagattacaaccagtgtcactgttatcactgttggataaatgggtgnngtattcttgcagaggataaaaattgcagaaatttggaagatgaatggntcaaaaaaggc

SEQ ID NO: 2043 - DNA, 499 bp, Zea mays
ttcatgttagcactcttctatataatttgtcgatattcttctgtgatcccctcagatcatgattgtcctcctgctggtggctatccttttcggggcactgtataccaagtgatgcacttgtagctggcctttttcccctatggagacgagacaaactctgccaatctggtatggcaaataatttgaactgtttaaaccgcattgcttttgaacagtttccgtttccccctgaggctgactatgttgcgttaccggttttgcatagatccttttcgtactctgtagtccccaatggctgcaggaagttcgaaattactggctgtagaagtgtagatcatacggcagcatgctactgcttccatgactccgttactgctctcgattcgtttcttcattatgttttctcgcgcgttgtatcgtttgaagctgttttaagcaacggaaaaaaaataccatgtgacacgtgtatcctacgaacatgggtttctgtttagttagc

SEQ ID NO: 2044 - DNA, 421 bp, Zea mays
  misc_feature (380)..(402): n is a, c, g, or t
  misc_feature (411)..(416): n is a, c, g, or t
ccccagtcagtgctgaaccatccgatagacattgctgaaaaggttactcggatgggttactcgaaggatcaggttgagggtcttgcactccgtatggtggctgcaggccagcctgcagaccataaccccctgcatgataggttgagctctgttagccatggtgtagctcctcatgcatggtctggataggtaagaacgacaaatgcagccgtcacgcttacttattactcatgaggtgtttgtgtgatatatctcggtatgtgctttattatcgtcggaaatcttcaggtatttcctctggcgtctttttttatcagccaggattgcatatccaccagcttatttttaccagttggaggatcgagatgaaataagatgcnnnnnnnnnnnnnnnnnnnnnnnaaaaaaagnnnnnngagga

SEQ ID NO: 2045 - DNA, 421 bp, Zea mays; identical to SEQ ID NO: 2044
  misc_feature (380)..(402): n is a, c, g, or t
  misc_feature (411)..(416): n is a, c, g, or t

SEQ ID NO: 2046 - DNA, 323 bp, Zea mays
  misc_feature (307)..(317): n is a, c, g, or t
tgcacattccaaccgtatgcagacggcatccctaccccaaaattcactgctagtgtaagctttcaatttttttcatgacctgtgcctgaaatttgtatttcgaaatattgttgtacctgaagtaaataataactatgttgtgaaagctgctcacatttgtacttttcattcttttcaggagaggaattttctgctgtcagttttagagctgacctcaccagggtcaaggcctgaaacttctcagcagccatcttgcaaaagggctcttcttaatagcctttgaaatgggtttgcataaaatcccaannnnnnnnnnnctatgc

SEQ ID NO: 2047 - DNA, 372 bp, Zea mays
cccgaagtgcagctgcccggtccgttcccgacgccgtaccgatttggcgacatcatcagcaatgtgatacagcagagcgcggcggcggtctacgtccgtgacgacgacgcgcagttcggaggcgacatcgccgtcgcgtcaccggggctgaggttcggctcaggcctggacgtggcgggaggcggcgggttgcagcagccgcacaagtccacgggatccaacgccagttggttctactgactgcgcatgcggcagaatcatggatggaatggacaatggaggttggatattagaattcacgagtagacgacgagatcgtcgtgagttttctccagtctcgtatttaagtatttgtataagcctgcaaatata

SEQ ID NO: 2048 - DNA, 310 bp, Zea mays
gtctgggcaggaaggtgaggactggctgttcgacaaaggcggcacccagccaaggaagccggccagttcagcgcctgaggctgatggagtcccccaagtgtgggctcaggctctgaaaattgaccatgctgatgtcattgctctgccatacgtgatacccttttagctgagtgacaatcacctgtgaagctgagacatcaatgaacaacagcactttgtgtggctgggatgtgttgccagcttttacaagtagcttgtgtggcatagatagatagcttcatgcaccactcccttttgccgtgggcgtgct

SEQ ID NO: 2049 - DNA, 283 bp, Zea mays
actgtacagctgacttaagcttcctcaccaacataaaggcaaaaaatactgttcttcttagcccccttgccaccatagagtatacctccatgtcaaaaaaaatttaccctggtgttaggatcccaagatatagagtagcttttaagttctatatgtcgcatttcatgacgtgatttgaagccaatgttcataattctgataaaactagttctactcctcaagcaagatggggatattttggaatgtaacttgaccatgcatgtgttgcggattccagatataa

SEQ ID NO: 2050 - DNA, 240 bp, Zea mays
  misc_feature (229)..(229): n is a, c, g, or t
cacgctgtcaagtccatgcagtatgactcggtctcgatctcggctgtggacccccagttctactcggagcgtttcttgaacttcatccagaccgtcttccctgagaattcgtagctccatccaccaatacttttcttggaagatgcccgcccactaccacttgctgagaacttcatccagacgacagtccatgtcttcgaatttggagcttgcgagcatcataagaacnttgcactctct

SEQ ID NO: 2051 - DNA, 350 bp, Zea mays
taattgtatgtttgggcctggtttggatcatcggtcaaactgacccagcgggctgcttgcttcaactccgatctccactcttctctcctctcctctcctgtctcctctatatagagattagagagaagagatctaggaaggcagacactgcaactagctagcaggtccggcaggccgcacgccatggacgcctccgccggcagcgtgctctgcagcaggagctactcggccagcgtgagcagagcctcgtcttcccagcaagcagaatcgtcgtcgcggctgtgcgtggaggagcaccgggcggaatggtgattcatctgcatgtactacgagcagcatttgttcgattt

SEQ ID NO: 2052 - DNA, 411 bp, Zea mays
cgtgcaaggagaagctccggcgcatggaggcggcggcaacggcggccgacgataagacgagcaagcagggacgcctcgcggagaagaaggtctcaggcacaggacgacgcctgcttgggctcctgaagaagaaggtgcacccaaaagcggccgcgtcgtcgtcgccacccgaaagcggcgctgaagaagcagcctcgtcttcttgattcagctccgtccaacaaattcgctgcccaccattgccggacgatagatcagccgtgtggtagacgaagacgaagcacgagcacgtgcgtggcctgctcgaaaccactcaaacagagacagagtgcgtgcttttctagctaggattgtgttgttgtgtactacttgtgtagccttcgttcgttcgttctttcgttctctgtaaaa

SEQ ID NO: 2053 - DNA, 515 bp, Zea mays
  misc_feature (500)..(510): n is a, c, g, or t
tgcacccatgacaggtgctgaaaatatttacattcatgtgcataaagataacttaccagcatggaggctctatgatcagattggattcaaggtatgtgccttgtttcagtttaatcctgaaaaacttcgtgaaggtacggaagtctaaattgaaaataacacgcatgctatttgtctgtagatcgttgatcaggatgacgattgtcgttcatcagacctgtgcttactctccttcagttcataaggcttgctgactagataggaatagaagggacatggcccctagttccatctccctgtccagggaaatgccatcagtcctcgcgatttggaaaggcgggatggtatgtgccaagtaataccttcaccaccttgtatatgatgaaagtgtttccaaatgtttgcggctttcgagattgtcactagatcggtggcagttcagatccaccagaatgtttgaggtatctgaatacatcaaaagcttctgtcgtgtatagttnnnnnnnnnnncaaag

SEQ ID NO: 2054 - DNA, 168 bp, Zea mays
cacaagacgagcagcaaaagatgtctgtggtgaaaggagatcatttggtagtttctcaacacgtaattctgttatactgggaaactctcctctgcaaagggttgatctaatgccttatggaataaagatttccatcaaattttgtgacagcttcatttggctttgggg

SEQ ID NO: 2055 - DNA, 596 bp, Zea mays
  misc_feature (556)..(571): n is a, c, g, or t
  misc_feature (573)..(573): n is a, c, g, or t
  misc_feature (577)..(589): n is a, c, g, or t
  misc_feature (591)..(591): n is a, c, g, or t
aactgtgatttcactgcttcatctcacggtttaaagttaacgctccttgggtttgtatcttccttttcagcttgtaaatatgctgggcgaatcagaaaaccgcaagtgcaacgtcctcttctctcgtctagaccttctcaaggtgagttcgctgtttcacttagcttggttaagcaaacttctagtggtcttctagcccagctacgaattccatgctctgcatgcagagatatccgtttcgcgtatcctgtggttcagctgttcagtttgcagtgtgaagaaatctatcttaatctctatatgacacttctcacatgatctggatccaagatgagatttcgtttcttgctgctaacttgcagttggagcggatcgttgggacgtcttcggcgcgaaggttgatttcctcggagaagggcatgtttgtcttctgctgatgtagcagcctagcccgtactgtagagcaggcgaatggttttatacattgatccctagcaaatgtacccacagcagggggtcacgttgttgtttgcctgtcaggcaagaatctggaccnnnnnnnnnnnnnnnnanaaannnnnnnnnnnnngnccccc

SEQ ID NO: 2056 - DNA, 270 bp, Zea mays
tgatgatgagtcagagtgccacgtccttgtgcaaaatataatgtcatcagctggattaggcacttcacagtcacgtatggttttcgccggctggcatttacctgatcaccctcttgacccggtgctgcgcaacaaagtatctcagctgcaggagaaaagttcatacagaaggcttctttttgactgcgtgaatgttgctctaattgagatcggtgagaacgccttactgagcgccctcccatggagtaaaaggagctccagaacatggag

SEQ ID NO: 2057 - DNA, 271 bp, Zea mays
  misc_feature (235)..(238): n is a, c, g, or t
  misc_feature (241)..(261): n is a, c, g, or t
tacgatcatgccctcaagcatccagttttttttaccatatggatatgtgtggatacaatagcaattaattttattgtctatcccaattaagaatggccacaatgtagcatttgattgacatacacctctaatatatcgtacataagcaagaatatgtgaatacagtagcggtttgtttcattacatgaatttatttattaagaatggccataaaaaagggggtttcgttacctannnntgnnnnnnnnnnnnnnnnnnnnnaaattgaaac

SEQ ID NO: 2058 - DNA, 271 bp, Zea mays
tactgatggacatcgatgcagaggggaagccatgcatgggccatctggaccaacagatcgtccaggtctctgacccaacacgggcaatctgaagctgtgttggaccttttccagtgtagtagattagggatctaaaaatcttttattctttcaagcatcgagattattaattctttgttacgtagatatatagagtagtatttcattatgtatatatatcaaccagatgatccagataggggaatctggtcagtcattggagttattgaaa

SEQ ID NO: 2059 - DNA, 246 bp, Zea mays
atggatccggatgattagagatatgcggagcacctttttaactgctaccaggtccaggctactcaagcaagaaaagcaggaattatcttgcatcgcagcagcgcatcaccatctggagtagccccagcatgacaagctggtcatccatcgtgggggcttgcctggatcgtactctggtatacaaccaggctgaatacgaaactaacactttgttctcttcttccttcacgtcttactcattttttt

SEQ ID NO: 2060 - DNA, 133 bp, Zea mays
atactgatgcctttaaagctaacagtactactttaaatagtgtaccacagtaggtttgagaaaaaaattaatagcataccatctttcatagattggttggctcaatgcaatctgcgagtggcaagaagagttt

SEQ ID NO: 2061 - DNA, 394 bp, Zea mays
  misc_feature (387)..(389): n is a, c, g, or t
gctaggacacggattgaggacgacctaaagccttgccgtgatcttattgagcagctgtttggaaaggagaagggttgacagatcaactggaatggagatgaagccgagcgatcaagagtcagctgcagcagcagtagcacgaccttactccatcctagagttgtgcactaggtggaggttgatgaagactttgccgcaaagatcgatgatgaatttctcgtcgttgaatcaggtggcacagctatgaatctggaatgtggaccaatcgtcatgtgactaattctgtttaaatcactttttttcttctaggagagagctcttttatattcatgaaagatagcctacttactttggcacaatttgctatgaaagtggacagagcatcannnctgag

SEQ ID NO: 2062 - DNA, 417 bp, Zea mays
tcgtgtgatgtgatcatcggctaccccaggagctgttctctatgaatgcaaacctgcaaacggatatctgacagtgcagctttgacaatgcctcggttctggtggttcattccttttacctggtactttcctgcgacctgtttctgatgcgattttggttagcggaccttggcttatgggaattctgcaatggggaatgttaggttagcgaaattctccagcggcaggccggcagccaacgaggtacaccaacgtggatcagaaagatgtcgttgtttatccgggaaattctcagctgcgaagcaaatctgacattgtaatgtttatgctgcacgagaaagaacaaggcggtttggggactagattctcatctcgctttcaccatttctgaacgcatgtgtaacagaaccaagccca

SEQ ID NO: 2063 - DNA, 589 bp, Zea mays
cgagagaggttagacaaatttttttttgctcccataatttgactcgtgctatggttcttttgataacctcaattatattttctgagaagccacgtctcaaacacgttttgctcgtgtgtttttctatatgtattattaggctctatgatacagccataaaattagggaagctccaatccgagttcaaggtgcctgtggaccctgaagagtatgcacgtgataatctcaagtttggccttgttgaggtcgtctacgagtgggcaaaggtatactcgtcttcaggagaattcgtctccaagatatatgcaggctgcaggattataacgctgtcacttgttatattatatcaatgcaggggacgcctttcgcagacatatgcgagctgactgatgtatccgaagggatcattgtaagaacaatcgtccgtctggacgaaacatgtagggaattcaggaatgcagcttccatcatggggaactctgcgctgttcaagaagatggaggtcgcgtctaacgctattaagcgtgacattgtgtttgcagcaagtttgtatgtcacaggaatctgatgcatgtaacctcgtagtctc

SEQ ID NO: 2064 - DNA, 698 bp, Zea mays
  misc_feature (532)..(556): n is a, c, g, or t
  misc_feature (559)..(564): n is a, c, g, or t
  misc_feature (684)..(684): n is a, c, g, or t
caattccagattctcatgtgagatgataaaaacgtcataattatttgctaagtttaatgacctacgtcagtttctgcgtactaaaaactattcgctagttgagtcgttccggcatattcaaaattattagctacagttgttcctgcatgcgccagattctcatgtgagatgataaaaacgtcataattatttgctaagtttaatgacctacgtcagtttctgcgtactaaaaactattcgctagttgagtcgttccggcatatacaaaattattagctacagttgttcctgcatgcgtctaatgtccttcggtgaacttgtctgtcattatcatttaaaaacgtatctagatgcattatggaagatttttagtttcctttgttatatttgagaagttatatattgtatataccgagagatgcacctgtgtattatttgctgtagcttcgattgcgagacgcatggttgcagtcattttattgtagttagtttatatgatacgtcgttgtcaccgcatgaagattaactgctnnnnnnnnnnnnnnnnnnnnnnnnnttnnnnnnttgagctgtgcgaaagcttttaagtttacatttactcaccactccatgaacggcaacgaagtatgcatcagttagaaaagtgcacctataattttggttgcttataactttctatttgtnagagatttaactcg

SEQ ID NO: 2065 - DNA, 565 bp, Zea mays
gcacgcacaacctagttcatgtttcttgcccatactgatgttcggatgctgtttctggtgttacctctgcgtggaaatctgaatatgctctcatactatgttcaggctaaggtatttttctctttccctctactctggtcaatttccctagttcatctaaataaaattttcaggcagattttaccattcatttgagctggacactaacaaaaaaaattgttatccatgtgcagaggcttgtgatgaaatacgggtcacttgtgtctgttgtctcttttgttggactgtttatctaccttgtcgcgagcccgtcgaagagcagctcaaaggcaagcaagaagagacgctgatctacttataggtcgcagttgacggtgtagctggtggttttgcctggaggaactcttggtagtttgagctgtgcgaaagcttttaagtttacatttactcaccactccatgaacggcaacgaagtattcatcagttagaaaagtgcacctataattttggttgcttataactttctatttgtcagagatttaactcgaaggacctgtaactagga

SEQ ID NO: 2066 - DNA, 247 bp, Zea mays
tactcagcttgcaaaagaaagaaaagagaagaaaaggtttctttatgaccactcagacacccagcaatattcttacttcgatcacactggcttgatcaagtcactgctaccgacatggtgcttgggattttgtagctggaataatgctggaccgccctgcctgatgtgtaatcgtgcacgtaaatgctatcagtcgtgcagggactcttgtagtacaactttgtggatcagggtgaccatgtaaaga

SEQ ID NO: 2067 - DNA, 288 bp, Zea mays
gccattgatatttaagttttatgaagctaattgttgcacttaccagtttcatgcgtcacgtccgaagcgtgtagagtagctcggtttttctttcccatatgtcgtctaacaatcaaggagttaccagctgcgagaaaacatctaagtctaacatggcatgaagttacatagatgtagcactcttgaatagtatcacttcgctagctgaactgaggatgattgattgaccgagttataaaaaagtgtagcatctacaatttaatatttagtatgtggctcatatgtcca

SEQ ID NO: 2068 - DNA, 1091 bp, Zea mays
  misc_feature (1082)..(1085): n is a, c, g, or t
caagaagtatggatgtctttacccagaagctataacccgtttttattttgcactggaccataactataaccctcttttttcagattcccaatttgatgttcgacctatgcctaagtaggcattccctggcggtttctatacattggttcatacacacaaactaccactaacaacatcattatcaaataaagtagactcgacaatatcatcttattcatcaatcaatgtctgacagaatcaggaattttcacctactacattcttatcaaatggtggtcggtacagattatagagacttatgtcatttatatgatgcagtacagttgtttcgtagaaggttaaaatatgagcttatcaagttgtattcagataaaccacaactgcctctaggttcagatgaactggtagccttaagctgtgctgccttccgtagctgtcattgattatcaagtctgcacgacttgtctattagtgaataccagtcgttggttgagtcccatttagtctggacgtagtagttttttttcccacttgtcacactgcttgatgcgtgaccataaaggccgccttttccagtctgagtcacacaatgcttctcccttgttaatcctttcaccacatggattttcctttcttttttattctttaccatgtgtatagtcatgaggcacatcagtacatcacattgactacctttttttcgcatttacaccataattctgcggttgtaccattgtacatttgtactcacaattttctaacaaatatttattccttttctttttggaacttttgcttctctgaaacagcagcagagtgacactgcgcgccctcttgcatatcgaatttaagctatggcagccattgttttctgctgcaaggatgagttcattacttttttggccaaggcagcaagattctcaatacgggagtcatttgtatagacgttcctaatttcctactcatctttcccatgaaagagcccatacagatacagtcttccaccacgatttgaagccagttgcagtacatgtgggttgctttttactaagatgcatgaagtttagaataatgtacgtagnnnntaatgc

SEQ ID NO: 2069 - DNA, 356 bp, Zea mays
cttttgaaggggcaaatattaattattgaggcctaagtttgaactgaagatcctccaaacagacgtagtcatatgttggagtaatatataaccgtgtaacagtattcccccacgtttaagatgcaagtttttgacatatgtaggattttgaagatacttatcttcatatatgaaccagcttgtccatactgatgattgcctgtcgacctaacagcttagagttgatggtgtactgatgaggttgagagacactcggttacattgcctgtttggaaacggcgacggagccaagccagtggtacttcgtgagtgctgctggagggaagcaacatttgctactttgtctgcgaaaggat

SEQ ID NO: 2070 - DNA, 647 bp, Zea mays
tggaggcatagttggaggaggcgatgtcggccagtaccagctctacgacgacctccaggctcgactggaggcagacaccgtcgggatggcttcttcatccgtaattgggatgatagttttattatgatttacaggtggagggaagaagttttgttgaagtcccctcttagtgtggtggagattggcaaatgacctaaaaagatgctggagcaaacgagccttcacaggaaccatcacaagaaccatcacaaccagtatatgataggtgaataattgatccactacgtttctatggtcatctcgtgctaccattcaaacctaacaatgtttatttttcagtttccatgtagtcgtcttgtgctattttcaataagtggatgtccatcctcaactgtgtcgagtactgaagttcaggttacacaaggtgaagcagcacaagtgatgcaggcagtagtagttgaagggtggcaggcattagcagtgcaaggcagtaccaacgaagtttaggctacatctagccaagtgagcccaagtgaaggttcaggtgtttgtatgcttaaaaagaagttgacactaaggaaactgctgcaatgtaggacgaattaagtttcttgtacttctgtgaacttgtattggtcgccaccttg

SEQ ID NO: 2071 - DNA, 486 bp, Zea mays
atgatctgtcaggtccttcggagccaacaatgcctagcattttcgatgtttttcctcccaataatggagtcctcgcaacagatgatccagccaactacttggacccagccatgcagttccctttctcatgattggtcaccatttgtcatggaggtacgtatgtttatacctgctctttttgtgcttgaacttgtctggactgcttcggtgttgcaacttgcagcttgctgttgctacaactctatccaccctgaacgtcaaggacgtcattgatgtcatgcctgggctcatgaaatcgtctgttgctcttctgaaccaagccgaccttggctggtatttcttgtaagcacggtgcttggaacaatctgcatcgactgctgtatgctcccaactggttgagctaacggccaatctcggctcactctgccgaggagatcatagcctgtaaatctttgtttatgctattacttgtgtgtatcgcaacct

SEQ ID NO: 2072 - DNA, 420 bp, Zea mays
cttgctggattttctggaagaccagccatgccgcgtcgcgctctccataatcccagaaacccatccgctctccagatatgagagcgtgacccatttgctctacagaattgctgcgtgacccattcgctctacagaattaccgccccagcctcctctcgatccacgtgatccacgtctgcgctgtccagagaaggcgaccgtccgcgttgacgccctagatcgccgccccagcctccatggaaggggatctgcacgccccggcctctatggaaggggagggtccgacgccccggatctgcgtctcagcctccatggaaggcgtggatttgcagtttccatcggcgacaccctaaccccttcaattcgctaaccttccatgcacggtgcggatctgtagtttccatcgacggcatcatcggg

SEQ ID NO: 2073 - DNA, 604 bp, Zea mays
gaaagaaaatataaattcaactacttcaagttgatcgccaaacgtaggcaaactttgctaggaatggtcaaggtaacgcaaaaggtgcacaactaaagtctagcaaaggtaaacttggggatgctagataagaggcaacatatgctctactattgcattgatatggataaaaaatgaccagaagatgccctctacagctgcatattttcaccaatgtaaaaaaataatcagtatggcaaatgctacagagatacctagccaatatcctgtcccccgtaaacaattaataaagaaccacctatcccactagcgctcttcagaattgtacttattccaagcctcctgcacaatcgatcacgagtgaaaaagttagcctccctttatcgcaacaagtaacttgatatattcggaaagacagttatcaaattatcaacacaagacttgctttcgctagtcattagcaacaggcatacttccaaagattttacgaaaggcgtggccagagacgtactcgcaatttagaatgagcaagcattttaaaacgcagtattactagatctgttaccagtctctcacggatgccaggttcgtacagattactaat

SEQ ID NO: 2074 - DNA, 395 bp, Zea mays
  misc_feature (358)..(365): n is a, c, g, or t
  misc_feature (368)..(374): n is a, c, g, or t
  misc_feature (379)..(388): n is a, c, g, or t
attatgccagtgccattattaatcgtttccatgttgtttcatgcaccggtttttatccctggagcagtacctgctgggatttatggtaatggtgccgtagatttttttgtcatccttattatattcttgctcatacacaccgtgtgcacttaattgatacgtacaatgataatcctccgttgcatgcagcaaaagttcattatggtaccttgctgtccaacgttgactggctgcacgggggcgctgaatcgctgctgactctcaccaacctgtttatcgttttggggctgaggagagccctgaggaagctggaggaagagggcacagacgagagcgtttctgaagcttctcaagacannnnnnnnaannnnnnngtctnnnnnnnnnnatcatca

SEQ ID NO: 2075 - DNA, 463 bp, Zea mays
  misc_feature (352)..(358): n is a, c, g, or t
  misc_feature (363)..(369): n is a, c, g, or t
tgcgctgcattcatccagagtcggccaaagacttgcccggccgcggcaaccactgagacgacgtgccccgccccagctgccaatgatgcggtggcgcagggggtgaggaaggtcagggactacttcagctatgtgacgtacgctacactgcatgagtgagctgtgtcggcatgagtactagaacaattagccaaaatacaatcacatgcggtgcctcgatagtattttggctaattgttctagtactgtattcatgatgtgcacactgctctgtactactggtgtgcatgtgattgttgtacatttgctcttcacgtgtgttgctgtcacatctagatcatctgatcatttnnnnnnntacgnnnnnnngttgccgcggccgggcaagtctttggccgactctggatgaatgcagcgcactcctccgggcgcctctggttggcgagcccaggaatgcagttgc

SEQ ID NO: 2076 - DNA, 370 bp, Zea mays
attttgttgtgacatgagcttagaatttctcaccctgaccgtcgccaaaaactaggtccttgctgattctaatgcttcaagactcttccgtgctagatctcgcctgtatcaagttaaactcattagttgacatagttctgtgtgtattcgggtgcgcccattggctgtgaattgtagctaaagcaaagttactaagcctagagtttaggatgttaatagcctgatgctcaacatgtccatggtttcttaatttaaccagcacaaagtgtactgtttgtagcaatgcagtatgtagcatgttcccattatttgagctctggaacatggacacaggtaggctcgttgcttgttgccggtgtattgctaattt

SEQ ID NO: 2077 - DNA, 402 bp, Zea mays
  misc_feature (371)..(373): n is a, c, g, or t
  misc_feature (389)..(391): n is a, c, g, or t
tatacacactaatcagagcacgatgggttgatgaactgaaagaacccacaaaaggccagctgccacatctcagtcacggcacgcaaatgagttgtcactttcagtaagaattgctcttctctctgcagatggaaatggtttggaacaacgaaacggatagagcacgcccgtcaaagacgatgaacacgcaagatgatgctgtccgttggcccgaatttggctagagcagcaatagttcttgaggctcttcgcacctgtagaggtaaaatcttactgaaaagcttggcactggccttaactgaagcatcggatcacataataaaaacaaaaactccagtgaatcatcgaagagatgaaaccgttcagagcgnnnttgtgaataacccatnnncatgcactttc

SEQ ID NO: 2078 - DNA, 364 bp, Zea mays
ataattgaaactaaactttagcacttcaattcatatagctaaagtttagtaggaagctaaagtttatcccgtgacattgaaacggggcctaagatatatttttccgcggtcagaggggagagcaactgatattcgaaagtgggattcagtctgggcatatgtgcaatgatattacagactttggacaagtcatcagtcatgggtgattgcctttgtgttgcttccattttcgaccatctcatcctacgatctttccaagttatctttaatgaggtgtgtcgtgtggtctatgtttcctgcctctggatcttttatgtaagagaaacggacttgtaaaacagttccaaattatcatataccaggc

SEQ ID NO: 2079 - DNA, 225 bp, Zea mays
ttgcactaaccgtttgccttttggacagccgtgttgaaacaaggatcggcccacatctgtacatgtcattaaccacacagctcagaaagaaaaaaaaacttctcgtccccaatttggttctctttttttttaggagagttagtaaacatacatattttttctttctttgtttgtttctccctttgcatttgggaaatctttttagaatgagattttggagtgtat

SEQ ID NO: 2080 - DNA, 579 bp, Zea mays
  misc_feature (404)..(425): n is a, c, g, or t
  misc_feature (430)..(448): n is a, c, g, or t
  misc_feature (455)..(475): n is a, c, g, or t
  misc_feature (482)..(501): n is a, c, g, or t
  misc_feature (508)..(528): n is a, c, g, or t
  misc_feature (533)..(559): n is a, c, g, or t
  misc_feature (568)..(573): n is a, c, g, or t
agagctgaacggacgataaggaagggcgactgcgaggtgcagatcatgggggagcctacgggggagttctacgacgtcatactgtattttgggatcatcgacatactccaggactacgacatcagcaagaagctggagcacgcgtacaagtcctttcagtacgacccgacgtccatctcggcggtcgatccgaagcagtactcgagacgcttcagggatttcgtgttcagagcgttccaggaagacaagttcgatttgtgactgaagaaggcacaaggaagccagcctaccgggtgccggccgctgacatgtacggataaccagtgttgaaatgcagagtcagacatgcatggcactgctggcatcgcattgcagcagagcttttggtgaccctacctgcttgnnnnnnnnnnnnnnnnnnnnnncactnnnnnnnnnnnnnnnnnnntgctccnnnnnnnnnnnnnnnnnnnnncataacnnnnnnnnnnnnnnnnnnnnagaccannnnnnnnnnnnnnnnnnnnnctacnnnnnnnnnnnnnnnnnnnnnnnnnnntttttcacnnnnnnaaccat

SEQ ID NO: 2081 - DNA, 353 bp, Zea mays
ctggtgtactgaggtccttctggaaagctttttacaactcgattttttgtgagttgataaaaggaagagtgcgggcagcaaggcctttctttattgaccagaccaaagaagcagctacagaggttatatagacgcatacttccgcatcccccgctgataatgtgcagttgcaaccggtgttctgttgtatatataaaaggtgttcttgatccattctttgtaggatttagacaccatagagtttataaacaatgtcaaaagctaacctaagagagacatcgggggggatgtggatttgttgttctattgctaccgtgccctggccctagatgtttgttgagatgggcagaggg

SEQ ID NO: 2082 - DNA, 353 bp, Zea mays
  misc_feature (283)..(287): n is a, c, g, or t
  misc_feature (328)..(328): n is a, c, g, or t
ctggtgtactgaggtccttctggaaagctttttacaactcgattttttgtgagttgataaaagaaagagtgcgggcagcaaggcctttctttattgaccagaccaaagaagcagctacagaggttatatagacgcatacttccgcatcccccgctgataatgtgcagttgcaaccggtgttctgttgtatatataaaaggtgttcttgatccattctttgtaggatttagacaccatagagtttataaacaatgtcaaaagctaacctaagagagacatcggnnnnnatgtggatttgttgttctattgctaccgtgccctggccctngatgtttgttgagatgggcagaggg

SEQ ID NO: 2083 - DNA, 350 bp, Zea mays
ctcgacgcacgaaactggtgctttaatagagtagagattaaaagatttcatgcaaagttttgatttactgattctgttcaataagcttttctatttttccaacagattgtgagtaggattaagaaagagtgccctaatgtaccccttgtgttgtatataaatggaaatggaggtttacttgagcgcatgaagaacacaggagttgatgttattgggcttgactggacagtggacatgactgatggaaggaggcgccttggtaatggcattagtgtacaagggaatgtggatccagcatttttgttctcaccattaccagtactgactgatgaaattcataggttagtaaa

SEQ ID NO: 2084 - DNA, 523 bp, Zea mays
tcctttgaaatgcaggaagtctagaggaatatacaggaatttcacaagaatcagtctattttcacagaaaaaatgcaggaaactgaaaaaaaatccccgcattccaaagggggcctcatctaggatttcttcataccgaattatcgattgacttcgaccacataccgtgcttttgttcatgtctttgaacacaggcacacccaaatttcgaggtagcaaattttgcccacatacactgtatataaagtagttacagtacaagaacaatgctaactgatcaggtgatgtctcgtcctccccccggttctattattgttactgtatagctgtaattagtccaagtgtacagctgaatctactaaggtttacaaggaaaatcgccaggctgtaaaccttcaattcttatggctaggttttcattctgaaagtcatgtcttccgcgtcagcataatcctgtgttcctgtataacctctcttcggacttagtagtgctcatttgagttctaattcggccgggcaacta

SEQ ID NO: 2085 - DNA, 362 bp, Zea mays
gacgcatcataatgaacttggacaattgtcaggcgcgcagcaagttgcttacctgaacccgtttcatctattgagatgtgggaattaaagtttgagccacaggcaccggctgacagacttatcatgaaagcgttgatcttcgaaatggacacctaacgcgcctaagcgcgcgttaatattgtttatcttaaattagcgtacctcaacgttatcgtggagataaaccagcatatcaaatggcagtatctatccagctccttcttttttaagctacctgaacgtttttagctaattttatcagacctagcagtaatcacagagctgtcaaacaaaactgtcaaacagagcagagagacgaagtt

SEQ ID NO: 2086 - DNA, 438 bp, Zea mays
tctcccgatggccccgatgcggagaacagtgacttgaggagcaggcatcagcgtaagatcttggagcgtgcaaggaagatgtccgagaagatcgggaggctggaggtggaaatgcagaaggtccagcaggctctgctcaaatacgaggaggagcagagtaccaggagtacctcaaaagccctgcagcggcggtccaaagtgcagctcgtggagtatctctacggccggcggcgggacagtcgcaaacagcagcggaactcgccttgtggttgcatgagagcgaaaaccatcgacgactaacgacgtgcctttcatgtcgcttccttttttttaaggcgtaatggaaggccaatcttgtcagcttcagaatgtatcaggtcttatgtttatttcatgttcaatgtagataaatgagtggctgtataagggctgtaaatt

SEQ ID NO: 2087 - DNA, 423 bp, Zea mays
ggaatgaacgaatccattgtacgaacctgtcgcgtatcttatgcctgaaataattgatggtttgtaagttagaataggaccactcatttttccgtataacaccttcaagctttgtttcaggtgagaagagctcttctgattatgcatcaaagagacgaggtggagtacaagagagagcgccatgtgatcgtccggaaggcttgatgtggagagtccagtcagactcattcatggcatacaacgaacgttcatggcgtcctctcctcagacgcgtccataccttcactgagactgcacatctgtccgtcctgaggggacgagacacgccttagttggtctctgacatgactgactgttgtaatcagcaaacggcttgagcatgtaggctctgtttttgaagtgaccaaaggttctgattgaacc

SEQ ID NO: 2088 - DNA, 952 bp, Zea mays
  misc_feature (492)..(717): n is a, c, g, or t
  misc_feature (721)..(949): n is a, c, g, or t
ggtgctgctgctgcaaggcaataataataatggcggccaagcagaggcgcagggctctcgtggagacgaacgacgacaggtagcttggaaagagcatgacggtgaatgtagcaaggagaagcagccgacgagcggggagatggtcacgagcaaggcgagagcgagagaaatggtagcagggaagaaaaggagcacgctgaagccaaggtcggtggcctctctccttagactgctcgcgtgcaagggcggctttgccaccccggttctggaaccgaggagccctttcccccagtcgagaatggagaaggtacagtttcttgtatagaatatagattcgcacggcttaattaccgcccgccctcttctttctctgcatctcgttcacgtacgcgtggttggtttggtcaccgctgctgcagctgctcaaggcgatactggagaagaagatacacccgcagaaccccagcacggctgcagcgaggcggcaccagnnnnnnnnnnnnnnnnnnnnnnnnnnnnnnnnnnnnnnnnnnnnnnnnnnnnnnnnnnnnnnnnnnnnnnnnnnnnnnnnnnnnnnnnnnnnnnnnnnnnnnnnnnnnnnnnnnnnnnnnnnnnnnnnnnnnnnnnnnnnnnnnnnnnnnnnnnnnnnnnnnnnnnnnnnnnnnnnnnnnnnnnnnnnnnnnnnnnnnnnnnnnnnnnnnnnnnnnnnnnnnnnnncccnnnnnnnnnnnnnnnnnnnnnnnnnnnnnnnnnnnnnnnnnnnnnnnnnnnnnnnnnnnnnnnnnnnnnnnnnnnnnnnnnnnnnnnnnnnnnnnnnnnnnnnnnnnnnnnnnnnnnnnnnnnnnnnnnnnnnnnnnnnnnnnnnnnnnnnnnnnnnnnnnnnnnnnnnnnnnnnnnnnnnnnnnnnnnnnnnnnnnnnnnnnnnnnnnnnnnnnnnnnnnnnnnnnnnaaa

SEQ ID NO: 2089 - DNA, 627 bp, Zea mays
agtgagtttttccagcctattgcgtccagccaatgcaatttcccagagtagtcccatcactttcattttttgaacttgcagatcgccgaagatgacacccaagatttcgactcaaagtaccgggcacttgtcgcaatcggttctcttgtatccttcctgaacatcccgttattgcagggcttcatgcgatgcacttctctttccttgcatcatttcttctaaattttccatgccttggcatgtgttgcccttaacctaatttactatagatgctcaagggccttgtgaagtcccttgccctcgaccttgatgttaagagcgttgcaagcagcgccaagtcttcaatggaccagaagattgcggaagtaggaggtgacatcgaatcgctaacaagatgactacaataggtttgcgtacacttggtcgttgcggacattgctgctccttcgcttgaggcactaccgtagtaccgtgcataacttaaagccggtctgtgttgcagaccaattcagacgccctccacgtctctaccaaaaaaatcgcaatgggttatgattattttttcacctttgtaaccatcatggaagtgtggattttgggtggtagcgcttagattttgtaaattga

SEQ ID NO: 2090 - DNA, 379 bp, Zea mays
ttcttcaggaggcaatgtggctgactcagaaataccatccgtaagtagttctgtccggtttgacatgaccgacccttactatggcgagggttaccggagggcctataatacacagaatgctctgcataggttggatggttaccccaacgaaaggttggattcaactgcaccgccgaagcgttgggcatatagccatccaaatccagctgtgaaccttgcatacaattctaatgtatttccacagcagatgggagactactaatttagctagtgggagggatattcagactatatgtatcgccgtggcaatgggcaatggtgatgcctgtatactaataataatactttgtaaacaaaccatggtgccaagtctaaagtt

SEQ ID NO: 2091 - DNA, 647 bp, Zea mays
gacggcggcgccaccgcgtttccaggcgttggtccgatcgggattctcgggctccagccacgggggagacgtgagacgtccgccggctcggccgagccagcatcagtctcaggacaaggagcggacgcctttcttcatcttgtgattgctcgactgttctgtccgttgtacagttattagtgggtcccggtgcggctcctaattcctctgctgcactgcagggcaaggctggccgtcggttctattcttgctgctgcagcgccaatgctgcattccagatgggcgtcgttcctgctgattcagagtaaagcaaagagccctggttccgaaagactctgtaccgcgcgccgcgaaactctgcaccgatgcgaaatttaactctgcgccgatgccatcaggtgaggtggatatggtgaaagtgtgagagaccgatatgcacgccctgggttagtaccacctcgcctaaacaagggggccgtgttgcacttataagggcgggcctccctcctctctcagcctaggttttgagagcgaggtgcccgtctgaataggctgcgcacgagcgcatgaacgtccgacgctggcgatggtgtcgtcggaagtggccgagctgcccgagaacgggaggctgaggacagcggccgtgc

SEQ ID NO: 2092 - DNA, 671 bp, Zea mays
tctgtgatatatactgctgtccctactattgtcgtcgccattctcgacaaggatctcagccggcggacattgctgaagtatccccaactctatggcccagggcagcgtgatgagaactacaacctgaggctattcatattcatcatgatagactccgtctggcagagccttgcatgtttcttcatcccctaccttgcatacaggaagagtataattgatggttccagccttggagacctatggacactatccgttgttattcttgtcaacattcacctggcaatggatgtcatcagatggaactggattacgcatgcggcaatatggggtagcattgctgcgacatggatttgtgtcatgatcatagattccataccaatcatgcctggtttttggtaagcacgcattccagtatttgttttctacacttaggccccgtttcaatctcacgggataaactttagcttcctgctaaactttagctatatgaattaaagtgctaaattttagcttcaattaccaccattagctctcctgtttagattacaaatggctaaaagtagctaaaaaaaagctgctaaagtttatctcgcgagattggaacagggccttacacgaaaagtatgttcacaattactgattcggtaactgtatgacagggcaatctacaa

SEQ ID NO: 2093 - DNA, 359 bp, Zea mays
tggggtggaggcgtggagcaagcaatgttcatagaaaccacggtcacgtactatacaatactactaccgtaccacaccacacggcagcatcattagcagtaggagattagtagtaatcattaattccttattgggttcttgtaatttcgtatataccacgccgccatttttccttggggccgggccaggccagccgataggtgcccgagggccactgcactgcactgctgcattaggtaggagcaggagtggtgggtagcgaatccaccttccagcagcaggcatcacatttgtgtatttttcgactgggtctcccggttgttttgggtcactctgtatcattgttacgacgattgtat

SEQ ID NO: 2094 - DNA, 487 bp, Zea mays
  misc_feature (359)..(359): n is a, c, g, or t
  misc_feature (377)..(383): n is a, c, g, or t
  misc_feature (439)..(442): n is a, c, g, or t
  misc_feature (465)..(467): n is a, c, g, or t
tgtactccaagatttaacacttctttttaaggaagcgcatctcatctatcatcacctgatgtctgggatgcttctgggatatcagtttacgtgtagcatggagttctcctttgactttgatgtatctatcagtggtactcaatttttgcgaaaaggtcctctaatgtaatggttaagacttccgagcagcacttataggtctcgggttcgatccctcttgagaacgaatttcgggcttagctaaaaaaaatctcctctatatgtcccatccgctctcggagatcgatatcaaacgcgtcaccctccagctgggccgttgtagagtgggcaattgatcagcccgttagtgatggagggcngagtttgatatcgatctnnnnnnncggatgggacatatagaggagattttttttagctaagcccgaaattcgttcgtctnnnnggatggatcgaacccgagactcnnnaagtgctgctcggaagtctt

SEQ ID NO: 2095 - DNA, 256 bp, Zea mays
gctctggctcgcgttaacactcgcgcgcctgctcgttgttactgcgtcacgctcgctcttcgtccatcgggcttcacgtgtgctcgcgtttgtcgtcgagccgttgaacccgttttaccttgtcgacactcgaccacgtgttcactcgttaccacgccatcttcagcatcatggttctataagactccgtgcactcgtcgacacccgcctgtcgatctccaccacgcagcgctgcatcggacttaccctgtatgat

SEQ ID NO: 2096 - DNA, 341 bp, Zea mays
agcaaatttatggactgtctactagctacttacaatagacagcatatgttgaatgctgagcggcaacatattctaacaaacatgtttgtaaagttcattaaaagtaacaaattaaactcacctcatgagtagaagctgtctatctgattctgaagaaagaaagtcatcattatcttgggcagaatagtggttggtcctgcttgtatcctggtattttgaagttgctgcattgctcttgcccttttcaatagctctcttgactgtaccgacctgaatatgctcatgcataaattgtgaggatccatgcaataaatttaggtacattgtcaactgcagaattc

SEQ ID NO: 2097 - DNA, 351 bp, Zea mays
ggtggccttgttcctcatttcgttaatctacattcctctagaaatcttatccagataatggatccacaggttatagaggaaggaggcgaagaagtacaacaagttgctatgcttgcagcatcctgtataaacatgagaggtgaagaaaggccaacgatgcgacatgttgaacttagactagaaggacttcaacaaggttccaataaaaagtacaagaaaggtaatatcgtaatgaaggatttcgagaatagtagcaacggggcaaactattcatcagggattagtgaagggcatagttatgaggaatctagtagaagatacagtttggagcaagagatgatgatgtcggca

SEQ ID NO: 2098 - DNA, 353 bp, Zea mays
acgtgagcatcgaggaggcgctcgccaagatcccgccggcagccgtgaaggcgatgcgcgaggaggtgatccggctcatcccgagattggtgtacgcggacgcgagatcggcgcgtgcggacttcaaggacgcttttgacattgcgctggacgtcgtccttgaccgggtggccaagcggcggcgaggggatgtggacggacgctgatggaccggtggccggccggataggaggagtggcctcggcgtctggcctctgccaccgtcacgtgaaccaccctccatcgtgacagtgcgcgctcgtacctaggagtagcatttgaatgggatcctgggaaacttcgacgcctgtctc

SEQ ID NO: 2099 - DNA, 283 bp, Zea mays
gatggctgcaagtaatacacgattagggtcagacagtaaccacttcctgacaaaaatgtagaaaaggcagggaagaaaggggcgacctgtcccgttgcaaaagtgtgcatagattactagtacaaagaaacgaaatagtagtgacttattaactgtgtttattatgtgaaggaatacgagtaggttcaaggggattttgcaaaatgtgtaaggattaagattcagaaaatggaaatgtgttgtttgccattgtttcagtttttgaatcttcggagatggatgg

SEQ ID NO: 2100 - DNA, 357 bp, Zea mays
cgcctccgcccctgcacccgcctctgcacagcattgtaacccagccccgcgccgcccacggctagcgtgcccatgcttctcgactcggtaccgctcgtcaacagcccaacggcagcgtcgaagcatgtccgcctgcttggggtcaacctcgacaacccgcaaccaggcacaagtgcggagtcaagccaagatgccaacacattgtcgctgaggacaccgggatggcaaagaccggggccgttgaggttcttcgaatcgcctcaacacggcgccgagtcatctgcagcctcgtcgcagttgtcatcgtcttcctccaagagagaagcgcactcgtccttggatctcgatctgtgagca

SEQ ID NO: 2101 - DNA, 355 bp, Zea mays
gagaacaccaagatgctaaatgacaagacaagtaatttattatgctgaacttgggaggagacttctactgactgaaggcatgggaatcatacggaaagcagcgaaatcgggtgattaagccgtcagtgcggtgggcagtgacaataagctgacaggggttgccttttagaggcgagggttatcctgcagaggttagcaatgcagtcggcatctgcagtattcattgtgctggctgtgaccatatatgtacataagcatggaggatgatccatgaccagcacacatagaaataattttgtgtaaagagggtaatctgtactgatcatagttttggtgttgataattaaagcaaagg

SEQ ID NO: 2102 - DNA, 696 bp, Zea mays
  misc_feature (397)..(399): n is a, c, g, or t
  misc_feature (473)..(476): n is a, c, g, or t
  misc_feature (478)..(481): n is a, c, g, or t
  misc_feature (484)..(488): n is a, c, g, or t
  misc_feature (519)..(523): n is a, c, g, or t
  misc_feature (535)..(536): n is a, c, g, or t
  misc_feature (564)..(564): n is a, c, g, or t
  misc_feature (601)..(603): n is a, c, g, or t
  misc_feature (605)..(609): n is a, c, g, or t
  misc_feature (619)..(620): n is a, c, g, or t
  misc_feature (625)..(630): n is a, c, g, or t
  misc_feature (634)..(636): n is a, c, g, or t
  misc_feature (638)..(639): n is a, c, g, or t
  misc_feature (643)..(646): n is a, c, g, or t
  misc_feature (648)..(649): n is a, c, g, or t
  misc_feature (656)..(658): n is a, c, g, or t
  misc_feature (663)..(668): n is a, c, g, or t
  misc_feature (672)..(672): n is a, c, g, or t
  misc_feature (675)..(676): n is a, c, g, or t
ccacgatctccttcttcatctcctgcagctgcttgaggagcaggtcctcctcctcccccttgctgccttctttgccgccgccgtccttgttgcgcttgtcgtccttggcctggtcgtactctcttctgaagagcttccaggcgtcatcaccttcgagcttgggcgggcggaccacgaggcccgtgcgcgccatggtcttggcgtcgtcttccttgcggcaggtcaccagcacggcgcccctgtgtttcgtcttgggcaggccgtaggcgaggcggtccccccactcgccctccaccggcggtagcagcgtgaggttgctgtaccagcatccctgtgcgtcgtcgtcgtcgtggcggtacgcccggatgtcgtcgaacacgatcatgtacgacgtctnnngacaggatgctggtacagcaacctcacgctgctgccgccggtggagggcgagtggggggaccgccctcgcctannnntnnnnagnnnnngcacaggggcgccctgctgggtgacctgccnnnnngaagacgacccnnagaccatggcgcgcacgggcctcgtggnccgcccgcccaagctcgaaggtgatgacgcctggaannncnnnnnaaaagagtannaccgnnnnnngacnnncnncgcnnnnannaccgccnnngccannnnnncggnagnngggacgaaggaggacctgct

SEQ ID NO: 2103 - DNA, 670 bp, Zea mays
attccccccaccctcccattttcttctcttttctagacatcttactatgctctttctaggaaactggtcgtgctgattcaacaacattctatagtcaaagtcttttgcacaaatgaatcttatcgtcttgtcctttttttcttgtaatttacatttccaacctgctctaagtttcctacataatgacttcaatcaaccctttttacagtgaagttcacgaatatgctatgagaaaattctttgccagatattttcttgtgaaaattcagttggatgcatttgctccttggttaaagagtcgacttcagacaagttcgatataaaagaggaggtttgcctctgccttaatgcacctaatttatttttccacatattcatgttgcatgttgcgcagttgtattgccatattgtacctaatctttaaatttccatgctacaaatttattaatcggatcatacctatttggttgtaaatcacttttgcatggtgataaggtttcaacttatactgcaatcatgatcaccatgacagctatttcctttgctaccaaaggttattattagtttgatgatgtattaccaaaaatagccacaccgctcaaaagacgaatttgaatatatttttggtaatatattaccaaattgtacttttagaattgtgtaactgtaa

SEQ ID NO: 2104 - DNA, 362 bp, Zea mays
gcttctgccctgctcctggtcctgaccgtgttggtctcacggcgacgcggcttcccttccaggcacctgggcttcatcctgtccacgatggatctcacatagcaagaaccacagctctgtgagcccatctttttccccctcctatcgtggatgctagatggaactgtatgccttgagcattcgtggcagtgctctcctaaatacatatttataggtagggcatgcacatttgcttagtacaattgagcattggaaaataagtaacttaactaaattatcgtccacttagattatgacaaaccttgttcatgtcaaaccgggacaggccatgatgattagagcaaagactcgtgaaagagaca

SEQ ID NO: 2105 - DNA, 149 bp, Zea mays
atggcactcaagttttatctttggatcacttgagaggggttgaaagcaacccttgtccaaagggacaccacaacgtggatgtaggcaagcattttaggcttggctaaaccatgggataaaatcaccggtcccacttgtgtatttacttt

SEQ ID NO: 2106 - DNA, 373 bp, Zea mays
gtttcccctaccgtcgatgacagggccatactcctgaggttcaagcccatactgcaacatggtctctccaatctcagtagcctctataacggatgaccaaatcaaggattcagaacaccaacgggtcagaatgggcagtcatatgcacacacaccaactgtcatgagaaacgctacataatgaactgacctccatgtaccagtgtctgggacggtgatgatctcctcctgctcccttttcatctccacatggcgcgggcgcagatcagaaattcagaatcatgcattaatgcacacctttttttaattgaaaaaaatgtggtgtttgtcatgttctcagatttgcaagtagagctcgtgcacatgtccatatc

SEQ ID NO: 2107 - DNA, 217 bp, Zea mays
  misc_feature (184)..(184): n is a, c, g, or t
gtttaggtcagattccaatcgattggtgacaaattggagctgatggggtttcgttaagtgcaacggatggaaatgtattccttgatcagatcgtgtcaacagctcagtgaccagtcatatgtacaataggtagcttgcagattgtgtcagtgaaatccatcctatattgctttgcagtggtggnttagagaccagaactagcttccttctactccta

SEQ ID NO: 2108 - DNA, 644 bp, Zea mays
  misc_feature (279)..(415): n is a, c, g, or t
  misc_feature (421)..(425): n is a, c, g, or t
  misc_feature (440)..(444): n is a, c, g, or t
  misc_feature (451)..(456): n is a, c, g, or t
  misc_feature (486)..(486): n is a, c, g, or t
  misc_feature (506)..(513): n is a, c, g, or t
  misc_feature (564)..(570): n is a, c, g, or t
  misc_feature (592)..(595): n is a, c, g, or t
  misc_feature (602)..(624): n is a, c, g, or t
gatcacttgtgtcttgcaggcccacacataaaccaacaaaggaggcgtcaaatgatgaaatctgaccttgaacttcttgagcacctcaaccacaaactaaatcaacagaaaaccacaaccaaagatggtaatgaatcacgatacaaatgtccctcacaaaaagttagggctcttaaataatgttagtttaaaaataaatagtaatagggtccgatcctaatccgattcgatccttaaaatttatagtgtaaaaatctagagcctattaccacccctaannnnnnnnnnnnnnnnnnnnnnnnnnnnnnnnnnnnnnnnnnnnnnnnnnnnnnnnnnnnnnnnnnnnnnnnnnnnnnnnnnnnnnnnnnnnnnnnnnnnnnnnnnnnnnnnnnnnnnnnnnnnnnnnnnnnnnnnntgactnnnnnaggtttgcgtgcacnnnnncgttccnnnnnntgctgctccttcgcttgaggcactaccgtngtaccgtgcataacttaaannnnnnnngtgttgcagaccaattcagacgccctccacgtctctaccaaaaaatcgcannnnnnnatgattattttttcacctttgnnnncatcatnnnnnnnnnnnnnnnnnnnnnnngcgcttagattttgtaaatt

SEQ ID NO: 2109 - DNA, 631 bp, Zea mays
gtttgcgaggtaattacaaagctgcaggctgccgcctggaggcagtgggaggccctggtgaagtttcttcaccgtgtttctaaccctgctcattttgtttgcagtgcaaatttctcctgaagttactctcagctcgaaattgcagtacttatgttcatcatattctaataagtgtagggcgcccgaagggtgcatgatattctagtttcagatcaatgctgagtgcagggagaggcaatgtcttacctcttggatgttcatctctatattagtccatccataggttagtcatttcatcgtcaccaaatcattataaaaataattgattgattatggtatctttgtggtctctctactgaatgcatgcattgatgtgctaaagttctgctgtaatctgcacaggtatgcagctttggactgtcgatgttaaatcttgtctcaccagcgactacttctgatggtgtggctacctgagcagcttgtaccgattctgccttagcttgccgatcaacgctgtccaccaggacagagctgaaaacttgaaatggcaagaccagaaccctgaagttgaagtgttggcaagaaactcagataggtggatgaacgttgtgagccacctagctaagagctt

SEQ ID NO: 2110 - DNA, 960 bp, Zea mays
aatttcatctggaaggaaaacgcgtattggaggtgcgatgcttaatttcaggttcatggttatgcatataccatgtgaacctctgtttgttaattaaattctttattcttctattctactgaagtcactgaacttgttacttttggtgcaacctttattcttttctgtagtaagggatgcaagcagctttgtctgcgatcctgcaaatatcccatttttatgcgggttcagagataacattgtatcccacggtgtatatatagttatatacttgtcaacaaatgaatctgcactgataatatgtgctctgtggtataatgttcaagtgactgttttttttcaacagaagtattcaaatgaaaccgttgtaaagtaggaaaccaatgtattataagcaagctacttatattagctactttattttgatttttagcttggatgtggacatggcctccctggcatttttgcgggtctcaaggtattgcccttgatcctttcctttgtgccactttcaaataattcctcatgtatattgatttttcaaaaacttgaactgtcagggtgctgacctgattcatttccaagatttcaatgccgaggtgcttaggtgcttgactataccaaatgtaaaagtcaatcttttcaaggattcaccagaaggaacatgtacatgtccgattgttggtttctttgctggtgattggagtgaaatggataagctactactttgcggggatgctgagcaagacaaaacagccagtggtgatacagaaggtaaaatgtgtaatggttatgatatcatcctgatggctgagactgtttacgcggtatcttgtcttccaaatctctacaggctcatcaagaaggttaacattcaaaatttccattttgctgaatattctttcttgaacattaaaaaaattgcttaatactggctttcttacacactgaaagtctttt

SEQ ID NO: 2111 - DNA, 379 bp, Zea mays
gagaagacccgatcgagaggtaattaacgtcgtccatggtgatgatgggccagctggggcgtctggtggacggcatcaagtccaggctgcgcgccggcgccggcaccggaggcaacaagaggggcggggcgaggaaggcggcggcgacgacgacgaccacggggtacgacaaggtggagaagacggagagcatgcgtgtggagatccgcagccgccaggcgcgcaagctcatcgccaagaacctcgacgccgccggctccgtcggacgcaccggccggaccaacaagcgcttcttcctcgccttctgatgcatcatcgatcgagcgtggttcgtcgtctatatatgtgtgttattatttatacgtaaggtgctagtgac

SEQ ID NO: 2112 - DNA, 1048 bp, Zea mays
gtctatgtcaattccctgatccacctcgtccgttcataccgtttcctgatacgtactacacctcatcccggagatgtgttcactttcaattttgaaggcctgtactgtactgtaccctagttactaaaccttgggtttccctcgtctctcgcttcatttaggatacgtacgacgcttaagtcattcagatcggctaacctatccggtggaatgagtactgtctgcgaatctacatcatgcctttgtgaattttccttcaactttagtagtattattaaattatacccgttttgagcccatatgcttaaaagaggggaaacagtaatattatagctttaacgaacacacgattggagtgtcaagcatggatcatatttcctctgttcctgtttatatagtaccatccgtgatgccgttatagtatttatggaagtcaaactttttttgctggactgcatacaggacaaggaagcgctgaaggtagccatggtctgcaagacacaaaggagcaggacataaaaaagggaaaggcggctcttgtttccactgaactgctgagggaggatctggttcagagtgctgttagttttctgaaacacccgaaagtagtagcctcttcagatggacagaggcgttctttccttgtaaataaaggactcaccatggatgaaatagatgaagcatttcgacgtctacaagtaagatttgtttgcttaatttctgattaagtccgcatcacttattattctgatttcttttacttttgcaattctttttttgtgggaaaattaaagagcccgtcatcgaattctgcgagctcaaatatgtgcacatctcaaggtatggcagagtccatttactaagttagctttttatatgatattttagttctatatgttcgtggatcatataatgatgtttcattgtttatgtgtgttttccgctgtaaatgatggtgattccatatgaaattacccattcagagtttcagacctaaatggcttcatcatgacaaatctaacttagtaacttcattgccttattatgc

SEQ ID NO: 2113 - DNA, 440 bp, Zea mays
cctctgagcaatgttacattcgttgttaagcttcctgtggatcctactctgctcaatgtttcacccaaggctgtgctaaaccgggcagagaaagagcttagatggcatatttcagacattcccctgaaaggtccagccggcaggctcagggcgcggatgcctgttgaccaagactccaaagatggtgagctagaggttgttgggatggtgaagtttgcttaccaaggtccattcacattgtctggcattaaactatgcccagccactgatggcattgcccaatttaatgaagttggccataccttctccagtgggagttacctgtgcatttgataggtacctgcttgtgctgtaggtgcttgttcacctgttttatgtttgtttctacagcagggtgtgaaaatcctattgtatgtagcaaagtgtgtttctttcactga

SEQ ID NO: 2114 - DNA, 440 bp, Zea mays
  misc_feature (388)..(390): n is a, c, g, or t
tatctttcgcctcttgtgttcccggtgcttggctgccattcgctgctttcgcttggcattgcgttctgggtccacggctgcaacaatcttctgtgcctgctttctaccgtcccgcttctgtttcaggcccatccgaacgctcttgtagacttcaacaaatttctcggaaccaatcaggtcacgtaacttgttctggaccccctgggccagttgcttcacttcatctgaaaccacaacaaaagaacggtactcagacagatggcaagccccaagcactgaacttgcctacacacctccgatatgctgaaaacaaataatgaacaataccaagacaggaatattaacataccactaacaactttcccagcaaatccttcagaaactttannnacgtcgaggaggtgcttgggctgttctagagatgttagcctctcaaacaa

SEQ ID NO: 2115 - DNA, 296 bp, Zea mays
gggtatgtgctgtgtgtagcaacagattaaagtagttataagttctagtagaaagattagtgtagctcatttatgcaaaaaaaaattaaggttgcagctcttggcaaatttaatttgcagggtacgagcaaggaaggatcttcaagaaatacgggtgggatggaagttgccttggtatcaactgtattgaaggttttggggactaagttagctcctcttgcactcaaagagttgagctctaaagcaggtgtggccaaagatcttcaggaactccaggacctagtgaggagatcaac

SEQ ID NO: 2116 - DNA, 927 bp, Zea mays
  misc_feature (862)..(869): n is a, c, g, or t
tttgtagtccccaaaatgcacataatgtcaggtatatatatatactttttttagaaatcctgatgtcttactaaaaaccaagtactgactacttttctgttgggatctatacctttccatatcatgcaaatagcctgctaatctaggttttcatgatggcattgtggctagagtcccatttcttgttttgggttaaaaaattagtaacctggtaacttctcgtcctgaagtttggattttggaatctaactagctagtaaatgtgcttctatatactccagaactacatgttttcgtgaccagagaaagtatttaacaacatgggatcaaatggagagtctatggccttaaaccagttctttgagaatgaaaccagttttggctgttaaggataaaggatctggcaagttcccagtggctttttaaacctgagctgctgagctgtcatttaacacatgaattaagttcaccgatatgctgttgtgtctgtcttgagaagttccacaagcaatcttggagaaagatcatgtagacatcactattttttcctcattattttgttttgtgcccaggtgcttgtttgaagagagagtaatattggctttggctatggaagcagcaggcgttggtaatttgtcaatttggctaggggtttgttaaaccttattcagattttgtgcttgtggaacgtcgtccctcgtccatatcttcatgtaggaatgtacatatggaagaaagcgacaacagaggctctgaaagagaggacaaagacatccaagaggtgaataaggaaattattaaggcttagtttggatactctgggattagagtgttttgaagggattggagagggtgtaaatcnnnnnnnngatcaaatactctctcaatacacctcaatccacttcaatcccactcattactagagta

SEQ ID NO: 2117 - DNA, 1211 bp, Zea mays
  misc_feature (404)..(405): n is a, c, g, or t
  misc_feature (446)..(449): n is a, c, g, or t
  misc_feature (455)..(456): n is a, c, g, or t
  misc_feature (458)..(462): n is a, c, g, or t
  misc_feature (467)..(468): n is a, c, g, or t
  misc_feature (472)..(472): n is a, c, g, or t
  misc_feature (486)..(486): n is a, c, g, or t
  misc_feature (490)..(490): n is a, c, g, or t
  misc_feature (492)..(498): n is a, c, g, or t
  misc_feature (501)..(508): n is a, c, g, or t
  misc_feature (513)..(518): n is a, c, g, or t
  misc_feature (521)..(528): n is a, c, g, or t
  misc_feature (534)..(553): n is a, c, g, or t
  misc_feature (556)..(599): n is a, c, g, or t
  misc_feature (602)..(611): n is a, c, g, or t
  misc_feature (614)..(614): n is a, c, g, or t
  misc_feature (616)..(618): n is a, c, g, or t
  misc_feature (620)..(644): n is a, c, g, or t
  misc_feature (650)..(658): n is a, c, g, or t
  misc_feature (660)..(664): n is a, c, g, or t
  misc_feature (667)..(682): n is a, c, g, or t
  misc_feature (684)..(733): n is a, c, g, or t
  misc_feature (735)..(735): n is a, c, g, or t
  misc_feature (737)..(870): n is a, c, g, or t
  misc_feature (872)..(876): n is a, c, g, or t
  misc_feature (878)..(901): n is a, c, g, or t
  misc_feature (904)..(904): n is a, c, g, or t
  misc_feature (906)..(915): n is a, c, g, or t
  misc_feature (917)..(972): n is a, c, g, or t
  misc_feature (976)..(1019): n is a, c, g, or t
  misc_feature (1022)..(1043): n is a, c, g, or t
  misc_feature (1045)..(1049): n is a, c, g, or t
  misc_feature (1051)..(1065): n is a, c, g, or t
  misc_feature (1068)..(1071): n is a, c, g, or t
  misc_feature (1073)..(1111): n is a, c, g, or t
  misc_feature (1114)..(1119): n is a, c, g, or t
  misc_feature (1122)..(1122): n is a, c, g, or t
  misc_feature (1124)..(1164): n is a, c, g, or t
  misc_feature (1170)..(1181): n is a, c, g, or t
  misc_feature (1183)..(1187): n is a, c, g, or t
  misc_feature (1190)..(1208): n is a, c, g, or t
acttactcttatcgggatgggactggacaccaatgaagaattcctaatggctatgcaacaacagcttgtccatgaaattcgtgaagtatggacaacttcagttgagcatctactttatatcaaggaagaccttatcatccctcatggatgtgttcattctcttgtaatctacgaagttctgttaaagttagttgaaccattttctgattctatgttctctctactatttgacaacaacacatcttttatgaattaattattaaacaaaacggggcgcaagactgattggtaatagttcattcccctggaatcgacgaatgtccggaaaagttaatccaaccattttctgaatcatagtggtctctcctgcggttgacaacaacaccttttttaagaattaattnntaaaaaaaatggggcggaaaaatgattggtaaaaatgatgnnnnaggagnngnnnnncatcnncgancatcatactagtgngcanannnnnnnggnnnnnnnnagaannnnnngcnnnnnnnnttaccnnnnnnnnnnnnnnnnnnnnggnnnnnnnnnnnnnnnnnnnnnnnnnnnnnnnnnnnnnnnnnnnntcnnnnnnnnnnacncnnntnnnnnnnnnnnnnnnnnnnnnnnnnaaatcnnnnnnnnntnnnnnaannnnnnnnnnnnnnnntnnnnnnnnnnnnnnnnnnnnnnnnnnnnnnnnnnnnnnnnnnnnnnnnnntntnnnnnnnnnnnnnnnnnnnnnnnnnnnnnnnnnnnnnnnnnnnnnnnnnnnnnnnnnnnnnnnnnnnnnnnnnnnnnnnnnnnnnnnnnnnnnnnnnnnnnnnnnnnnnnnnnnnnnnnnnnnnnnnnnnnnnntnnnnntnnnnnnnnnnnnnnnnnnnnnnnnaancnnnnnnnnnncnnnnnnnnnnnnnnnnnnnnnnnnnnnnnnnnnnnnnnnnnnnnnnnnnnnnnnnntacnnnnnnnnnnnnnnnnnnnnnnnnnnnnnnnnnnnnnnnnnnnntcnnnnnnnnnnnnnnnnnnnnnncnnnnntnnnnnnnnnnnnnnntcnnnncnnnnnnnnnnnnnnnnnnnnnnnnnnnnnnnnnnnnnnntcnnnnnnccntnnnnnnnnnnnnnnnnnnnnnnnnnnnnnnnnnnnnnnnnnaccctnnnnnnnnnnnnannnnnccnnnnnnnnnnnnnnnnnnntat

SEQ ID NO: 2118 - DNA, 244 bp, Zea mays
gatccccatgagttggaccaacaattcatctggccataaaaattgagagcttccagtacagaccaaaatcctaaaaaaaactatctctttcatttccaatttgcatccagtccttaaggcatagcagttcctctgcgctttcggtcctatttggttccacttttctagaatcctagagatagactcaatactaggaaccttctgatgaggaaaaacaaggcactggatgattacagttgtgttc

SEQ ID NO: 2119 - DNA, 364 bp, Zea mays
cgcctgtagcctagcggggatgaggctgcacctttggtgcaagattttcggttactgtctctggatactactgagccagcaaccgaggagtcgctggagaattatctgggggcttcgcagtttcccaatgacgttgtcgtgccccccgtggagaaggtgaatagtccccgatacactgtttatgattgatgccggacaagccccggtgggccgcagacctcagccacgtcattttcgcctcaacccatggtggttgggtcgctggaaatgactgggccaagatcgctgcaccctgcggactgtccccctcctatgcctctactcatgctgcaagaaaatggaccacagtacaatgcccaaacta

SEQ ID NO: 2120 - DNA, 358 bp, Zea mays
cctttgttttccgataatcttcagagctgtctaagcaattccagagtacagaaggcagaagggtatactctgatcctagaaaagatggcatattctatcggaccagagtcaccagaccttggatgaaagggcttcagtttaagtcctacaagagatggtacgatataggcagaaaaaaattggcattcctaccctatcttggttctaagctgtaaaccttggcctaatttggttaaatctgtctgagcctttgtagaacgatggcaaccaccaaaagtccaactacgtagaggtggatggtgctctggtccgctccattgttcatctgacaggcaatttgccgttttttcttctcatg

SEQ ID NO: 2121 - DNA, 359 bp, Zea mays
cgcctcatcgtgcagcagttcatgtccggctctacggactacatcacgcccatgaacctcagcaccgtcctcgccgtcgacctccagaagcagcagctgcgtacgtgacgtgatgtcgtcgtcggcttcatcagctgcctgatcagcttcgtgcgtcgccattgccacatcgtcagatcagtttcgtatgcgtgtgtagtgagagtacctagctagtgcatcatgtgccatcagtttccggatgtggttttctgcagggtttcgttcgttcgttcgtgtgtgtgtgctgcagtgcaggtgtttaattgtgtgatagtgacgaccatatcctgtcaattgtcatatagcaggacagcttc

SEQ ID NO: 2122 - DNA, 279 bp, Zea mays
ctggagcttgtcgcaaacttcatttcaactcatcttctgtccccgacctaaacgccgaggttcctgtacccgtggactacactgagaaccattattattctaagaagggacttgtgaggtcaaatgacagtggtgactctgagacctgcgccgttggccagactgcagagccgcctgcagttgaatctcggcaagtaagcaaggtgaatagcgtaccagttaataaatgcgagcagaatggtgcttctgctatttgccatgaaaagatgctctccggat

SEQ ID NO: 2123 - DNA, 458 bp, Zea mays
gtaatataacatatactaagtgttgagaaaatctgttacggctgttataggaggatgaagctacaaagtgtagcttgtgtgggtcaatcttccacaagcaatgctttagaaagatcagtgtttgtccttgtggtaaggcttctaatggcaggaagatcgcggcgcttgagcaagctgtacatgatggcacgggcatgccatcaacggaatctattcagcctccacctctctcttcatcttatgggtttttctctgatattctctccaaagcaaggccggacaagcttctgaggccgagaaatagcagtcctgtgatccttatgggttctttgccagatatgtctatatgagctgagttgtatttttgtgttccattgattgtgtatttttgtacacggtaggaaagacgctcctagttttgaatgaatgtaatcctgcagtgttattacttgaggtgt

SEQ ID NO: 2124 - DNA, 360 bp, Zea mays
cacatcaaggcgtcaggtggattcaggaacgccttcaggaagggcaatggtgtgtcgaactccatcggcatcctcctgctcttcatctaccctgtctgggccggtgtgctgcaagtcctgtaggcacccaccattgcctcagtgtttcccctgtgcggtccaggcgtccagctccgttcccgttcgtgcccgtgcaaatgctccctctatggtgatccgtgatcctgtgtcacgagtaggtgatgtttttatgtgtgcttgagttgatcggttgggcatgttgccatgttggtggacagttttgtttatctcatttgttgtagttcgatgtcagcatttggttcgttcgagtacataaac

SEQ ID NO: 2125 - DNA, 337 bp, Zea mays
tacaatgatctgtttgtttcaaccttttcagcttgtggccaacagaagctgctacagacagccaaacgctcagcttttcagctcacttctataagtaccagtttagtcaaaatcgtccaaaatcaacgtaaatatgatatcagtcgactcgttgcgataatagaaaaccgtcattttatacattctaaaccctaccacacgtaatctgcacaatattagaattctctctggtcttcataactaaattctcaccgcaactagattctcaaaaggatcatgagaaaaaagctaaacaaaaaaggctactgtgcagctactctgtgaatggttaattgag

SEQ ID NO: 2126 - DNA, 450 bp, Zea mays
  misc_feature (196)..(212): n is a, c, g, or t
  misc_feature (214)..(214): n is a, c, g, or t
  misc_feature (217)..(221): n is a, c, g, or t
ttcaagtcgatggggattcttgctaattccttctcatcttcaattatcatgttgtgcaagataacacaacattgcattatattaaccacatcttgtcttttccacaagcgtgcaggacgactaacaatattaaatcttgattgcaatacaccaaatgcacattcgacgtccttccttacactttcttgacgagttnnnnnnnnnnnnnnnnngnagnnnnngtaaggaaggacgtcgaatgtgcatttggtgtattgcaatcaagatttaatattgttagtcgtcctgcacgcttgtggaaaagacaagatgtggttaatataatgcaatgttgtgttatcttgcacaacatgataattgaagatgagaatgaattagcaagaatccccatcgacttgaacatgaatgcaggcgcatctatcgccctaccacctgaagtgagcactcaat

SEQ ID NO: 2127 - DNA, 336 bp, Zea mays
cctctgcatcgatgggctgcttggccaatgcagaatcaaacagtttggccttcggagccttttgacatcacaacagttttggtctgtgcagacagtgactgaaggagctccaccgaaggtataacccacaactgtgaagtgactgaatgaaaacataagtggcgacccttcgcgtattggacgtttaaggttgagtgtgcaattttctagagttcattttgcgtgtacaagtaaaaacttttttagagtcgatgagaattataaactggcatatagcttaacttatggatatttattccttattcgttagcgttgaggtgtgtggcggcgtcatgt

SEQ ID NO: 2128 - DNA, 336 bp, Zea mays
  misc_feature (237)..(237): n is a, c, g, or t
cctctgcatcgatgggctgcttggccaatgcagaatcaaacagtttggccttcggagccttttgacatcacaacagttttggtctgtgcagacagtgactgaaggagctccaccgaaggtataacccacaactgtgaagtgactgaatgaaaacataagtggcgacccttcgcgtattggacgtttaaggttgagtgtgcaattttctagagttcattttgcgtgtacaagtaaaancttttttagagtcgatgagaattataaactggcatatagcttaacttatggatatttattccttattcgttagcgttgaggtgtgtggcggcgtcatgt

SEQ ID NO: 2129 - DNA, 289 bp, Zea mays
actggtgtcgctggagatgccatgttagtattatctgtttctcacttttttagttagtaggtaagggtgaaggttgtatctatattcattacatgtgcacattccctaccgtctgaatgggagcgcccgtcccagtcctgtacagaaatgtcaactcacagcagattgtgcacattctttttgtactcccatgggcgggtgctggcctggaacatgcagtgtgtgcaccactgtcactgaattggacagttaatggtttggatacatcgttgcatgtactgttccaact

SEQ ID NO: 2130 - DNA, 1129 bp, Zea mays
  misc_feature (248)..(248): n is a, c, g, or t
  misc_feature (266)..(268): n is a, c, g, or t
  misc_feature (297)..(297): n is a, c, g, or t
  misc_feature (352)..(358): n is a, c, g, or t
  misc_feature (362)..(363): n is a, c, g, or t
  misc_feature (366)..(370): n is a, c, g, or t
  misc_feature (373)..(373): n is a, c, g, or t
  misc_feature (375)..(382): n is a, c, g, or t
  misc_feature (384)..(390): n is a, c, g, or t
  misc_feature (392)..(393): n is a, c, g, or t
  misc_feature (418)..(427): n is a, c, g, or t
  misc_feature (434)..(439): n is a, c, g, or t
  misc_feature (448)..(449): n is a, c, g, or t
  misc_feature (451)..(453): n is a, c, g, or t
  misc_feature (455)..(459): n is a, c, g, or t
  misc_feature (465)..(466): n is a, c, g, or t
  misc_feature (471)..(475): n is a, c, g, or t
  misc_feature (480)..(482): n is a, c, g, or t
  misc_feature (484)..(484): n is a, c, g, or t
  misc_feature (487)..(487): n is a, c, g, or t
  misc_feature (494)..(523): n is a, c, g, or t
  misc_feature (529)..(537): n is a, c, g, or t
  misc_feature (539)..(543): n is a, c, g, or t
  misc_feature (545)..(546): n is a, c, g, or t
  misc_feature (549)..(551): n is a, c, g, or t
  misc_feature (554)..(554): n is a, c, g, or t
  misc_feature (556)..(559): n is a, c, g, or t
  misc_feature (563)..(565): n is a, c, g, or t
  misc_feature (567)..(597): n is a, c, g, or t
  misc_feature (599)..(601): n is a, c, g, or t
  misc_feature (603)..(607): n is a, c, g, or t
  misc_feature (615)..(625): n is a, c, g, or t
  misc_feature (627)..(630): n is a, c, g, or t
  misc_feature (633)..(637): n is a, c, g, or t
  misc_feature (642)..(645): n is a, c, g, or t
  misc_feature (647)..(654): n is a, c, g, or t
  misc_feature (656)..(673): n is a, c, g, or t
  misc_feature (678)..(678): n is a, c, g, or t
  misc_feature (680)..(688): n is a, c, g, or t
  misc_feature (692)..(703): n is a, c, g, or t
  misc_feature (705)..(716): n is a, c, g, or t
  misc_feature (720)..(724): n is a, c, g, or t
  misc_feature (726)..(736): n is a, c, g, or t
  misc_feature (738)..(741): n is a, c, g, or t
  misc_feature (743)..(766): n is a, c, g, or t
  misc_feature (769)..(780): n is a, c, g, or t
  misc_feature (783)..(787): n is a, c, g, or t
  misc_feature (790)..(806): n is a, c, g, or t
  misc_feature (809)..(822): n is a, c, g, or t
  misc_feature (826)..(830): n is a, c, g, or t
  misc_feature (832)..(832): n is a, c, g, or t
  misc_feature (834)..(854): n is a, c, g, or t
  misc_feature (858)..(871): n is a, c, g, or t
  misc_feature (878)..(885): n is a, c, g, or t
  misc_feature (887)..(903): n is a, c, g, or t
  misc_feature (906)..(906): n is a, c, g, or t
  misc_feature (909)..(921): n is a, c, g, or t
  misc_feature (924)..(930): n is a, c, g, or t
  misc_feature (934)..(936): n is a, c, g, or t
  misc_feature (938)..(942): n is a, c, g, or t
  misc_feature (950)..(957): n is a, c, g, or t
  misc_feature (960)..(966): n is a, c, g, or t
  misc_feature (971)..(994): n is a, c, g, or t
  misc_feature (996)..(996): n is a, c, g, or t
  misc_feature (998)..(1007): n is a, c, g, or t
  misc_feature (1009)..(1016): n is a, c, g, or t
  misc_feature (1019)..(1019): n is a, c, g, or t
  misc_feature (1021)..(1022): n is a, c, g, or t
  misc_feature (1024)..(1026): n is a, c, g, or t
  misc_feature (1031)..(1052): n is a, c, g, or t
  misc_feature (1057)..(1064): n is a, c, g, or t
  misc_feature (1066)..(1076): n is a, c, g, or t
  misc_feature (1079)..(1084): n is a, c, g, or t
  misc_feature (1088)..(1100): n is a, c, g, or t
  misc_feature (1102)..(1108): n is a, c, g, or t
  misc_feature (1118)..(1119): n is a, c, g, or t
  misc_feature (1121)..(1123): n is a, c, g, or t
  misc_feature (1125)..(1126): n is a, c, g, or t
gtctctggctggtgcgtgcgtgcgtgcgtgccgtgtgtattgtgttctgttcgagagtggctggagggtggtggacggcctgaaactgttgcatgatgaggagagatgcttggtagtcctgtgaggtaaagaggcagttagaaggctggtgcctgtgccttgtaccacttgtaccccatcccttgccacgtggattgctggcggcggcggcgtcgtcgtcgttgtactgaagtaaggaaacccatctnaactaacttctaaccttnnncaggccgtccttgcctgtgcttcttgagngtaggagtgcttttaagttttgtgactccgatcttcaatcagtttcttccatggnnnnnnnctannagnnnnntangnnnnnnnntnnnnnnnanncttgatatcgtcggtagtcccggannnnnnnnnncttttgnnnnnnggggctagnnannngnnnnngtattnnaaagnnnnnttgannntnccntcaaagnnnnnnnnnnnnnnnnnnnnnnnnnnnnnnatcatnnnnnnnnntnnnnntnntannnttnannnntacnnncnnnnnnnnnnnnnnnnnnnnnnnnnnnnnnncnnnannnnnacttgtannnnnnnnnnntnnnnatnnnnngaaannnncnnnnnnnntnnnnnnnnnnnnnnnnnnttttntnnnnnnnnncctnnnnnnnnnnnncnnnnnnnnnnnntctnnnnntnnnnnnnnnnnannnntnnnnnnnnnnnnnnnnnnnnnnnnacnnnnnnnnnnnnccnnnnngannnnnnnnnnnnnnnnnctnnnnnnnnnnnnnnccgnnnnncncnnnnnnnnnnnnnnnnnnnnncctnnnnnnnnnnnnnnttacacnnnnnnnncnnnnnnnnnnnnnnnnnccntcnnnnnnnnnnnnnctnnnnnnntccnnncnnnnntcccaccnnnnnnnncannnnnnnctctnnnnnnnnnnnnnnnnnnnnnnnncngnnnnnnnnnnannnnnnnntanannannnttccnnnnnnnnnnnnnnnnnnnnnngtcannnnnnnnannnnnnnnnnnaannnnnnccannnnnnnnnnnnncnnnnnnncttccttccnncnnncnntcc

SEQ ID NO: 2131 - DNA, 396 bp, Zea mays
gcagcgccaagcgccgctcgtcttcttactgaattacccccctgcgtgggacgtacgactgtgtgtgcctgtacatacgggagggttgactgtggtggctggtggatcctaggatgggtgggggtacaaaggggattttctcctgcagctcaaccgttttagtgcctgctgtctggtgggaattttttcttccttctttgttgttgctcctgccgtgattttgggtcttcgtccagatctagctctccgcagtcttgctctagctctctagtggtggttgtattgaagtagtactagctagttgtgactgctcagcagtgagcactacctgccttctgtttccctcttagggcttttgagttcttaacaatactccaatgccgcaaggctagtgat

SEQ ID NO: 2132 - DNA, 368 bp, Zea mays
tagttcaggatctagaaagcgatggatttctaccatcgcgatgattcaaccgattctgtgtttatgttgattttggatggtttctaccaaaacgattcttataaaagcgggttgaaaagctggatgtttgacagtccgcagcagcttttggtggccagaagctaaaaaaaagcccaaacaaacagggtcattccggcatccttttattgatagttcctgttagattgagtacctactagctagtgttgagctattgctacccatcagaggccaatgggttgatagttttaatttgtgccgagaagagaagctgaaagtgtataacatgaccgagacttgactcttgctgttttttttcttccctgaag

SEQ ID NO: 2133 - DNA, 349 bp, Zea mays
tccgactggagctagcgggcaacatcatgatgaccaagcacgatatcgacgtctccatcgttgaacctagtgtacaaaacagattggagcagttctagataggcggaacattcgttttgtccagattcagagaagcaacagcctcttgttaatgcagtggaaattgttcagagacgaaggcgacccttgttttctctattagttcggtcagaatgggatgttctttcagatcaaggaaataaatcgggagtcatctcttgtaacaaagagaatcagagcatgatgtacataaggaaaaatcataggcacggtttatgttggatgatagggtagggtttgcttctgtgta

SEQ ID NO: 2134 - DNA, 277 bp, Zea mays
ctcacctccatcacctggctggctggctggcgcgtttgcatgctgatgcatgcaacggcggggggcggccgttttgttgttctagggtctagttcgatcgacgtgtcctgtttcgactgggtacatcttctttcgttgatggtgtctagtgtctttcggttagggctctgctgctagacttcccactaattgcactgccgcgccgtgccaaagcactcgagtcgcgagtctggtgctgttgatccgcggtcctcccgtgaactaatccaagccatgc

SEQ ID NO: 2135 - DNA, 310 bp, Zea mays
cgttcaaccagaaggtacgtacgtgtacttacttactcatctctctgctcgctggtgcccacttcatttccgccctcgacgattaaaggaccgcaggctgttgctttgttcacacggcatgccattctattcttctagtcatgttcggttcgtaccccatcaatcacttggtaaaacaaaacatattccgacgaactgtgcagacaaggaagctgatggtgcagcaaagcggcagctcaagccattccgtgccgatctcgcctcgaggtcccggacccggagtactggtggaccacagcaaagcggtgcc

SEQ ID NO: 2136 - DNA, 684 bp, Zea mays
ggatctctatcactaaatcactaatgcactatgttgtttagcctctcttgtgtttgttgctttgatgtaactctgttaatgttgttgtgaactacttggactacagaacaatgttactgaaatcagagcagatgcattgaagttgttagtcatgttgaaaacacctgagccgcgtgctgcagctacaattggagcatggttgaacatattccaggtttactagctgaactttttaatttcactacttgtgagttgtgggaatatgcatgccctgattcactctgaagtttgttttcagttcttggttgtgatggcaatatgcaccaactgcttgcttctcgtttgtctgtatgacgaggaggggaaatggaggattgagccaggactagcagcaatcctcataatggagcatgctctcctcttaatcaagtttggtttctcacactttgtgcctgaggtgattttctgtatctatctgcttctgttcagttgctgcgatttcttcataactgaagtgcccttgtgctgtttcttggttttatttctgccaattaggagcctgcgtgggtgaaagcaaatcgtgtgcgatatgtagctcaggcacaaaacgtctgctccaaacaacttttgaggagcatttcaaaatttgacggaaaactggattgagaaacatcatgcacagtt

SEQ ID NO: 2137 - DNA, 403 bp, Zea mays
ccggcacccatgatgataaatcgcggaaaagatggtggggaaagaagagctccaagtgaaacgtgtgagaggtgccccagatcatttttctactgccccgggccaaggaaagcggccaagaatgctagggcagacacgaagaacccgcctcggttctcgcaccgcagaagcccggcaagataatgatgagctccatcgcgggtgggtggcggcgctgttactcgtccagagtgtcaaacagatcaaattagccaataggtcaagcaagagttctgtatatgtatatcaatcaattaaattagttctgagttgtcagttgacagtgtatgtatgctatcgtgtatgtatgtagagtgataaatctgagatgtggaagggtaactagatacagattatccaccat

SEQ ID NO: 2138 - DNA, 1292 bp, Zea mays
tgtaaacatgtcgaggctctggtgtggtatgtttgaatctatcctttggcaacatattttccacggcatgtttcttacaggcaacaaactccactaaattgtagacatcatttcagcaagttgattttctttgcaaatacctgttgttttggttatttaaagcaatagtttcaccaaacgcactgtgacagaaaacattaattgtatccttgttctgtcttgttcttggagcttcgaagacaacttacattggataagagggactactctgaccttcaaaatcttgtcatgaatgcagatatacatgcagaagggtatatttactgtcgaatgtacttgctccctgtgcaatgggagcgggaaaattgtcaaggtgcagttttctgtttcaaaatagcatattcttgttaattttgttatttttctgacgttacattccacagtaagttgaacataagatccaattaatcaatcatcattggctatggtcgttaaattgagtgcacttagttctttagggggtggggtctgccagcattttatagaatatctatacggtttatcaccggtgatgatttttcgttcttggcttaatttttttgcttttcaaaatattgatttgtagagtttttgcaagacttgcaaaggagaacaggtagtgaaggggaaaacgtcagtcaagctagacatagccgcaggtaaggaggaattttctttactgatatatgtatatgcttgacatgaactccctccatcccaaattataggttcttttggattttctaggtacatagcttgcacctagatatacactgttccaaactgacctataatttggaacggaagtaatacatcttattacacaatcctgaattttctgttcaaatgcaaaacataagtgtatttctttctttttactggtgatttgaatgctgtgaattctcctgcatagttcgagaatttattttgaatgctgtgaagtgtaaacttgtggttttacaagcatttccaactggtgtacttgttataataactcaggcaccactttccatgcactgctaagttaagaacgttaatattcaagccaaatcatttagctgtcctagagccatattataaaatatggttctactgaatcattttgcatttctgcctgttctgttagcatttgaccctttcctactatcatgcaatcttaagtgcttattgcggacaggactttgtgtacattataattgaagcgttttttcttcaggaagtgacgataatgacatcatgaaggttttggtaag

SEQ ID NO: 2139 - DNA, 434 bp, Zea mays
accaacggcatcgctgccactgcagcaggagtggcagcaactactcacagaaaggtcggcgttgttccgtttggcatgtcaaacatgtattagtgactggatcatggccgaatcatggtgaatcctctgtgcggttgatgggtctatgctgccttcaggtggctaaacaccgacaacttgaagcggccaatcaaacctttggctggatgctgcaagtttagagtgcagtagacagtgttttttctgtgtggtcaggaaaagaggaacaccgccggcggcatgaagcctgccaaaaagtttgtatctgcctgtgcctgagaagtgtgcccttggttgcacactgagaaggggtatagtcggcagtccggcggcatgtaatctgggcaatttaggcgccaatttctttttctagagcgaggaggcagaagggaaag

SEQ ID NO: 2140 - DNA, 444 bp, Zea mays
taatcgactgcccagcgtttgcagtcactctctggagaaaggctcttcaggggaagtgcaagatatgggctgaaggacacaggtactatgttttacttctcaatatgatgccatgtcgccatgtactcgactctcgtgcttccaaaactcttgcatctgtggcatgtttgtgtagttatttcttctttaatcctttttccattgttgattgtgaacttgtaacgattcatcatattccgcacctgcatagattacatgctgttataggatctctccctgatagcaaattatattttggacgtctggctgcagttcgaaggtggttgcgggtttcctggagtcgccaagtacggaggtcaaggatcttgcaaaacctgagttgcagccgctggttgatgctggcatccttaaagtgccagaccctaaggttgttcaaaaatgact

SEQ ID NO: 2141 - DNA, 368 bp, Zea mays
  misc_feature (359)..(361): n is a, c, g, or t
ggagcatcgcgaattgctcgccggtgttgaacctccgtcgtggtgccatatctcgtcacggggcgagtccgctgctaatccaccgttagtgagttacccttggacatatttaacatcacgtccgcttcacgtaggagtagttgaatgagagttttaggccacaagattatggattgcgtgcgccggcgagctgcgccaccgctgcctggagtggggcggtgaagaaagtgggtggtcatcaaactgagaatagatggtcctgattaaatatggcataccatttcagttgggtgtgcctcagccgctaatctcaaatcaagcgggttcggtttgattaagggagttttaaatccatgcgnnntatattc

SEQ ID NO: 2142 - DNA, 750 bp, Zea mays
  misc_feature (736)..(744): n is a, c, g, or t
tagtctgcaatcgagaacaactatgtagtgcaactgaaaagcaatgtaaaaatggtcactgtaggtatgcccttgttcgaagtattacaagataaaatggagagatttgttagagagtgtaaaccagttgaatgatgctatgatacaagttcccatggaaactactaccaagatatgtcagcacctggttcttcaattccaaacgatgtatgtaaaaaaaatcagcagaccagtcatcatcgtgacacataaggctaagaatttgcaattccaatacttccttccatggcaagatcaaattcaaaacgatgcttctttggaaacaattctttgtcaattaatgttcaacattttagccttcacactttaggcagacaagcaagtccttcaatgtggaatttcagcatacaagcacaaacaatttcttagccatggcatctagtagtaagaggctaacagctttatccgcaaaagaaggcattactaacttgtgcaagtatgagcaacaatttttccatccttacctgaaaagcagcagcatatgcagcttgtagattcgacatgccttcaaatggcattctattggtcaataattcccacaaaacaatgccaaagctgtacacatccactttatttgtgtaatgctttttctcaccacgtcgaagtgtgactgtgctgtatagctgcaaatcacataaagaaagaatatgagctaccctttgcacagatcagtccnnnnnnnnncctttt

SEQ ID NO: 2143 - DNA, 312 bp, Zea mays
gtccagtgtcatgaagatcaccaagaagctcgaagggaagagtgcaagcgccgcgcttgctgctaaacggtcgggaaaaacgaagcacaaaaagaacaaataagtggggtacaggggtagtggcgaagcttcctactttgtaggagccgaccagatgatttttttggagaaatttgctaccattttttttggtgggtaggggtggatttcggtctgtacagttcgggaattcagaacgccgtagttcttgtcttttcggataagttttgtattagaagcttgacactttggtgtttgtattagactggatcg

SEQ ID NO: 2144 - DNA, 376 bp, Zea mays
tcgagtggacgacaccttcgcgctcgacaccctctactacgccgagtacatgaaccgagggcccggcgccgatacctccgccagggtgccgtggccgggataccacgtgctcaacgactccgccgacgccgccaacttcaccgcgctcgacttcatccagggagacatctggctcaacgccacctcattcccctacacgctgggatttacctagctatagctagctagtactacaacgttcgattttgcttcgggttcttcttctggaatactagtatactactgtgttctgccagctccatcgatcactcaggttttcgctttacgtaatcctgagagctgaacctgcatccatcttctactactgtatgattct

SEQ ID NO: 2145 - DNA, 375 bp, Zea mays
taactcttgtatcctctcgtgttctccaccttccaacagacaggcaaaccgcttaggcccctcctcatcttaggattagggcgggtgcgttccgccacccggccggtagaattctcccaccgacagccaggtctattccaacccttttcctctctcaaacggtcacttagaccatatgagccttctccttaatcaatcgggtcactaagaccccacaaggaccaccacacacttaggtgtctcttgctagctttacaagcacttagaaaaagaatgaggaaggaagaaaggcaatccaagtgacaagagcacaaatgaacacaaatgatactctctcaagtctctaagcactagagttgattttggaaacttgga

SEQ ID NO: 2146 - DNA, 527 bp, Zea mays
cctgcttcgcgcattgccagagtgagctacaggacacatggttcgcaccaaattctccatccatatataacaaggtacatgtaattttttagcacacgagctgtattttagccttaggtggtgctttggctaacattgtagagttccagaaaattgcagaggtggtaggtgattggtactttgaaagaggagctgacgtggagattgactgcgcctatccctgtgattcacagtcttgtcgcaaccttataccaattgataaggttagttgcttccgtgaaaagaggttaactgttttggcaaaataaatctactggttagtaactcttctgccaaaaatggaactgacataaaattcatcatttgacataggaactgaggatgtattaggagttcgacagacgattatactcaattatcatcataataaaaaacactcttctaattgttgatgatgttatgttacttgcatcagatagcaaaccaccctattgtacaatctgttggtggaaacatgtttgtgttgt

SEQ ID NO: 2147 - DNA, 595 bp, Zea mays
gcagcatcgtccacatcccaagggaataagagaacagcaggttggaaacaatagtgttggtgttactggggcctgtatgattttgtttaaactgtgtgcacgtttgtgttggcagtggaggaggagagagcgaagctgtttgaagggtcaaacagtgcggataaaccgagaatgagaacgcagcaggagattctaaccaaatataggtttggcggggtaagccatgaacattgcgttttctttttttgatgtgtatcagtgtagagcatggggtggggagctaaatgtagtaggtccattgcattgcaggacgccgccgccgcagctgctcatgcgaaggataagctgatgcagaggcaggagaaactggaggtgcacatatggcttgtaagcaattgctttgggtgagagcagtatgtaattctgtttgtttaatttgtttaccagagaattagccaacaaaccgcggagcttcagaatggagcggagaactttgcttccctggcgcaggagctcgcgaaaacaatggagaacaagaagtggtggaagctataaactgggtttgtttgtacgtatgtgtgttgttggatgacac

SEQ ID NO: 2148 - DNA, 361 bp, Zea mays
taattccctgtgggttggtataaagtgagatgtcaacgtagagaaagaaaatagttagtgggtgagtgagcagagtgaatgggcattctttcatgcaaatactgagcacaatgcttaatgtttcagccttcactgacggtgacatgtcaatagttggtgttcgtcttcacaaaggaatctgtcaaaggaaggcgccttgtaaagtctttcttgtgctgttgtgtgatagttttgtgtgaagggtaactgaaagttgaatgggttttgtgctcgagtgatagtctattttcccctcttcttttgtttgttgatactaaaatgagaaaagacaagtgatattggtttggtttgctaggagtat

SEQ ID NO: 2149 - DNA, 361 bp, Zea mays; identical to SEQ ID NO: 2148

SEQ ID NO: 2150 - DNA, 674 bp, Zea mays
tcttttcatggagatggctgatcaaggcagttacagaaatgctgtgacagctagcattcttgtcactcacctgactaagcatggtaagcgcttgtccctttattcagctgctgcctgctatatatatagctcgttctttttccaatggccatggttgctcactcccagggaaatttcaagaggttgaaaacatcatgcatggctgtttccgagatgaagaccagctcgacactgccttgtacaacacatttatcaagtcgatgcttgaatcaggtctggctaacatatcatactgttcatcagataggcaaacagttttctggctgcaggccagggctatcatacctgacctgaccgctgcagttttagtttccaagcaggtaaactgcattcggccgtcagcatatacgatcgcatggtatcctctggcgtttctcagtcaatgcagacgttcaatacaatgataaggtagataaatgctcggaaaccccgggagccaaaaaaagaacggagttgcgttatttttcttgaatatactgtcggtacggtagtagcccccgcatcaccgctcaccagcttcagtcttctatccagtgtttatggcaaaggaggaaagctggacaaggccgttgagatgtttgctgctgcgcaggagctaggcctgccgatcgacg

SEQ ID NO: 2151 - DNA, 459 bp, Zea mays
  misc_feature (349)..(390): n is a, c, g, or t
  misc_feature (395)..(452): n is a, c, g, or t
gctcggtgtaacatggcagacatgaacaagtgctgagtcacattgctcgccgttctcttccgccactaaggtgattctaagctttctgtttgtttgttaactgatacatatgtataaggatagataggcataggatagggtgggtaagcttacatttttagctagcgtgcattttcagtagtttctgtaactcatatctatctggtttcaagagaaaaaggcaagatatcataggtcggtatgagtttcttacggaacaatgacttgtggggagcaaagagctttttggtgtgtgtcagagctagcttcaatggccgagctcatagagtgacagttacaaatcaatcgnnnnnnnnnnnnnnnnnnnnnnnnnnnnnnnnnnnnnnnnnncaagnnnnnnnnnnnnnnnnnnnnnnnnnnnnnnnnnnnnnnnnnnnnnnnnnnnnnnnnnntttctct

SEQ ID NO: 2152 - DNA, 355 bp, Zea mays
atactacgcatccatacacggaaaatgaagttgggagaggatgtagatctttggaaggttgcagagtgtaccgagctattcaccggtgctgatcttgaaggcctttgcagggaagctggaatggcagcattgagggaagatatctcagcaagtttgatacatgacgctcacttccaagccgcacgaagttcattaagcccctctcttacaaaagcagtagttgatgagtactcaaaggtagatataaatgatccatcgagtaggaaacattgatatgttccttttctatttctttgttgcacactaggcgcaatacacatttgcaaccttggcaccaagacacacagatggagat

SEQ ID NO: 2153 - DNA, 585 bp, Zea mays
  misc_feature (561)..(568): n is a, c, g, or t
agaaagtgttatgatcttaagaagaaaacagtgagcgacatatttggctgtcagcttatgcaggtaactcgattcattcgatgccgcagtttgattgcaaatgtatcgcaaatgaatataaatacgatgtgcaggtaccacaagtaacagaagaagctgcacaagctgttgtagagctctatccaacccctttgttactggcaaaggcatactctatacttgtaagtcctctgcctagttttttttgtttccgtttaaatatacaggtcacaacagttcctcatgttcggaacaaattccatgccctttgtgttgcagtgctacagtactgtgtcttacaaaatacttttttttgagacatctaagctcatgtccagattggcaatgttgtagggtggcgatacctctgcacaagagaagatgctaaagaagaagaacgagatggtaaatgcaggagcaagccgaaacatatttcaccttatctggggtgacggatgaaaaatactctggactggaaccagttgcgggccaactgaactttggtggcttatggtgtcaccnnnnnnnngaccatcttttgtgtct

SEQ ID NO: 2154 - DNA, 772 bp, Zea mays
gggaacgggtgcccttaatgctttccggcaatcaaatttcaatgctgtaggcttgcaaggctacaaggtatgctcagcatttggtcatcagtttctgctaccaggcatttatatattcttcagaactattctgaaattcagtgcttttggctttagaactgttattataatgatgcatttacaacagagtttaggaacatgtactttaaaactttgggttcatttttaacctgttcgatttggtatattctatattgttatgcagcttccagcagattgtcgtttggccgctgtatttgttgctggtctttcgctcactggtaccgtttgtgaacttgtttcttctttctaatttttaatctgttgcattccaacatattttatgttgttgcctgtgaactcaatgcagaagacggtgaaagtgacgagcaggttgttttggttagccagagtggcactgtaaacagaatcaaagttaaagatatatccatccagtctcgacgctcgaggtaagctaggcttcaatgctctaataaaagcgtgtagctggttccaattcattaccttctcgtttcccttccgactttttcaaccatgatctacctctgttgggcaactaggggagtgattctgatgaggctggagcatgccggaaagatccagtcagcatcactgatatccgcagcggcagcagaagtaactgaagattagtcttgcacccaagatgcaagtagtttagtctgaatttaatccctggcgtacgctgcagcat

SEQ ID NO: 2155 - DNA, 251 bp, Zea mays
cgttgtagagtgagtttatgtgttagtgataggaaatagtctaaggactgttctacgataaagcctggagaaagctgaagtggctggtgattacaaaactggtggcaactcccattcctgtggtagtcctggctaactgtaaatatcgtttgacagagcattaccatgccaactcaatctgttgtgatcctcttgtaatgactagtgagttaaggtgaactgttgggtagatacgagatactaggttatta

SEQ ID NO: 2156 - DNA, 374 bp, Zea mays
tttgttgcgatcgatgcgccgacgagcagaccttcctatcgaagaaacggattctggaactcaacaccgagaagatcagagtcgcttctcctttgtcacctggaaaagaaaaaacataatatcataaattagtaaatagagaataaagttgtagtcaattcttgagttattagatagtaaaagtctaaaaccgcctgtgcgcaaaataattttaaaatatattttgccgagtgttcccgtaagacactcggcaaaacaaactttaccgagtgttacctaggctgacactcggcacagtacgctttgtcgagtgtcacctttggacactcggcaaagtatatttttatttttttccttttccagccaaactttgt

SEQ ID NO: 2157 - DNA, 334 bp, Zea mays
atggacaggctgtgcgagcggtggcgcccctaccgctctgttggggcctggtacatgtggcggctcattgagtccaaggtgccccagccggcgccgcccatccctgccctcccttcgccggacggccagattatgctacagcagcagcagcagcaatctgtcatccaaatgatcattcccttttagatgctcccagggatggggtgaattcggtatcacttctgcccattagtcactccatcttagatcaatgtttactctgcgcatccgatagtcagttccgcactttgttgttctggaatggaacggcaggagggtggacatgaaatgagta

SEQ ID NO: 2158 - DNA, 1029 bp, Zea mays
  misc_feature (831)..(833): n is a, c, g, or t
  misc_feature (1010)..(1012): n is a, c, g, or t
catcccttacgatcccttatctacttttcatctcctccaagcactatcaaacaaagaaattagtggataggaagccgccatcacgtagaagccattggatctggggcctgcgctgttcagcacatgctagttgcgcggggtccggaagccatcagatctaggggtgttgctggtcggcaccatcccctgctcccaccacgaagtcatcgtcgccatcagtgacttccaatttttttcaacggaagaagctgtatggatgtagttggaagctacgagatggatgctgcccctgtttgtctcgttgcttcatatctcacttgtgacagaaacttgctctaggatagtgcagccaagattggagttctagttagaatatttcctgctgctacctgttatctgctagtcgcgtcctcctcctgctaccctgttgatggtgcctgtctgcagctgctaaaataactagcttagtgatgagcagtacctaaaacaactaaagtatgtatagttaaaggcaagtagtacttgaattaatgctactactgaatgggatttatagcttcctaagttatatgttatgcattagtagtgttctcaaatttctacggttgtgcatatctccccatggacatctcaaatattttatctaaatcctcacaaaatcaagtgcattaaaataagacagataagtgtgtaaggctcaaaatattttatcttttggttctcaggtccatttgcaagtaagagactttcatttggtactgcttcaaggtgcgtgaatgtttgatggcatgcaaattcattttcatgtcaagtttacattgtaattagttnnnaatttatctagatgggtgtgaaggagatgtatcttcaatattacaatagttacaatcagtacctacgaagaagaagggtgcttatttgcactaccatttgcgtggtttttttgtggtataaactggctagattacataagaagagtattaaatatggtcctttgttactaagagatnnnaacgagagaagcggctc

SEQ ID NO: 2159 - DNA, 485 bp, Zea mays
tgggcatgtacagatggacatgattatactgcttagcttacggtctttcctgtaaagtgtaagtaacaaattcacccctggtcttctaattttgttttcttctaattgtttggttactctcttcacaatcatgtttgttgtttttttttggtagtgttttggaacaagacatttgagggggtttgttttatctaaagattctttgaatggcatacccgctggaaacagaagtgcaaggccctaggaataagtaaccaatcattgtgtcgacaaatgttccacgtctgtaggctgctgtatacataacatactccacattatactttacatgggcggctcacggtgcccttcaacatagtagaggatgaatgtccaagttcctcctggacagtgttctgtgtagggtagtggttttgatagaggattgtatatctagttggtatgttggtgatcacctttgttttgttttttaggaaccaagccta

SEQ ID NO: 2160 - DNA, 349 bp, Zea mays
ctctgcagcaatggcttctgatgccgccggcgccggcgccaccgccgccgttgccgccgccgttctcgccattctggtcgtatcttccatggggcatccaaacaaagggccattatgcagcgagtgtgggtcgctgtgcaatacgaactgcactgcagaggctgccaactccacaacctgcagaagctactgcgacaacgacaccacggctgcccgggaggactgcgaaaggcaggtcctccaggggtgccaggcggcctactgcagctacggcacctgcagccgggactgcaacttggaagcccagaacgcctgcctttctatccatgacgactatacagattgccaa

SEQ ID NO: 2161 - DNA, 496 bp, Zea mays
ggcacggttgaccgccgaagtagctacttcgaaaattgcaagcgttagtcatttcgacttcaatggatgattttgtttgagaatttatttaattgttctacaaattttcaggattgtgagagacgatcaatagcgaagctattccatcaccggacagaagagagacacaacagtgcacaattaacaagatgacacatccttcctagtgatggagggcagaagagagaggttagggattgtattctttgatatagctcagctatccacaagactctccattgaaactttatgcccctgtctaggagtttgtactttatataatgcaagccttctttcctttgtcactccagtcctgcaggccagttcccgcctaacattttttgcagttgacaaggcggattaggagtttctagctgtttggtttttctttgttctccgtaaagctctgtttattcttttgataatatggcccatggatgatctggggaagctatga

SEQ ID NO: 2162 - DNA, 296 bp, Zea mays
tattgatacatggtttattcctaaacggaagactagaggaggcagcaaggtattatgaagagatgaaaagtaagggctttttaccagagaaaaagactgaagaaatggtaatggcttggcttgaaggcagagagcttgccaaggcatcagttattagctccaagggtggtcgtggtccagtgtctctcaaacttcccaagaagtgacaagtttaaggtttagggtttagggtacgataaagttcaagaatgaaatgaaacgaaacgatatatgacggcgcttattgttattcctgt

SEQ ID NO: 2163 - DNA, 420 bp, Zea mays
  misc_feature (19)..(23): n is a, c, g, or t
atgggtagcatgacttatnnnnnaagagtacaacctctgcagagtgtaaaactggtatactagatgtgctcgtggtcatgagcagcccaggactctcgcatgattaacttatgaaattaaacttaatttgtcatatgcatcgcattgtggttttattattaatttttatctcttattactttgggatggtatatacttgcacttagtaattgctaataaaatttgaccaacttattaaaagcaatgctcagctttaaccattatttgttgatcagccttacacttcacatgagcccccattgttggtgagctcatgcacattattccccacacttgttgagcgatgaacttttttgagctcacccttgcgatatataaaccccctagttgaagagcaggtggcctaagaggaggactact

SEQ ID NO: 2164 - DNA, 1060 bp, Zea mays
caacaaacattataaactgcacttagggcctgtttggtttgatggctaacttgccacactttgcctaacttttgtgcctaaggttagttcttcaattcgaacgactaaccttaggcaaagtgtggcacatttagccacgaaccaaacagccccttagtgcatgcacaggtacattgttaagatttcatcagtgtctacacgatcagtttgttccaaatgcctctgcgattatgattctttgaggttgttaatcactagggatgctagtcaccgtatcacttttacatgtataccttctctcttaacattacaatggtagaggataaccataattggagtacatatttggatatggatacaaggtttactgcctttcttggatgtttaggagacaaaattgatgcaaaaataaaattcaattagtactcacaggactactagctgctttgggaattttctggaatatataaaaagaagtgaactcaaaaccattcaactttttatcttagtttcagttgcgcattgctgaatttaacatatgtgcaattaagggttggcaatcataatactcatggatagaagtagaatttgtgaaggttctaagaatttattttctggtcctccttgatgactcgacgatgatcagagcatagggaggcatacttttatcttcgaacaaacctttggtggatatacaagtatttgttgactgaagaatccgatgcagcagaaaatgtctttgaaaaagtttggattgttttaccctgttgcttaatacaccactagcaataatgacatcctttactgaacatgattttcttttgcagccaatttcttagattgaggttgcggttgaacctagctccagctccctatcatcatcaaaatttgaattttatgatctggaagaaagcatcagcaaggcatttcctccaaagtagcgatatatgctgcccttttggctagttgaaaagcacaccggggcctgatgtgtccttttgctcacatcacatgccacggcaatagctagtaccacgaactattttggataccggcagtt

SEQ ID NO: 2165 - DNA, 354 bp, Zea mays
caaccatcatagggaggttccgctgtccaccgattcatcggagcagtccagctggccagagccaggcagcaacgtcggcgaccaagaccctgaactgctggtgaattggccatcggagaccgacttgtcagtggacgagccatggctgggttttatgagcaacggcaatgagcttggcgatgtcgaggggacgtcgccgtgggacggaacaacagactggctgctggactaccaagattttggcatgtgcagctccaactcggtggacgattcaatgttccacgcctcaaatggattgaacttctaaacgttggagaaaggctgtccaatttcaagaaatagggaggaagacag

SEQ ID NO: 2166 - DNA, 1063 bp, Zea mays
  misc_feature (938)..(939): n is a, c, g, or t
  misc_feature (966)..(967): n is a, c, g, or t
  misc_feature (987)..(991): n is a, c, g, or t
  misc_feature (1026)..(1028): n is a, c, g, or t
  misc_feature (1047)..(1051): n is a, c, g, or t
cgagctgcgcgcctgcctccgatgccgcctcgtcaagacctacgaccaggaacccttctccgctggcgccgctcccctcccccctcctcacgcctaggcctgcggtctaggttcaccagcctcccgttgaagggagggttcgaggactgggggtttcgtttctcctggtgcggtccgttctcggcggcggctaaggtttagctcgctgcccctctcgattccaaccggtgctagattttatttgtttttttgcgttgtagcattgaatacctattgcaatggcagtgtaaaaagtaaaagagatgaaaaatacatgttcgcattttacttttgtcataacttttaggtggcacctctgtttctgtgcaatacatgaattaagagatgttatagtttctacatgatcagcatgtcagttctaaataagtgcctgatgtttatgtttgagcttgtatttagagctaaataaaatcaaggccttgcatcagtttgtttaaagttcacttctgttcttggttcatagtagaatttatttatggatacgtctattcgttgcgctgtggcattattaaccgggatcatgcaaatctgcaggtaggttcattccgggttgctacacacttgctgtttcggaggaacttcaagaagagtatcaggtgaaaactacgtacctccattttagaaacgacgatgactaatatacaagcagctattatgtgtaagcgtgcaagtagatctcattccgttagatatagatctaaccatatgtcatatttagcatttaaatcctctcactgccgccttactttataaaaaagctcctaacaaatcacgattacacatacggttggatcttagatctaacggacaaagagagctacttgcacggcttgcatatttgtcactgcctttagaaacactcactatgatttaatgcnntactcgagacacgtcgttgttcatcanngcaggggagccaagacaacnnnnngtagtatgtgccacccaagcgatgtctagagctcnnnaagcagtatgaataatttnnnnnatataaaaaagt

SEQ ID NO: 2167 - DNA, 290 bp, Zea mays
tccagctgcatgcacagcacagcacagcacagcacagcacaaggtttggtttcctccaatgcctcaaatcaatgcaactttgcatgcactttcaggattattatccttttccttgacagactgaccaaatacagcatttctaaagagtgagctacaattggttggaggctaatggtacccgagttgctccgttccttgttatacaattgactagaagctacaagcaagataggtgatatcactgtccggaatctgtgaatggcgtccacaaataaatacaccctccatcc

SEQ ID NO: 2168 - DNA, 397 bp, Zea mays
aagtatcttttgtggagggcagttatggactgagacatctcatctcacttgtagagttaagtaaactaaaatagcatcaagttaattgttagtttacacaatattttgaaatgcgcccagcaacatgcattttagtacgtgtttatgtcatgtgatgcatgttcaactgcattatcttcattttcatcccttctacaaagtttccaacatctgaaccatctgttacttctcagcaggttgcagatgtaggccattcctgaagaatgatggtcagttgctgctacgtctaatcattgggttccgtattactacatacacggagaaaacagattttccacatatattctttgttttgttctacaaacaaagttaagtgcttcgacaacatattcctacc

SEQ ID NO: 2169 - DNA, 342 bp, Zea mays
ttattttgctgatctactcgttgatcaagcttgagaatgaagaggtatacatgtatcactacacaattacatgacaacacactattacatgacaacagtattggttcaatctttgtactaatacaaaactgtttttatgttgctttagatgagaaaagaagagaatgatgcaagtgatcccgatggcatgaatgatgaagaagagttgtttgggacatagtaatttgtaatatgatatctgtttgacatgttttatgtttgttgtttgcatgtgatgtgtttgtatgtgtgtgacatgagtgtagacataacttctcactcaaataatgtcaccatgtatta

SEQ ID NO: 2170 - DNA, 411 bp, Zea mays
  misc_feature (211)..(213): n is a, c, g, or t
  misc_feature (270)..(273): n is a, c, g, or t
agctcccttgcaaatggcgattccgtgtgttcaagcgggacgatgcctgcttcaaggcaacgtcgtctagcgaaggaaattgcctcgtccagtacctcctctccatgcttcctcagtgacgctcacgcagtcacgctccatctcatctccactccacttctccgccggcgccgcgacatctccaggcgtgggctgaagctgaatggtgagnnntgagttggtggctgtgggcctgtggttgctggtgcaggcgtgcacctggctgggcgnnnnccgactggctctggctgccggtgtgcttgtgtttgtgtgtgcagtgcagctggctagtgcagatgtgcttgtgtttttattttattcatatcttattcttgagaacttgatgtatcttctcttatcatgagtgactgt

SEQ ID NO: 2171 - DNA, 258 bp, Zea mays
cggcgtcaccaaggagcgcgccagcgagctgctcaagatgctcaacggctccaaaggcagcgtcgagtgcgtcgagaccgtcgacttcaagggactcaagaggccattttgatcggccgagggacgaaacgagatttctttttttttttgtgaagatttggttcgacgcgtttagatcagatgtgtggatagctgatacatacagatacatgctgcttaattagttttaggagaaaattttgacgctgtaactgcaca

SEQ ID NO: 2172 - DNA, 658 bp, Zea mays
ctgcagagcatttgcaaaaggcgatttgtgaatattcgagtgatgagatcttaactgtgatgtgagtcttccacaaacttttgttgattaccatttgttttcaatggatgctttgacttctagcctacccagcttgcttggaactaaaaggctttgttgttgctactgttgttggatgctttaacttcgtatcattttcccttaagatctgatattcgtatctcattgcgggacatagcatgacacttgtttagaataactactcaggtgcatgggtcataataaaggatgggaagaagccgcctctatgttttctggcgattcagttttgcttgagacatgtaacgctgcgttgctagaagctgcaggcaaatcatgggttgaggtcagcataattatattgaccctatccaaagcatgcttcttttcatctttactgaattggtcttatatagttttatgtacaatccagctgaatttactgaattgggccatgacatggtatgcaggccttttttgtggctggtctgggaggatggaagctccatggaattgtaaagccatgaattattgtaactaaaagctagatgtaattttttagctgtttcttaattattattattattaacctttgtgtagtggtttttacatgccactg

SEQ ID NO: 2173 - DNA, 788 bp, Zea mays
  misc_feature (761)..(768): n is a, c, g, or t
  misc_feature (774)..(774): n is a, c, g, or t
  misc_feature (778)..(780): n is a, c, g, or t
  misc_feature (783)..(783): n is a, c, g, or t
tatacatttccaaaaacttaccaggtcttgacaccacccaacttttgctctacattttctccatgttacccacaacttattcatggcttgatgcatttctaatgtgcaatattgaatacatgacatgctgcgccttattttcattctgtggcatatgtgatttatacctctgctgaattctctttttgactgtcaacatcttgcgacttacacttttaaaatgtgatttatacctctgctgaattcattttctcaaaaggctgcccttttttttttaaaaaaaatgtgtgcaaccttgtgcccatcagattttaactgatttgccggttaaaagtgtaatttctgtatatccatttttttttgtcaaacatgtgatttggtgcggcacgccagattcatcacctcaattttcattcataaacttccagactttgtacactactagttactataagcccactaatacccttttggtcaaacagcaggtaagcactgaagcaaaattcatccttgatgccaattatgttatcgtcattggctgtacctttggcgcttacctggaatattgttgctccctggtgtttccaaatcccagctgctggcttggcctaaaacgaaaacctccaggctccagctgctagctgtcataccctacaagtgatggcaccgcactctacactagaattgttacctagtgctgcgaacagcagcaggtcaaggcgtctgtagactctgtacatgtaattctcgaaagaaccaannnnnnnntgcatntaannnagnatcag

SEQ ID NO: 2174 - DNA, 445 bp, Zea mays
gacgtgcagtccgagcttctgttccggaaggagccgtccacgttcaccttccacaaaggatgggccttcccgagaagagtctacttcaacggagacaactgcgtgatgccgccgccggacgcctacccgtggctgcccaacgccgcctccccgcggctgtcgccttcgcttctcctcccgctcgttgcggctgcttgggcagcattcgcagtcctttcgtgatgggcccatatgcgtagggaaggcaaggcaaggcacacaatgtcccatgacaagttctgacctgattcggcgttgctgcttgctgctgatcattagtcgatctgttgcgaagttttatttggtgtcttgaatcttgatccaggaacaggttcagatgtgcattcacgtactaccaagcatgtacattcccaatacttgtaaatttctgcaaagactgactggc

SEQ ID NO: 2175 - DNA, 567 bp, Zea mays
tggtcctggaaatgttcccaggacatctctgactccacaagggctgcaagcacaagcaggtatttccgtgttcacttactgccaacttcctctgttccaaattgcaagtcagtcgtttgggcttagatacagagcaaaaactatgttatctacaaaaaccaaaacgacttataatttggtacggagagagtactacaaatgatctgttgatattttctgacttacgatggcccgccctgttctgagattgttttccatttgccatagcaggatcagtaagagttaatggcccagtgacggattcaaggtatcctcctcaccaacagatcccacaagcatacggttaccgccaaatgcctgcaaggttggacagtaccaacccatcgcaggccatgggaggttacacgctgcagtcgcagaaggcctatgcttgtgcaaacggcaaaggctcgcctgatgtggccgtgaacatgagagctccccccttccatctcccagctggaccaaagaagaacccattagataggatagcacctgacaccaccgacatatacacaagatccctga

SEQ ID NO: 2176 - DNA, 352 bp, Zea mays
tttctacacctgaagacaaatgccttttactgtaccacgatataacttatgggactgctgcgcttggctgtgttttaaaattccactggtcgacatgaccacatcgttggtttgtacaacaattataggcaatcacagtattcgattctttgagtatggttattgaggtatgagtttctgatgtcaagcacgtaaggaaagaacacacgataatcgtgcatgcatattaccgttgggcaattttctttcttttttttattgcaattttacaactgtactgcatatggtcgacctgtaacaattattgaatttatgggtacgtgtatcctgcaagatatgaatcaacttgtaa

SEQ ID NO: 2177 - DNA, 665 bp, Zea mays
  misc_feature (522)..(522): n is a, c, g, or t
  misc_feature (526)..(530): n is a, c, g, or t
  misc_feature (546)..(548): n is a, c, g, or t
  misc_feature (553)..(558): n is a, c, g, or t
  misc_feature (570)..(573): n is a, c, g, or t
  misc_feature (587)..(593): n is a, c, g, or t
  misc_feature (630)..(631): n is a, c, g, or t
  misc_feature (655)..(656): n is a, c, g, or t
cgtatcatcaacgcgaagaaggcaagagagttgtgctcatgattttcagtcttactttaaccaaacttctagtatttacgtttatctatttgctctgcacattcagtcaaatgtgagcagaaatgttccccgcaaaccaccgtaccctcctgctcgtctgccgagacgtcaagctgatgaatactcggagagtgagagggaggagtcagaatatgaaactgacggcgaggatattgaacattcaccgcctcgtggaagggaagatgagctggatgaggaggaagaatacgaggaagaagttgaggaagaagcgcctctctcagatgaagaaatggaggtgaaatatcttttggcctcaaacacatgtttctttccctacgtgcttagattcaccttcttcttaagctaacatgtctaagaatggaatgctttgcaccagataagaaggctctcgattgtaggactatatatatttttaattaggagatcagtttagagggcatttctgtatttttttttgcntaannnnngtggaacttaagatgnnngctcnnnnnnggaagagagaannnnggggtggtggtggnnnnnnncgcgaggagctggcgtccgaggacgacgaatccccannaaggaagcaaccgactgttcagcnncgtagaaag

SEQ ID NO: 2178 - DNA, 818 bp, Zea mays
  misc_feature (706)..(708): n is a, c, g, or t
  misc_feature (768)..(770): n is a, c, g, or t
  misc_feature (791)..(795): n is a, c, g, or t
  misc_feature (807)..(809): n is a, c, g, or t
tctttccaagtgtataatcagagaaaatgcacagaagacacagcaatataatgcttcagttgcaaataaatttccaccccatgttcctcaaggtaaacacctgtgattccgaagaggtcattgcggttagctgtataaactgatttgttgttaccgtacctcaatctactaaatagtactccctccgttctaaaatagtattcgtcttagctcttgatttttatgtctatattcaactagatgttgatgaatgtagacacggatatatagaatacatacaccaaatattgtatgaatccattaaaaagtcaaaacgaattttattttgggactgagggagtaatacaaatacttttgttggattcagtgacaagatgcatccatataatagtatttcagcgaaacaaaccattttttggagaatgtagttaactgacgtgctgttgctgacaacattattctaaaaacactgatttgttatatggatggttgcggataacattattgtcaaaatggtttgtttggctgaaattttatttcacggatgcatgttccactgaaataaactgatatattatgcatcctgtatgaactgatgtgttgttgctgataacatgttaagaagtggaacaattttgcaactctgaacaggcagtttacgttagctgttataaactgatgtgttgttagttgttactgtacctcnnnctaattatcttctgtttttcttcattaacgttctgttattttggagaacggatacctggnnnatatactagacttgctttatnnnnnctgattgctgannngtgctgctg

SEQ ID NO: 2179 - DNA, 515 bp, Zea mays
tactgtgcagtcatgtctttgttgtttgagcggtaatctctgccgggcaatcctatgtacagctccgtctccacgtccatcccgacatccttcggccccgtgtgatcgatggctgccggcgctggaggcggcggaggagccatcagcataggcggcggcggcggcggctgcttcttgcactgcacgcatggcttggatcaggattataccatatgcgtgcatcatgatgttgcagaaatggggagactgtatgcacataagatatcacagcacaggaagtcgaggtaaggcggtagaatcaaagcctgttttcttgggttgttggcatgccgcttgccgcagtgcagcgtctgcaaaatgttttcgcccccattaccttttcacgtaaatcttcgttgctcttgcgcagattcatctcctgtttggtggttgacgcaacaaggcacaagttaggatgtattctgatgtttcaatgcccgatgtagcctgtaggacacgaagctgacttaccttct

SEQ ID NO: 2180 - DNA, 515 bp, Zea mays; identical to SEQ ID NO: 2179

SEQ ID NO: 2181 - DNA, 250 bp, Zea mays
cgcgtggcggcgagagaagatcggcgtcgtcgtcgtcggctgcggcggcggcgggggtggcttggggagtggccgtcgagggctctcgcagtaggtgagtggtgcgctctggattctcgctgttctctgttccgtccaggcggtcgatctcacggggcaatggcacagtgataaaacaccgtataagtagaagtagccggtacagaattcacaataccaaaagttgtggtttgtggactggatgaatgcg

SEQ ID NO: 2182 - DNA, 763 bp, Zea mays
  misc_feature (745)..(748): n is a, c, g, or t
attgaggatacgagaagattgccaagcagaagagggagatgaaactggagcagcagcaaggagctgagacaaattttctgaattcacttaatcatgttcagaagatagagatgataagtggcatcaatgacatgaagaatgagtttcagtcctttctggtaacaatcttttcttatttgattgagatgagtaggtgaaagctttttggtagttgaatgagattggagaaaattgttacttaatgcttcttgctaaaacacaggacaatagttccaagaagtaaacatggtttttgacaactgtacaggatttgagaaaattgttacctgatagtctgatatttcttttttaaacatacgacaaccattcaaagaagtggacctgcatgttttaaaactttactcagatgaacctgctgcccattttgttctttttcatccttaagtctaagacaacataagaagttcgtggccttcaattccgttttcatgtttttctagtgtgttagactgtatgcagcttgattttgtttgctgaatttacttttcaatttaacaatatatttgtcctgttcgtgtttcttaattcagaaaagaggaatgccattccatttttgtcgatgcatttgcttccatgttccgttttaatatgttatgttggcatctgattttatccggtcatctcattggtgtttttgctttacctgatacattgagcaggagtccttcgatgcatcaaaaccggnnnnatctgatgatataca

SEQ ID NO: 2183 - DNA, 377 bp, Zea mays
  misc_feature (368)..(372): n is a, c, g, or t
ttgtccttggctacatttgcatcactcctgattgagtttgttgccagactacagaatgttgttaacgcatttgaagagttgagtgagaaggctaactttaaggatcctgtggtggagcctactgcagttagcacgagtaatgttaggtttctcgataaactatgcaaatttgtaggattctagagttgacacggatcctgtgaaggctaactctaaggatcctgttttggcatccagtttccctttttaaaattaatttgggggtacggaatgtacactaaacttgtaaatgtgcaatcagatgattgcaagttgtattgctggagttcagtttacagctacagaaatcatcaatctggtaaatgttnnnnnctgca

SEQ ID NO: 2184 - DNA, 684 bp, Zea mays
  misc_feature (522)..(524): n is a, c, g, or t
  misc_feature (545)..(545): n is a, c, g, or t
  misc_feature (553)..(553): n is a, c, g, or t
  misc_feature (556)..(558): n is a, c, g, or t
  misc_feature (578)..(582): n is a, c, g, or t
  misc_feature (585)..(589): n is a, c, g, or t
  misc_feature (605)..(609): n is a, c, g, or t
  misc_feature (623)..(629): n is a, c, g, or t
  misc_feature (632)..(632): n is a, c, g, or t
  misc_feature (641)..(642): n is a, c, g, or t
  misc_feature (648)..(652): n is a, c, g, or t
  misc_feature (656)..(658): n is a, c, g, or t
  misc_feature (660)..(661): n is a, c, g, or t
  misc_feature (669)..(669): n is a, c, g, or t
  misc_feature (671)..(672): n is a, c, g, or t
  misc_feature (677)..(679): n is a, c, g, or t
ggtcacacgattcatggacgacatggcagatttcaaggtacgtacgtactatgtattcttcattatttacattgtagctgagatcaagcgccaccaagatcgttaattgtcaactaattaatcagcttcctctacatgttttttttctattgatgattccatcatgtatagagaggaaagaacaaaaccgatgtcgccaccaccgtggagtgctacatgaaggagcagaatgtcacgggcgaggtcgcctttgacaagattgggtcctttgttgaggacgcatggaagacaataaaccaagcagcactcgttggggaccgtgctctgcttccggttgtgcaacgagtcgccggcctcgcgatgagcatgatggtgtttttccacggcaaggttgaccgttatacggacagcgagcacctcaaggaaacgctggaagacctgttcgtcaaccatgttcccctctactagctagtacgcactagctagccgtggccggagtatatatatggattactcctacannngggatattccaccaccctctngagacttnggnnngatcatcatataaactcctnnnnncannnnnttttctttgttccccnnnnntttcttttcaacgnnnnnnnctncctgttggnntcttgnnnnngatnnntnngtccacangnnacacnnnccccc

SEQ ID NO: 2185 - DNA, 506 bp, Zea mays
tcttctataagtttgctgcaggtactgcaaggttctgaagtggttcctttttttcttcttgttttgcacatccttttccacttccttaaaccggttgctgaaactgctaacagtaaagctcaaagaaaacgactgatgcttactagaattttcagttataatatagcctacagtaaccattttattgcaccaggatgttgttcctgttattaaggccatcatgtgcaatatccccaactcaatcaacttcaatcttatggtgctgtcaaggaaagaaaaataatgctggtgctattccttgagctggtaagcggtggaatgcaaaacgcaaggggtcaagggaaggggattaaacggatgcctgtttggactgcagctgcgtcactaataagttcagtgaatgcaaacattttttcctgatgtgttcgctatcatatctagtcgagtgcttgactacattcatctttagtgttcgcaaagcatctgaaaacttgtcttaggctcta

SEQ ID NO: 2186 - DNA, 230 bp, Zea mays
gcttttctgcagccgacgatcgatccagtactactctacttgtgtgagtatgtgattggcgagaggtaacgactagggtgccctcacgtagcttccaggccgatgatgattaaggaagccggattacgtagatgcgtacgcgttgaaattcgtcgacagttttctgcctttattatgattattattgccagggttatatggagtcttggttctgcatttgtgttgtttga

SEQ ID NO: 2187 - DNA, 1139 bp, Zea mays
  misc_feature (804)..(806): n is a, c, g, or t
  misc_feature (851)..(854): n is a, c, g, or t
  misc_feature (954)..(954): n is a, c, g, or t
  misc_feature (982)..(993): n is a, c, g, or t
  misc_feature (1006)..(1021): n is a, c, g, or t
  misc_feature (1027)..(1039): n is a, c, g, or t
  misc_feature (1063)..(1069): n is a, c, g, or t
  misc_feature (1083)..(1094): n is a, c, g, or t
  misc_feature (1103)..(1105): n is a, c, g, or t
  misc_feature (1119)..(1122): n is a, c, g, or t
tcgtgggcttcaacagatgtcacgggtatgactattatcagatggtcttaccttttttttaggttgtataataaatcttgcaactaaaactggatgcctttctgacaagtgaaaagtgaaactgtacctagttttaatcttcaatcgtgtctcttctaatcggtatgtgatatgtgcataacatttatttttgcagtatgaaatactgaataatcttcagaaagcgcagaagtcctttcatatagaaaccgtacctccattgaaacttgcaccgccagctatataccatgagaagatacagaagaggaccacttcggttggtgaaactagcaaacattctgttagaagtcagaaaccccaaaaaatttggcaaatgaaggagaaaaaatcaaaagaggctgggagtcatcatccacaaaagtcaagttttctacgtgagttcatattccagtcactgacatcataggcattaatttcactgtgctgattcaattgtggctttctgtttgcctgcttacttcctttgatcctctgcaggttaatagaagaaaagattgctgatttgttaagtatggtatgtagttcaagctttacgccttcagtaatcttgcttgtatcgtgtggttttaatatatgcgatatatatggagaatgtctttgagatcaatactaaaagaaggatattaagtctccagcctatatacggctggatgcacgatgaggcagaacttgtcaccgcagtagctctttcgaagtgatgcgaaacctccatcttttgagtcttagcgaaacacctgatgacannntcagcgtggcacaacaaagttagacactgtttacaaatggcttcnnnngtacttatgatcaagagaaaaggtggcaggactagaaggaaagcgtgtgtatttgaaattttggatggagttcagagtttgtactgaaattcgctggcgnggatggttggatagactatagagcgtcnnnnnnnnnnnntagtgctatttcnnnnnnnnnnnnnnnngcgggnnnnnnnnnnnnntcgaatatgtttatcctttttgtnnnnnnnctggtatgcttgcnnnnnnnnnnnnatggctggnnnccaacatctcttannnnttggtgcagaaaccaga

SEQ ID NO: 2188 - DNA, 351 bp, Zea mays
caggcggagctttttttgcttagaccatattcagaaactgcacccttgaaggattttcatgctccattctatttttgtttgtatacatgggaactccaggatactctcacatcgcccttgccactacagcctacaataaagatttgcaggtagcagtcctgcagttgctgcttgtcattgagttgtggtggcttcctagggttatggagctgccatgcttgttggctgttgccaagactggattccaaaagctgccatctcctttacgtgccattgccttccaccaaagtccacgttgtttcctccagccgcagagctgcttcattgtatgaactatgaagtatcctgttt

SEQ ID NO: 2189 - DNA, 463 bp, Zea mays
gccgccgtcggcttgttccctccgccgcgaatccgcatccgaatcaccaaatcgagtcccctcccacgccctcggtgcctccaatccggaccctccaagatctggacctccggttcgcgggcatgcctggtcgcggcctccgcgtccacaccgccggcgccgggaggcggcctctactcggcggcgacgtacgagctgaccccggaaaacgtcgaccgcgtcctggacgacgtccggccgtacctcatctctgacgggggcaacgtcaccgtcgttgccgtcgaggacggtgtcatctccctcaagctcgaaggtaaataagccttttggatttcgatcggtaggagcgaaatcttgcactagtcgatttccatggtttgcaacttgtaggagcttgcggcagctgccccagctcgacgacgacgatgaatatgggcatcgagcgtgtgctcaaggagaagtt

SEQ ID NO: 2190 - DNA, 724 bp, Zea mays
tcctttactccggcgacgacccagctgcgacgcgccccattgccggaccaggaggtatatatccgttcgcgcctccgctgcacagctcgccgccgcggacgtctcgacggcgcagcagcttgaacttggttggttcttttggcttccctttttcttctaatgccttttcttcacgtcggcgttggtcggcgaatttttcgtcgcagggttggaggcggcggcagtgggcttcgtcaccggtaagaggaaggccaccgaggtagcccaagcgtaggtactaattcccgttgttggtttaagtgtgtgcactgtatagtgtaaaactataaacatctcttccagctctgaattgctgaaattaacagtatgggcttcttctgaagcttgttaagtagccaactagtacaattttagccctgtgtttactgagctgctgcagagagtagatacagtataaactcgagtgggcacgtttcttcgataggtgatagctaattttgtgtgtgtttatggttaggttctggagaaatattgttcagaaaggggatacggtggtcgatgccacatgcggccatgcgggaatgacaatgacacgctcgctctgcttaagatggtggctgacaaaacaggccgtggatgtgtttatgggatggacattcaagaatctgcgatagagaatacttcctcttttctgaaaatggccgtggatgatgaacatcatgtg

SEQ ID NO: 2191 - DNA, 418 bp, Zea mays
tcgctttgattgtgagtgatgtttgtaacaccccaggtgttatcaccagtgatgcaccgaatatggacctcgacaaggaatgtctatacaaataatgacttctttatcccgtgcatctctgtccatatcagattattaaaaagatttcatgaaagtttggaattcactaatctcatatgatggcgagtttgagccgttcggattacgcgtgtaagtgaatatgaaaaatcggaaaacgactgattttctgtaaaattgggaccccgcccgttgtccgagaaaaaccatgcaccgattccttaatcgaattgttatctagtcgaatgtttggatggcggcaaaattcatatatgtttgactaaaccaaatgttgcttaaaatatcaaagtcgatgtcatttggttcggtctatttgttt

SEQ ID NO: 2192 - DNA, 136 bp, Zea mays
cattcttgcggagcctttgattgcagttttagacaagagctagccagatgttttctttgtagctactctctgaagggctaattagggttgacaaatttcgccgtactgtattagttttcctgtggtgtacagcaat

SEQ ID NO: 2193 - DNA, 253 bp, Zea mays
ggatcaatctaattattttagattttttctaaatttgcctttcaatggctgaaatcccattttgatgcaaatgaaaaagcgaacatcctgtagactgctgttgctgtgcatctcaactgttttggtcttccaatctttttggaagtattattatttttactttcacttactcttataattgcatcatgttacacgatgttgacgtcaatatggatatacacccaaacaatctaaattcaaggtcttgtcaaag

SEQ ID NO: 2194 - DNA, 500 bp, Zea mays
tgtgtcgatggaggttcagtctacgctgtgggtttgacgaatgtccgtcgaaatttgttgatcagtgaccattcaattttgcctaggccaatttttccttctaggttgcagtttcccatcccaggaaatgtggttgattctttaggcccgtttgctgcaggcgcagagcagagccccgccctcgatgcttatcatcctgcaccatcagcaaggctagttcgttcaactgtatcataatctgtcccctcctttgtatacttgtattccgcaactaagctagtaaatagatgttgctggaaatagaattcttctatctggttcaattggagttgaagttcgaactgaaacttgccatattcttgtgatccatcgacgtgcttattgggcacggtacggtacttcaatcaagctgtttttttaggaacttgaagtttattttttttgggaattgtacgtaccattatatggataacaggatcgctcttcagagagctcctgtc

SEQ ID NO: 2195 - DNA, 446 bp, Zea mays
agattaatctcaccaatgaaaggtacttgccctgactgattttgtctgtctgttattgcttaattttctatgatttttccctatcttgagcttatgttttgcgtttgcagaatatcttttttatgcctaagaagtgaagctacaacacgctagagctatcgtgctcgtggcaagacgaacccttcttctgtgatgatggaatccaacctgttccccacattctaaggcatccttacggagttatgttgctagatggctaatgcaacggtatgcatcttactttgcaacgagaggctcaccttgaggctatccaagttggaccagtgcgtgcaactgaagctcacagcggcgctcgctgacctcgactcgtcgaacaattggtgggcaagtcagttgccacacttgaggtcgacatcttccaagggttgctctatgtgttcaaggac

SEQ ID NO: 2196 - DNA, 446 bp, Zea mays
  misc_feature (36)..(36): n is a, c, g, or t
  misc_feature (42)..(42): n is a, c, g, or t
  misc_feature (50)..(52): n is a, c, g, or t
  misc_feature (54)..(54): n is a, c, g, or t
  misc_feature (60)..(61): n is a, c, g, or t
  misc_feature (78)..(79): n is a, c, g, or t
  misc_feature (101)..(101): n is a, c, g, or t
  misc_feature (103)..(103): n is a, c, g, or t
  misc_feature (160)..(160): n is a, c, g, or t
  misc_feature (168)..(169): n is a, c, g, or t
  misc_feature (191)..(191): n is a, c, g, or t
  misc_feature (209)..(209): n is a, c, g, or t
  misc_feature (215)..(215): n is a, c, g, or t
  misc_feature (217)..(217): n is a, c, g, or t
  misc_feature (238)..(238): n is a, c, g, or t
  misc_feature (244)..(244): n is a, c, g, or t
  misc_feature (282)..(282): n is a, c, g, or t
  misc_feature (288)..(288): n is a, c, g, or t
  misc_feature (292)..(293): n is a, c, g, or t
  misc_feature (302)..(302): n is a, c, g, or t
agattaatctcaccaatgaaaggtacttgccctgantgattntgtctgtnnntnattgcnnaattttctatgattttnncctatcttgagcttatgttttncntttgcagaatatcttttttatgcctaagaagtgaagctacaacacgctagagctatngtgctcgnngcaagacgaacccttcttctgngatgatggaatccaaccngttccncncattctaaggcatccttacgnagttangttgctagatggctaatgcaacggtatgcatcttactntgcaangagnngctcacctngaggctatccaagttggaccagtgcgtgcaactgaagctcacagcggcgctcgctgacctcgactcgtcgaacaattggtgggcaagtcagttgccacacttgaggtcgacatcttccaagggttgctctatgtgttcaaggac

SEQ ID NO: 2197 - DNA, 467 bp, Zea mays
caacaagataaaaatggaggcgcctcgccgtccctgctcctcgctggtacttctgctgcgtttcttggcgatcttggcagcggcggcgttcttcatcgttctcgccgtgcacgttgagcctgtgcaaggtactacgtactattactactatatatataccctccgtttccttcagttcacaagctgcatgctagaacgttcagctacacgttgagattaagcagctggctctgctgtgcgtgcatgcaggagggaggcagccgaacccaccgccatctccggaggcacatacgaccccgcaatcacattgctgcaaccgtaggtgaaacaaattaagagaggccgcgctagctatacgattgggatgtgcgtctcttatttggtgggagccagcagtgtccaatttaaaccttgtgatcttattagaccatcttaatttaaaagtttttttcttctaaagctcgctc

SEQ ID NO: 2198 - DNA, 416 bp, Zea mays
  misc_feature (195)..(206): n is a, c, g, or t
  misc_feature (214)..(220): n is a, c, g, or t
  misc_feature (246)..(249): n is a, c, g, or t
  misc_feature (255)..(256): n is a, c, g, or t
  misc_feature (262)..(267): n is a, c, g, or t
  misc_feature (272)..(276): n is a, c, g, or t
  misc_feature (284)..(288): n is a, c, g, or t
  misc_feature (302)..(313): n is a, c, g, or t
  misc_feature (324)..(343): n is a, c, g, or t
  misc_feature (346)..(350): n is a, c, g, or t
  misc_feature (352)..(368): n is a, c, g, or t
  misc_feature (375)..(380): n is a, c, g, or t
  misc_feature (386)..(397): n is a, c, g, or t
gatgggggtcggtggagacgatctgtcagtgcctctctgtattctttgctgcgccctgtactgtatgtgcgttgtacatgtacggtgtcctcttgctcggggtcaaatgtccccatggcaaatcttgccggttttgcacctgtgtgtgccacgtgcggggattctctatctgtaatcgtacttgatcatcatgcnnnnnnnnnnnntgcaggcnnnnnnnaacccaagaagtcaccgccaccgccnnnnaggccnnacttcnnnnnntattnnnnngaccaccnnnnntgccgcttgatctnnnnnnnnnnnngtttcaaggannnnnnnnnnnnnnnnnnnngcnnnnngnnnnnnnnnnnnnnnnnctcccannnnnnatatannnnnnnnnnnnatgttgatgcatatatata

SEQ ID NO: 2199 - DNA, 403 bp, Zea mays
cctacgacgagatcttcgatggagaacgcgggaataccacggtcccaccgaacgccttttgaactaacaaaccggacagaaaaaaaagcccatgcagtacgatgcttatgatcaagtctgctgtaaggagaaagaaacaagacgacgtcatgggaggactggaagcgcccaactttcacgcatgtgcaagtgcaacgaacacctcatgattcttgctagcggctctgctctatgattagatccagatgtttagtctgtgtgctgctgcttcgtgggtaggtagccactggtttggagccgaaggccacctcgacgcgtcactcgtgctcattagtcattagtgctcatgcttttgttagtgtgttcgtttgttttggaaagggtaaagaaaacgcaatgtttg

SEQ ID NO: 2200 - DNA, 307 bp, Zea mays
ccttgaccgcctcgctgccaacggccggcttgaccactgctcctcggcgtatggggacgcgcgaggggataccgtgtgcgccagcctccgcgcgctcggccttgattacctcaaggagacgtcgggggacgcgcaggcgctcagcccgagcgtcgagcgctgggcccggcatctggagtttgcggtgcaccacctccttgaagctgagagaaagctctgtgtcgcggtgtttgaacggcggcctgaggccgcgcccttgtgctttgctgagattgcagctcgtgctggcattcttgatttcctcgac

SEQ ID NO: 2201 - DNA, 307 bp, Zea mays
ctcggtctcgtctcaggagcctccctgccggaaactaaagaggatcggagtagtgtcacttacgagttagagacaccgcgcgtacgtacgtccccactccgctctccagaaactcccccgtcgtctagctaggcctaggcgcctagccacctcccaggaatggatcagcgcgtctcccaggaatcgtcgtcggatcgtcggcgcaagtgcaaatacgtcgctgcggcggtgccggagggcgtccacggagagtccacggacaacggcgggtacgacgatactgatgagaccgcgggtgtgctgacca

SEQ ID NO: 2202 - DNA, 382 bp, Zea mays
ggacaatgccaactcatttctagattggccaacaagactcaagattgcacaaggagcaggacggggcctttcttatatccacaacacctgcaaccctaacattgttcaccgtgacgtcaagtccagcaacatcttacttgatagagaattcaatgcttatgtcgctgattttggccttgcaagattgatccttccttacaacacacatgtcacgacagagctggtaggcactcttggttacattcctcccgagtatggacaagcctgggtggccaccctgagaggtgatatatatagttttggagtggtcttgcttgagctgctcacagggaagaggcctgtccaggttttgaccaagtcgaaagaacttgtccaatgggta

SEQ ID NO: 2203 - DNA, 450 bp, Zea mays
cagcacatgagaggctggcggcggctactgcaagagcagcagccgctagctgttgtggccgggcttggggcatggcgttgcatacataaccgtgtaccaccgaccgaccgcagccgatcgatccatcagatcttgtgcgcggcgacgtttgtcgtgcatgccatcgagttgcccagttcatttcatttcccgccaccggcatgcatgtcgccatgccagcgtaccgccggtacgtacctggaggcacgcggtaggcgcatactccagcaccacatggaagaaatatatggagtgcaaatgcaacctctcatgaatgcatggctcagagtcagagccatgtatgtggtcatggctgcactgcaggagtgatgcagccagcttttcttttccatggcacaaggatgacgatgagttggtgcaaatgcgcgcacacatacacatactcctgac

SEQ ID NO: 2204 - DNA, 1414 bp, Zea mays
  misc_feature (384)..(396): n is a, c, g, or t
  misc_feature (398)..(399): n is a, c, g, or t
  misc_feature (406)..(407): n is a, c, g, or t
  misc_feature (418)..(424): n is a, c, g, or t
  misc_feature (426)..(429): n is a, c, g, or t
  misc_feature (441)..(441): n is a, c, g, or t
  misc_feature (443)..(444): n is a, c, g, or t
  misc_feature (446)..(447): n is a, c, g, or t
  misc_feature (449)..(456): n is a, c, g, or t
  misc_feature (458)..(461): n is a, c, g, or t
  misc_feature (464)..(467): n is a, c, g, or t
  misc_feature (479)..(479): n is a, c, g, or t
  misc_feature (481)..(481): n is a, c, g, or t
  misc_feature (483)..(483): n is a, c, g, or t
  misc_feature (486)..(490): n is a, c, g, or t
  misc_feature (496)..(501): n is a, c, g, or t
  misc_feature (504)..(519): n is a, c, g, or t
  misc_feature (527)..(535): n is a, c, g, or t
  misc_feature (537)..(556): n is a, c, g, or t
  misc_feature (558)..(561): n is a, c, g, or t
  misc_feature (564)..(564): n is a, c, g, or t
  misc_feature (566)..(568): n is a, c, g, or t
  misc_feature (572)..(610): n is a, c, g, or t
  misc_feature (612)..(629): n is a, c, g, or t
  misc_feature (631)..(638): n is a, c, g, or t
  misc_feature (640)..(646): n is a, c, g, or t
  misc_feature (650)..(673): n is a, c, g, or t
  misc_feature (679)..(681): n is a, c, g, or t
  misc_feature (683)..(698): n is a, c, g, or t
  misc_feature (701)..(725): n is a, c, g, or t
  misc_feature (727)..(762): n is a, c, g, or t
  misc_feature (764)..(771): n is a, c, g, or t
  misc_feature (773)..(783): n is a, c, g, or t
  misc_feature (785)..(802): n is a, c, g, or t
  misc_feature (804)..(845): n is a, c, g, or t
  misc_feature (847)..(852): n is a, c, g, or t
  misc_feature (855)..(873): n is a, c, g, or t
  misc_feature (875)..(896): n is a, c, g, or t
  misc_feature (899)..(924): n is a, c, g, or t
  misc_feature (927)..(932): n is a, c, g, or t
  misc_feature (934)..(938): n is a, c, g, or t
  misc_feature (942)..(960): n is a, c, g, or t
  misc_feature (963)..(999): n is a, c, g, or t
  misc_feature (1003)..(1019): n is a, c, g, or t
  misc_feature (1021)..(1025): n is a, c, g, or t
  misc_feature (1027)..(1037): n is a, c, g, or t
  misc_feature (1039)..(1050): n is a, c, g, or t
  misc_feature (1054)..(1078): n is a, c, g, or t
  misc_feature (1082)..(1086): n is a, c, g, or t
  misc_feature (1089)..(1094): n is a, c, g, or t
  misc_feature (1096)..(1114): n is a, c, g, or t
  misc_feature (1116)..(1172): n is a, c, g, or t
  misc_feature (1174)..(1175): n is a, c, g, or t
  misc_feature (1178)..(1178): n is a, c, g, or t
  misc_feature (1181)..(1206): n is a, c, g, or t
  misc_feature (1209)..(1223): n is a, c, g, or t
  misc_feature (1225)..(1258): n is a, c, g, or t
  misc_feature (1260)..(1291): n is a, c, g, or t
  misc_feature (1293)..(1313): n is a, c, g, or t
  misc_feature (1315)..(1355): n is a, c, g, or t
  misc_feature (1358)..(1370): n is a, c, g, or t
  misc_feature (1372)..(1377): n is a, c, g, or t
  misc_feature (1379)..(1411): n is a, c, g, or t
ggatgtgacctcttgccacggcgtgtgatgtttgttgcaacgatgcactgcactggcactggcactgcagcgcaatggatgatggattcaagtcaggttcggcctggccgacctgtcgcctgctgccactgccatggcgtccgtccccaacccttgcgctccatacccataggcagggctcgggagatagcgggcacagtggtcctcctcgtccctggtccggtggtgaatctgtcgctcttgctctggggctctgcgccgctgccgcctgccgtgcccggaggaaggccctgcaacgtgcaccgcgggggcgctctagctgctgcggcctcaccgtctccggttcacaggcaggactccgtgacctccctgcataagactgannnnnnnnnnnnncnnattaatnnatttatctcgnnnnnnntnnnngggggggggganannanncnnnnnnnngnnnnttnnnngctgtattcagntntnttnnnnnactcannnnnnaannnnnnnnnnnnnnnnccggtttnnnnnnnnngnnnnnnnnnnnnnnnnnnnncnnnnttncnnntttnnnnnnnnnnnnnnnnnnnnnnnnnnnnnnnnnnnnnnncnnnnnnnnnnnnnnnnnntnnnnnnnncnnnnnnngctnnnnnnnnnnnnnnnnnnnnnnnnccccgnnngnnnnnnnnnnnnnnnnctnnnnnnnnnnnnnnnnnnnnnnnnnannnnnnnnnnnnnnnnnnnnnnnnnnnnnnnnnnnncnnnnnnnntnnnnnnnnnnnannnnnnnnnnnnnnnnnntnnnnnnnnnnnnnnnnnnnnnnnnnnnnnnnnnnnnnnnnnncnnnnnnaannnnnnnnnnnnnnnnnnntnnnnnnnnnnnnnnnnnnnnnnccnnnnnnnnnnnnnnnnnnnnnnnnnnccnnnnnnannnnncccnnnnnnnnnnnnnnnnnnnaannnnnnnnnnnnnnnnnnnnnnnnnnnnnnnnnnnnnatannnnnnnnnnnnnnnnntnnnnngnnnnnnnnnnntnnnnnnnnnnnntctnnnnnnnnnnnnnnnnnnnnnnnnntttnnnnnctnnnnnncnnnnnnnnnnnnnnnnnnncnnnnnnnnnnnnnnnnnnnnnnnnnnnnnnnnnnnnnnnnnnnnnnnnnnnnnnnnngnnccntgnnnnnnnnnnnnnnnnnnnnnnnnnntannnnnnnnnnnnnnncnnnnnnnnnnnnnnnnnnnnnnnnnnnnnnnnnncnnnnnnnnnnnnnnnnnnnnnnnnnnnnnnnnannnnnnnnnnnnnnnnnnnnncnnnnnnnnnnnnnnnnnnnnnnnnnnnnnnnnnnnnnnnnntcnnnnnnnnnnnnntnnnnnngnnnnnnnnnnnnnnnnnnnnnnnnnnnnnnnnnttt

SEQ ID NO: 2205 - DNA, 732 bp, Zea mays
cgtcgcgcttctattggctgttgccattctgtcctcactgtctccatgctacgaagccggcggctgtaggcgccttcgatctctacttctaagggcatgtacagtggtgtttaatgtgggggctcttaaggtgttttagggggttatttgcaaaaaaatcttagagccgtctctccgtgaagagacgcatctggctcgtaaaccaagtaacaacagacgtctcacttcccactgtacgaatttgtcgtctgttctatcgatctgatgctatacaaatacatttaattctgtatttattaatagactacgtttatagacactccattgtacaatagagtctcttagttgtctcctgtgcttggagaaccgtttttgtgtctctccactatacatgccctaattacttacgcaatactgtagttactatttcgttctaagagccggcgataattatctattaattaaccggccgatctcgtttggactgcgatgtgtgtgcaggcatcgggaaacccaagaagtcaccgccgccgccgagaaggccatacttctcgtcctattccgaggaccaccagaaggaccaccagaattgccgcttgatctgtagctccaagggtttcaaggacggtggctggtgtgacgaaagcgtcgagcacaaagtgtgctgctgctcccattagaaatataatagcgtatgttatgttgatgcatatatatatgcatcgtccatct

SEQ ID NO: 2206 - DNA, 430 bp, Zea mays
cgcgcgagcatccaagaactgtggctcctttccatggttcttctagcgtcgtcctctcttgtctgtgcaagcatggcggtagatggtaactttcttctgacgtgaatatatacatacatctagtgttcataattctaactgacagaagaagcgcgtgtaactcgattgaccatattgctagggcaaaccaaagaggacatcaacgcaacgaatgtgacgagcatgaacatgacgaggtcgtcgtcggcgagctacaacatgactggcggcggcggagaacttaacagaggtccgtgcgtcgtgagatctggattctactggtgccagaacattggctatccgaccatgtcggagtgcttgaagaactgcgaatcgtaaagcactggagtatagaaaaggaataaagtggtctctgctagcttaatttctc

SEQ ID NO: 2207 - DNA, 351 bp, Zea mays
cgcgctcggtcgcctgctcgagatcgtagaccgaggtgcgatggattagatctctgagattggaggtgcgtgggctgatggaaagctggggtggagccgttgctctgcgtggattttgttttctagctgctgccgggatcacagtgacgagatcctgccatttcatgtgcttattgtatcatgcctcgaatctttgcatatgtcaggcgcttatagcaactcattcttattttaatgtggttttccatattttgtttgtagttttccatcctttgttttggctaagtagtttaactatccaactagcggctaccatgacgagggcagctatacctgtgccaaatttcaagt

SEQ ID NO: 2208 - DNA, 313 bp, Zea mays
gagctctcgattgccgcagcttctggaaggccggcgcgtacgaagcccccactgctccgaccagggagttccaaggtccatcgcctcctcgaattccgccctcctcccgcgtcgccgctcgctgacggtgctgtattgtggccgcagatgtccttgagacgggagacttcgaccgcgcgcgcgtgcaccccaagttcctccacaccaacgccacctcccacaagtgggctttcggaggttcgtgatgccttcggatggttcaatcttattggtgttaccttattagggcaaccgttagggcaaagaagagaaa

SEQ ID NO: 2209 - DNA, 252 bp, Zea mays
tgatacaaatgcttcaatctgccttgaagccagcaaaatcctcctagtgattagggctgtggtagattgggctgatctgtctatcagttggccgctccctattttctttttggcagcttgttaagaggataagttttatttctggttgctgtcatggtctagtttttttctttgtctgtttttttgccttgtttgggcattgtatttggtccattttggacttttctttctcttaatacaatgatgcgcagc

SEQ ID NO: 2210 - DNA, 671 bp, Zea mays
ttcttcttgctatttcagaatggcgcagccggaaaagaggcaacttgatgtaaaaacacaagagttgatcccatatctcattctaaattgacctacttcctagttgatacacgatccatataaaatttctcgaatataagtcttattcttctagaagtagccaagtaagtaaaggtggtctactaatacaaatgccaaatattagccaagtaagtaaatgtggtctactgatacaaatgccaaatatttcaacctcagtcttatagaggcaaatgatttgattattttttttcatcaaaatgtcacaccaccaccatcatttctctgaatttggagtacacggacaaatatatatttactctgtttcctcttgcaccatgcaggcattccacccctcttttatctggagatgagaatgttggcagcatgtctaccaaggcgtaacggcaaatgttgcatacttgcatgaagggatcggattttctctcatcaagggaataaagattaaagaatgaatacttgctctccaaattgcaggccttcaattcggtcgtttaatttcaagccagctgaaatgttcattgttttcacacattcttatgttttcattggaatttcattcccacttgtcctgttcctagcttgaaatgtacatgtgaatacaaaaaaaa

SEQ ID NO: 2211 - DNA, 390 bp, Zea mays
cagcctacctcgctcagatccgcgccgccggaccgccagatctaacccatgaacgtctcgcctactcgcggccgcctccttccttcccaccaaaaccccgttaaaaaaaactctccctctggcgaccgaaaatcactcgccgctgtcgccgtcgccgcgcctcccggaccaagtacccgtcctgcctctgaaggcgttccccgaaaggggaacagagcgggggtaaatcccaggcaaccgccaagcgggaagcgccaggaggaggaggtaacgcggcggggtagtccggaagtggccggcggcggggaggaggggcggacggtggaggggcagcagccggaggagagggagctggaggagggacggggaaggggatggggcgagagagac

SEQ ID NO: 2212 - DNA, 318 bp, Zea mays
tctgtacagccaagacggcaacgacacgaaagcaagctcctgcaagcacgacgccctgtacacgctgtacaacctctcgagccaccaggccagcgtgccggcgcttctagccgcgggcatcgtggacgctctccactgcctcgtcacggagtctccagggtcggaggaggggcttgggtggacagagaaggctctggcggtgctcatcagcctcgcggccacccaagctggccggaaggagatcatgtccacccccggcttggtcagcacgctggcgatgctgctggacacgggcgagtcgacggagcaggagcaggc

SEQ ID NO: 2213 - DNA, 613 bp, Zea mays
atcctgaatgacacccaactatagggaggtgtttggtttgatgaatcactctatgtaaaatgaagtgatgcatcatgggtcttgggtccatttctcaaatttggtgggatgactccatttcacatattagtactaaacaactaactatgatgaatgaggtggtgatggattaagtcactccatttcacaaaccaaacaaaaaagtgaggagagagaagatgatagactacatcattcctcaaaccaaacactccatagttgttttcttccattctttttctttgaatggtgaatttgtgaaactgtaatgtgaaactgtaattaacataaattcataacctcctattgtcttccttttgaagaaaacgcctctgttatccattgatttttttttacatgtctttcatggccgctaaggaaatattttgtcagcattgtctttatatttagtttctgctgcaggtgttctcgggggagggagtattcctgctgcaggacgacagctggacggaattttggaatacaccggcagagtagctgaaataacggctaggaatttctgagaaatttcatgttagggaaccaacgatgctgtttaatagaattggctgta

SEQ ID NO: 2214 - DNA, 599 bp, Zea mays
ctccctctcctccctgcccaatttcaccatcttcagttgccactggggccggttccattatccaatcccctgtctccctcactgattccttggcatccatggctaacaaaggagatggtttccctgacttttttcttagtgtccttctgcctcgcctcggctaactgccaagccaatgatgtctctaacgatgtaccacttttttctcaatcttgtttcactggtaggtcatcggcagcagggaatagccaccaaaactttgatctcaactcctaggaagaaagctttcccttccttggttcatacactggattctttcaacaggattttggggtcgctgagcatggaatgcctacattgacccatataggctgatctcgtcccgacacttttaatcatcctcgttttggtgatggtagtgctcgagctctccatagcagttcacgttccagcaattgtcatggtagctcattacacattggagcctagtccagtaggcaaaccttgaggttgtgcttgcaaactggttccaagttccttctctagagatgggagtccgagggcgtgggcgatttaggccaatggaccatatctcagaa

SEQ ID NO: 2215 - DNA, 708 bp, Zea mays
cattgctcgcggtataacatcatttgtcttctttcctattttattgtcctttcccttttgtgctgcaagttttaaccttttccatggtacctgtcatgctagtcatctgggaaagcattgcggaaggataaaccttcacaagatgtagaagaaacctctgttaaagaatcaaaaccatcagctggtactttgacattttcctctcattttcaggcttttatttgtgatatgtggtagctccttgcgtggatagttgattactgcctcttttttttcttcctgttctgtacaatagcaattttgccagaatgttctgatgatcagtcttttggtagttgacttaattttattagaaatagtaataatgttagtttgctgaatattaccctcccatattgaactggaaaatggaagttttagtgtgaagtacatttttttcatgtttgacagtttgagacatttacaccctgtactcttccaggtgaagatgattcgtcaaaaatatgttataaatgcaaaaaggctggacatctttctcgcgattgcccagaaagcacatctgaggtggaccgaaatgatggcagtattagtagaagcagagacgatacgggtaccaatactgctcctgctggtggcaacagtcctatggacgaagacgatgttcaagaaattggtgatgaagagaaagaaaagttgattgacttggac

SEQ ID NO: 2216 - DNA, 419 bp, Zea mays
gagaggctcggctgccaggtgcttccagttccatcggccgcccgctgcctcagccttctactggggagcgccaccgccaccggcggcggcgatcagccgtcattccagtccccgtacttggtactgcaggcggtgcttgtagacctccacacacctgccgcagctatcgctgacgccgccactgcaatggatgatgggtttgaggttgccctcaggatccgggaggtcaccggcgacaggttcagctggctgctcatacttgtcgcgctgccactgccgccgagagcgagccgcatcgacgttcgcgacgtgtgcaagcggacgggagtgaatggcgtgatctacaaacccatcagtccatcacgctgccagcgctggcagctgagctttacagggttctccaaaacgacaactgaccg

SEQ ID NO: 2217 - DNA, 408 bp, Zea mays
gtcggcggtgccccttcctgatgccagaacgctcctctacgctggtaaccactggattggcaggacatcggacggccggctttgtttcttcgtgatcagggagcagcttactctcgccacctgggttctccaagcacctgggaagtgggtggagcagcaacccgtggacctgcgcacgctgatgcacccggcgtttatgggtgatctcgcccacatgaagctctcggcgaagatgtcggaccagctccgtggcttcaaacttgtgagcttcgcagcgttctgtgagggtacatgcacgctgttctttgtcatggcagattgggttgtgatgctcgaccctaggacgaggagactgctgaggctgtggcgcaacagtgatgagtcgcggccattgggtgatgtataccc

SEQ ID NO: 2218 - DNA, 556 bp, Zea mays
ggaagcagaagcaagagctcatggattatgtcactcaaccagcagtgacacatgtatgtatacgtgaacaatttattccctttacaacataatatttatgcatatactagtgtagtatagcttcttgtgtaataggccaaatttcatgtagatctgaataattttttatgattataagtttttttaacaaactggcatagttgtgtctaaagcctccctatcctacttcctatttcaaactcccacatacacaccttgctggaaacaatgttttgcactcccacatacatgccttgctgaagatggtctgatagagaaagggcgatttctttcgtgatattatctatacgtaatttgacctgctgtcttttctcttctcacagacgtcacgtgattcgccagcaactcattcacccgcaactcctgagagtaatccgtttggagccaagctctccaacaagtggcggtaacattttggtggcgtacgtccctattttgttagggcttattgcctgttctggcatcagcacgacgtaactagcttttgccacaagct

SEQ ID NO: 2219 - DNA, 345 bp, Zea mays
  misc_feature (11)..(14): n is a, c, g, or t
cgacaactaannnnaaacggagagagtatatagcagaaggtaaaaagtgcggagaaaaaaaactacaactaatggacaagagattatcttcctagttctacttctacacttcctactcctgacgagtcctaacagttgcctagctataagtgtaacctagctctctctccatggatccttggcaatggcagactccacgaagaaaaaagaaaagctggccgggcgccggagctcagtcgtgccagcagaggagcatgacgatgcaccgccggatgatgtacagcctggacctctgctctttcagggctctggccaccttccccttctgcttgctcgggctcatgg

SEQ ID NO: 2220 - DNA, 241 bp, Zea mays
tgcgtcgcacacagtttatggtacaagcagcatacttttttaaccagatcttcaagattggattgcgtgtatttgagatctagcatagattaataaaataaaactaataatcatgcaaaagaattgctatgcctatctccaggtttccctcctccatgtcgatgccttcattcaccagacccatgctgaacaacctgcaaagggcaacagccagccacgccatcagaaccaagggaaagga

SEQ ID NO: 2221 - DNA, 1083 bp, Zea mays
ggtgtccagagccatgggaggcatcaagtctgctgaggaggtgcgctgccactatgaagatcttgactatgacgtcaagatgattgaatcaggccacgtgccgtaccccaagtacaagacacatggattctggacctgaggtaatgtctctgacacttcgaaagcaaactggaaacaaataacataagagctgcgttctgtattgataagatttttgttaactagtacatgctagttggtgatagtaacaggaagcaggcctcgagcaaagcataattcagtcaccataccatatttttatgagtagttcaacatgcatggctatgtcattgacggctcaagtattcagtattcacacactcgagcatctgattattttatgttctttagctgttccatgcataagtgatctcatcaacaatgtataggccaacctgcagagtgcagacatcctttcctttcgtactcagaaaaagaatctgggtctaattacttggtgtttgtccactaattatgtgggctccaattctagtactacgacaaaaatctcctactcccaatagaaaagtttggaccttacagtctattccctcgtgcatccagcttgcatccgacatgcagttctcatattacaccaaaagacaacttatgccaaaagggcatctccatggccttttttagcagtgtgagtaggcaagctttgggtagttctttgcttcctttattttcctttccttttattttattttcaagtaggtgatttctggtaagcagggcttactacagctgtagaagcagctgcaaccgtatccgtataaacagatatcacatatggtacaaaacagaattaatgtttacaattccgagaaacttatggtgtgcagattaacttttgctttcaggttgaaatgttggagggctcaaggaggcagaaaacaaagctctatgaatctaagatggacctaggttctagaaggaagcaaagaaatccagccatggttggaaaataaaatgatgaaacagtgtgcatatgtatagtataggttatgagcaagtttatgtttacctgtggttgtaggatct

SEQ ID NO: 2222 - DNA, 490 bp, Zea mays
tcttttttttctgtccggccatggatttcctcggcaccattcctttgattcgagtgggggggttcggcctcaagccagcatgagtcagtgacctccctgctcggccatggctgcgccatgagcatctagtgcccctccccctcgacctccctgcttggcaagtgtctagccgacgcccaactcggcctcgtcgtcggccttgcccagcagcgacagtccgccccggcactcaccagtgccaagatccactgcgccctctccttccttgaagccgtggtgcttggtggcctcgccttggcgctcgacacccccaatggctgagcagacccctcgctccctcaggtcagcgccctccctgactcttctccatggtgtgctcagctctcccatccgtggacagtaccaccccctccctccacttcggttgaagcataaacaactcccctgctcctcctcgccggtacgccattaagcctgcagcagcagcctc

SEQ ID NO: 2223 - DNA, 589 bp, Zea mays
cgctgcaacggtcgcctagtaagacaggtttgtcggcagttcgctccgcctgagcttacaatttgcccatttggggaaagtggcaactggtgtctaatctaaaccttttgcgtttaacagtacaaggagtcagatctgtacaggcaactatcatacttttgttatgtacttgatgcaacccggtgtcttgaaaaggttacgcatcaatctgaccatgtacttttttaccttttcttataatccaacttatgtcatagctgacagttaactgcttttgtatgtagctggaccagaaggcaaggctccccttcgagagagagtttgtagcagtaggccaaacaattaaattggcactgctagagatccagaaaatccgagacagatgtgcatttggatgggttcagctaaaggaccttgccgtatcaatatgatgtttttcttgtgtgaaagggctcaattagataagtttgaattaaccgtgcaagaaattcatctctctgtaggttattctagatctcgttggtaaaaggaacaggacacggcaaacggtgtatcgaaacaccagccgtctttggtatttccctgcgtg

SEQ ID NO: 2224 - DNA, 401 bp, Zea mays
gacgcgcgcacgtcgccagcgggcttgtgcgccgccacctgtggtgctaagctgtcacggcatatgacagcgacaacggggcaagcaagtggcggagatccacctttcgcgcaaccgtaaccgcccctccccgacacctacgacgttgccaaggaggccgtgcacgcccacgacggcgccgtgacccaactccgtgggggcctcgacagacccaattcccctgagctcagcggccgacgccaagctccacaccaactgcagctgcacagcggccgacgccaactgcagctgcacagacgtcgtcacgccgctgccgcgaatccagaaccaccgccacgccacggccttgacggccacagccaccccgagctccttccccacagtgagcccacacaccaaga

SEQ ID NO: 2225 - DNA, 398 bp, Zea mays
agcgcaccgtccctgcaaagcggtgagcgcccctgaaccggctaactgcccctgaaccgagcatgtgtttccatgctgtcagctgcgaggagtagtaatcgaccaagggtagtccacgaatagttgcatcgagaataaacattagtctcttgattgatgttaccacgacacgaatcataggagaataaacattagtcttcgctcagctgactcactatacgattgcagactgactgattggccaatcaatcagagcaatcggttctggccggcatggcctgcaggcttggcggaagcgctagctagccttctctggttcgagttggcttatgcgagagcggacaaccgtagagagcggacaacgggagtggtctgaatatttttgtttggtcacaaga

SEQ ID NO: 2226 - DNA, 497 bp, Zea mays
tgtgcttgctttacccattcggtggtgaggcgttggtggcgcccgcggccgcggccacgctcgatagggcgtcggccggtgacgagctcgacgaggaggacgccgaaggagtagacgtcgctgcggtcggtgagctggcttgtgcgcaggtactcagggtccacgtatccggccgttccctttactagcgttgacacgtgggtcgcttcagggttttcgggggctaggcgcgcgaagccaaaatcggcaacctttgctcgcaggtgctctgttaggagaatgttggacgacttaatgtctcggtggatgattggatgatctgcttcccatcgtaggaaaatatttgtcagacataaggatgctgaaggtttggtatccgcagtagatgtcaatacatagacatgttggtggctgtcatacaaaattctgatcatggaactgagatggtgattttcatgatggttgtctcatctagggaactgatactgaaatgtacc

SEQ ID NO: 2227 - DNA, 303 bp, Zea mays
cctcaacatcggatttcagaacctgcaacaagacattgacgccatgatgagatcttctcaaggacaaacggctcagtttatccttacaaaaaataaagtgtttgtaaaacagagaaattgcttcatttcttggtgaactttcatccagaaaattattgatgtggctaggttgctggtagaataaacaaaatacctcatgcctcagtttcatcttggcatgagctgtcgatagacgaattatggtttccagtgtccttgctgtaattggaagtgtacctccaccggactgtaaaatacgcaggt

SEQ ID NO: 2228 - DNA, 424 bp, Zea mays
  misc_feature (415)..(419): n is a, c, g, or t
tgtctgtgaggaaagtgatgcttttgtggctaacaacattgggaacatggccaaaattctggctgggcaaaggtaatgcatcttttgtaactgttcttatgcttaactgctgttaacttgttaactcaaccccccctctcctgatcatctatctctgcaggagatattttggacacaagagaacaatccggccaaatgctaaacagctctatcccttattcatgaagaggggaaatatgtcatgggatgcatttgcctcacaggtgcgaacaatccagaaaggatatatgggagagcccatggaaatcacaccaggaagaggcgaatttcatgcaaaccctgccgcctgtatatgtgaaaagaccagcagaaactcagcaatagtcaagtccatttctggaaataacctggaacnnnnnactga

SEQ ID NO: 2229 - DNA, 208 bp, Zea mays
gggtgcccctttactgggcttgcccctgaatgtgatgttgcaaatttcagatgcataagtcagaaactgttgtccttgtgcgaacttttctgtataaattgaatttaccgctctcagttagcatgcacattcaaatccactgttccttttcaaccacatagtgaaccaaaacactctcatcactgagcgatatatgattctatccata

SEQ ID NO: 2230 - DNA, 463 bp, Zea mays
tggccatcgatccccgagacaccgacactgtagcgtcgacagtcgccacgctcccacgggtctgccacccagccatgagcgacgtcgcgttcttcttcaggtcggccttggtccagatcgacgccggggtcaccaccgtgctgttgagcacgtcgacgaggatggtgttgtaccacactgccgcgcgctggctggtgttgttggcggcgagggtgaaggtgagattcgcacctccattgcccaccaacaggtggctcctaggattggttacggagaagaaaatgcgtgcagggctcagcaggacggagaagacggtgacgacgaccgccacggcgaggatcgccatcagagctgccaggatgtagtgtttgagattcagggccttcaggccagtccgcggcggagccatgcgtatatgggtgtggcagcagcagcagctctagccagagcgtatggtggttca

SEQ ID NO: 2231 - DNA, 355 bp, Zea mays
tcctcctccgatatctcgtctcccatcctacggcggagccctcggggacaaccacgagtgcctaagatcccgtcctctgcgttgaccatcgagggatcgccatggcgttgagggcgtcccccgtgtcgcatcgcatggcgccgaccgccgagggccgaggcagcgccactgccgctgttcgcgcggaggaggatggcccgtggggtgtaagtggccatggcgtccaccaccatcaacaggtgagcacagtggatccctcgcctctcgctgtcttcctgacctacagttcgaggcaagtcgcggcgccgtcgaccccttcgcgggtgccagagttacttggacttggattatgcct

SEQ ID NO: 2232 - DNA, 500 bp, Zea mays
  misc_feature (492)..(495): n is a, c, g, or t
agatagagagagctcagagaggcaaataagagcgcgcgcgagagagagctgcggattaattatcaaaacccggccgcttccatggagagagttgcatcaagctgctgcgtcagcctcctagcacaaaggtcagttgccacaccatgaagcttcaatttaatttaatttaatttgtttgtttgtttcctacacacatgatgctccctgcagcaggagggcctacactatggccgcggccatggctaagaagggagccgccgcacggagggtcgacgagaagaaggcggcggccgcgctgaccaagcgcgtgatgggcaagaaggaagtgaacacggctgccgctgcggcagctgaggagaaggcgtgggtgccggaccctgtcaccggctactatcgcccagcaggtagcgccaaggaggttgacgcggcggagctacgcgccaagctgctgacggaggctgcggccaactgattaatcaagcagtcactttnnnnaccta

SEQ ID NO: 2233 - DNA, 443 bp, Zea mays
cacttggtgggtgcgttggcttaccatctccccaagtgggagagtggacgtcataatttgtggtagagggggtacgcgttcgcgcggcccctgccaattctaagtaattttgaagttttttcttgatctagatcagggtttctgatccataaattcgaaactttggtacaaatttcatgtaattctgaaatttttttttacatatctgggttcctgatctatgaagtctggctgccttcgcctgctcggcccctgccagtaggggccaattcgtgtaataatgaagttgctgtggagtttgtttgtttcttgggctagatctgggttcttatccatgtagtctaaactttgtttcataagctgtcacgctgcagtctggtccacgtcacaagaagcgagagcaacatagaccgtcgagggaaactattggtgcaccgtaattc

SEQ ID NO: 2234 - DNA, 402 bp, Zea mays
tttttggtcttttctgtttttctggctatttgtttggttttctgatggatcgattgctctccgatgatgattaaaaattactttcgttcttctgaagttcgcaatgtggaagaacaatttggagacctgaactgaggggagtttttctcggtctattcctggttttcttgtatattttattttttctttcttgctggtttatccggatgaatcagcgctcttcggaaatccctgtgaagacctgtgatgttaaagtagtggcctgatttacatctttgatgagcagtattattatcacgcagagggatctgagtctgatttattcttcttcagtttatttttaatttttatttcctctgttattttttttcttttttgtgccatcacccgatgaatgtacat

SEQ ID NO: 2235 - DNA, 378 bp, Zea mays
aggagaacgtggatgaaggtgcacgagatgcgtctgagatcttccggtacatagaccatgtccgaacatatcctaccataatgtttggaggaattgagggctctcaagtctgcactgtggcctttcagcgggtgtgactgaaagctgaggcacgcatagttcttggcctaacgtgtcacgttgggtccagaagaaatggataaaaaaattttgtgcttcgcctgtgggactgttcctaccgtattaaggaacagtccaaactgtgtcttcttctgttgttagcgtattaaggaacagtccaaactgtgtcttctgttgttagctcatctatccaggatggtcgtgtaattttagatggaccagactatgagacgaatc

SEQ ID NO: 2236 - DNA, 766 bp, Zea mays
  misc_feature (708)..(709): n is a, c, g, or t
  misc_feature (728)..(728): n is a, c, g, or t
  misc_feature (741)..(743): n is a, c, g, or t
  misc_feature (753)..(753): n is a, c, g, or t
  misc_feature (758)..(760): n is a, c, g, or t
catgtaacctgtgcggtaagatttgcaacatcgtttcccaattttgcctggtctgtaaccctagcttcactgtctcctgtccgtggctccatggatgcggcggctgagctttgtgcgtgtgctctgaagtgctccgctgccgttgatgcagctcctgacaccgtaagtgcttcgtttacggcggcggttgtagctgatgacttctgtgccacatattctcgaggtgacgaagttgtttctccatatgatgttcttcaaactgctgttgcgacggaggaaaagctaatggtaagtttggttggagagtcaaatagaacagagtgactctattccagtatttgagaatgaagtcgttctatttcacgtttggcaaaaagaacagagttgttccattttttgtttggttgaagagtaaaaaatagagcggagctgttccattctttgtttgattcgagagccatatgggtgtagaggggaggagaggaatgagagcgctcacgttcaggagagcgctcgcatccgatcgtttttatggagcgggagcgttacaactatttacagtaaatttccatatggagattcaggagtcgctccactcttattttgttggaaaccaaacatctagaaaatttaaatggagtcattctattctccccgctcctcaaccaaacgcaccctaagtgtgcattcaatcacgcttgtgccgcnngtcgtgtgtggtgaggagncgttggcatcccnnnagtaaggttngcatnnngctact

SEQ ID NO: 2237 - DNA, 230 bp, Zea mays
cgtctctcccttccccgtcccccatcagcgtctagcagcccagccgacgaccgaaggcactttcccactcttgcgtcttgcctcgcgcgcctcatcggctccttttaatcactcttaggttcatgtaacagttaattagctctaggtaaccgtcagccgttcactagctacgtactactactacttctgcaagtacaaccccctcgttcccatgttaaccctccttgcct

SEQ ID NO: 2238 - DNA, 359 bp, Zea mays
  misc_feature (300)..(301): n is a, c, g, or t
  misc_feature (325)..(330): n is a, c, g, or t
  misc_feature (338)..(338): n is a, c, g, or t
tcccttttgctccttcggaatcagaacctgatcccggggtcacaccaggctggcggcactgcgagcctgctcgattcgattagggtgggttactggtgagggcgtgaggcagtggcaacctggtcctggatggcatggccgaccggcgtggtgggcgactcggtgtccaggatccccggcgagctctggctgtggctggacgtggagcctgctggtgctggctgctgtggctggacgtggagccctggctgctggctgcctggctgtggcagtgcggctggacgtggagctggatccagnnatacgacgcctaggcttattccgnnnnnnactttgcnaccctcctcaagcgacaccaa

SEQ ID NO: 2239 - DNA, 336 bp, Zea mays
ctgtagaagatggtggagcgggagtgccagaaggagctccacagcgtggttgacgacctggaggaagctggccgataagaggtaatgttctggtgctctgcgtagcagtgctagaagttttcttgtgatcgtccatttgcaatcaaacaaaggtcgtgaggatgcaaggccttgaataacatcactagcaccaggttccctagacattcaaagagatggtggcttgataacagtgacaggtatttgtgaagggtcgtggaatggaaatggatcatgaaaaaataaaatgtgtatgcctctcaaagcaatgttgtatcatggatcacctgtcatact

SEQ ID NO: 2240 - DNA, 389 bp, Zea mays
attcatgcacacataataagtggtaatcaatgaatttgatatattctttattgcggcaaattaaaattatatatacatgtataatattgattctaacaatattgttggtaatttgaatgatctttattaggggaaactgaagaggttagcatcacagggagcccgacagtgatggtcatgatgggggcaaaccgaaagataattgaagataataaaaatttattgtgctatctaagggctctagagtactgctgtgcgaggaccagacaatgctacgatgacataaagaagtgcttggagcattgccgtggttgaaaggtgtaataaaggatatgctttctttggatcttagttggtgatcagaaaaatgttctaccaattcatgcatg

SEQ ID NO: 2241 - DNA, 475 bp, Zea mays
cagtcgtcctcctagcctgctggacgctagttctctaccaaccagtgcttggccgtttaccgtgtaacaatgatcagaagagagagatcctgcgcgagtgtgatccactgaactcaacacctgactatactccatcccggcacggtgcgtgctgcgtggcggtgagaaaggtgccaggaaccaacatgctttgcattgcctccatactctcacttgctgacaaggccaaatacagtgtaaggaagattctaggatttagagatgcatgcgccccttcacatccacaccatcaggtagttaatactcgttctatcacttgacagtccttagactacagtggagtgtccttgtaataagctaacaagtattaatcttgttatgtgaggcaggtcatggcctaaaagagcgtagctgccagcctgccatcgcttatggaatcatcgtccaaacatgatgttgaaatgagatgtatctc

SEQ ID NO: 2242 - DNA, 387 bp, Zea mays
tgagacgtcactagcagcaagcacgccaccgcgccgagagagacggccgggccgtgaccgggctggactgtccactggttttcaatttcatgcgcatgcagcgacacctcccgcccactcgccctcgcccagtgcgctgcagcagccgaattcctgtggaaaacctcgcccgcttcaggtagcggccgtccaagatggagacggtgacctcctcccgtcggcgcggtacagccagggtcaggtaccttgcaggacgcttcgtttgtgcgtggttattatccgttcacgccccctcaacttggagcgtgcgccgccggtcaccgcagtttcctcctgcgcatattctggcactagctgtatttgactctgggtctgggatgtatatat

SEQ ID NO: 2243 - DNA, 777 bp, Zea mays
atacagcagcatgtactagctagtacaggtaccgtagccctcatgcatgctcttctctctatgcatggctatatatgtgcagcctgcgtgatcatcgactgcggcctgggcgagtgcaggaagggccagggcttcagctacacctgtgagtgccagccgggatacgtcaacttcctcgaccaaacctacctcccctgcgtcaagaactgtatgtggccgatacatctgctcgccatttgagctatactactttttaatttgccacgccgcgtacgtcgtgtatattcctaaaccttgattaataataataataaaaatactgctctcaggttccttcggctcggactgctcgaagcaggggatcgccccgccgccggcgccgccgccttccacagcgtctccacccgcacacggtaatcacacgattcgtcgtcggccccaatgcaaacggcaatttttcatttcgtcgcgcaccagctcgtaatcctaacacacacagttttcacgagttctgtgtgccattcatcgtcattaatttaccagttaccacatatatacacacatgacgacccaacacaaagtttcttaataattggatttacgtacgtactgatcaattgatcatctgtactgcgtgtgtgtgtgcaggttctgtttcgtcgtggcgcctactgcagctgctgctcccgcacgccatcctcctcctcctcctcctctaggtcgtgtagctacatacaacgacgcgcgagggcggccgatcgagcgcactgtacatgt

SEQ ID NO: 2244 - DNA, 397 bp, Zea mays
aaggtggcgacgccgcaggtggccgtcctcctgctgctcctcatcgtcgttgcgcgtacgtcgccatcactatagctacaccactaacatatatgtacacacgcacacatcatcatgaatacaataatatgcgtacgtactatatgtgtgcatgcatgcagaggaggcggcgccgttggcggaggcgcgcgtgtgccggcgccggagcgcgggcttcaagggggtctgcatgtccgaccacaactgcgcgcaggtgtgcttgcaggagggctacggcggcggcaactgcgacggcatcatgcgccagtgcaagtgcatcagggagtgctagctagctagcagctataccggcctttaattaaattaataaggatcgacgtcgcggccggtcgctaaa

SEQ ID NO: 2245 - DNA, 395 bp, Zea mays
ctctcttcgttcccgtcgtagcgtccctcttccacctcttctctccccgcttccttgtcaaaatcgattcatcacccattgctttcgtccttactgcagtgtccatttttggttgtttggtgaaatttgtcgctatcttcgtcgcctctagttcgtcgtccatttcttaaagttcaaataggcctgctttgtccccttttttctcccgtcccgaggtacgcgattgcagcaaatccggcttcctccgcttcagatctccttcaatcgtcgtcttccacttcgcgtttccctctccgtactcatatggctttgtctgcatgaatgctttactggtcgcgaagccctttgttttctctagtttgcagttcgcatagctgcctccttgggatctaagg

SEQ ID NO: 2246 - DNA, 424 bp, Zea mays
  misc_feature (343)..(346): n is a, c, g, or t
  misc_feature (354)..(363): n is a, c, g, or t
  misc_feature (374)..(380): n is a, c, g, or t
  misc_feature (384)..(398): n is a, c, g, or t
tagcactgacacaacaggacctgcaggggaagcgggtgagtggcagcggctgcacgaggtgccggtccggcacctccaccggtacaagaccatcgcgcacgtcggcggcgtgaggagcccgttgtcggacccggactacagcgacacggacgacaccgagccgctgtcgttgcagactaggcacctgataccgccggcgaagcagcggagcctcgacaccgagcgcgcggaggtgcgcgtgaacgtcgtagagacagcggcggcgccaagcgacgtcctccaagacagcttctcgttcccaaggctgcttcctcctcgccatgtgccggacaagtaaagtggnnnncagtctannnnnnnnnnattgattttannnnnnngttnnnnnnnnnnnnnnngaaaaaaatagatgaaacattttttt

SEQ ID NO: 2247 - DNA, 482 bp, Zea mays
ccggtaccaactctaaaaggtattaaattctttgtgcgtatatatggtttgctttagtccttattacttgtaattttgaaatgatacatgatttgttttaattctattttattatttaacttctacctgacaataaatctatattctttagttctacaatgagtatgtcattacgagatcatattagaaagaggagggaagaagaagatgatgacatgatgttgtttattttccctgccttatatctgatgggttcaactagaagtgggggacaaaagaagaaacgccatacatcagatgagacaactccgtatgtgtattgtcaagtattgggaagacaactccgtaggtgtgaccattgttattactgtatttgcttatgtagctgattacttatatatctgtttcttggcgagtatgcgtgaacaattgcaagtctttttgttattactgtatgtattaaattgatttgaacagattga

SEQ ID NO: 2248 - DNA, 396 bp, Zea mays
tgctctgggcgtcccgcgccgccgcctacctcaggatctccaccttccccagggccttctccaccggtacgcccgccaccccccatcctctgtctccggcgccctggttcctcggatcacggctcctcgcggttggtacggcgccaccttgtgtcgtttcgcgcgcgtataaatcccgactcgcggttggtactgttcctgatttgggccgtggctctgcgctccatcagacggcgcatacgttcagggatggggggtttacaacggggtttagccgccgccgctccttattaacagcgtgtgtgtgaaagagaagaaaaaaaaatcttgtatttacagtgctaatgtgtttggaagatcgatttccccagatttatttgtgttagattagatgtg

SEQ ID NO: 2249 - DNA, 614 bp, Zea mays
acactcccatgtccagaccatgcatgccacctgggcccagccccagctctctgcttctctcacgtaggtgcagcaccgctgcatctctctccctcacgctgctctcacttgagtgccggcagcctgccctctgcggatctgtggctctgctccttccctctctcttgctgctccctcagatggatctctgttgtgttcccctcctggatcagccgccaccgctgcagatgatccaggcggtgctgcgcgctgtccccccacacatggtttggtggggatgagaggggaggtggctcaattgtcttcctggttggttccataccgttttcctctgtttcaactccgatctttttagatctctcactacttttggctaggtgacgggacaccttactccatgtgagtgcctcatcacataggcgtctgatgcctttgaaacactgagctgctgtacttgaacactaacagggtatcctacctacccttaggagtgtttgtttgggattataatctgcccagattatataatccaacaacttttgaactaagggtctgttgtttgtcttctagattatataagttggattatagtggaaggataagatggtaaaata

SEQ ID NO: 2250 - DNA, 302 bp, Zea mays
tgcatgctactcctttttctttgcatgcgtgctgcatgctacttttctctatctttttttttaatttctctcacgccgctgttttactctccctctatgtttctgttttggccggcgacgttttttttaatagcaacacaagaaaactaagacagcagagcagaccgctggaaaaaaaggtcggtctcttgaccgtcttctacatttgaactcggatctgattattcgagcttttctgtgatgttattttagtcctgaggccctatggatgcgtctatagtgctctgcgcacttgatccgat

SEQ ID NO: 2251 - DNA, 302 bp, Zea mays
  misc_feature (120)..(128): n is a, c, g, or t
  misc_feature (144)..(144): n is a, c, g, or t
  misc_feature (179)..(179): n is a, c, g, or t
tgcatgctactcctttttctttgcatgcgtgctgcatgctacttttctctatctttttttttaatttctctcacgccgctgttttactctccctctatgtttctgttttggccggcgacnnnnnnnnnaatagcaacacaaganaactaagacagcagagcagaccgctggaaaaaaangtcggtctcttgaccgtcttctacatttgaactcggatctgattattcgagcttttctgtgatgttattttagtcctgaggccctatggatgcgtctatagtgctctgcgcacttgatccgat

SEQ ID NO: 2252 - DNA, 609 bp, Zea mays
  misc_feature (235)..(238): n is a, c, g, or t
gtgtacaacttacatgaaatgtttagtaacaatttgtgggaaatctagcaaactgatgctacaacaacctcagcaaacaattagtaaacaaagacgagtgtcatttctcttccatcaatgccaaacaggacttactggatatgcatccttatcatgcatgttcaggatagatctgttgttggactcacagtgtttcttcagttcatctccacaattccatcgtcgttacgcaacnnnnacacatgcaattgccaaaactcatttggtcaattgtttgttctaactgtttgagtaacgatggaattgtggagatgaactgaagaaacactgtgagtccaacaacagatctatcctgaacatgcatgataaggatgcatatccagtaagtcctgtttggcattgatggaagagaaatgacactcgtctttgtttactaattgtttgctgaggttgttgtagcatcagtttgctagatttcccacaaattgttactaaacatttcatgtaagttgtacacaccatgacttaattctctgtctgtttttgccaaaaccagttgtaatattagtggtctcaccggtcatccaagcagcaaattacattaaatgt

SEQ ID NO: 2253 - DNA, 415 bp, Zea mays
tagctcaacgtcgtggctgcagcctgacaattgcggaggttctggagcgaaagccaggattaaccatctgctgcaacgcctgcgacatgggctgcaggaacaagtgccatccagacattcgttttcttcagtagatgtgctgcaaaggctgcaacatgggctgcaggaaccagtgtcatccagagtccagacatttgtttccttaagtagatatgcaggattaagggtctgtttgtttcagtttatagatttatatgagattaaaggatctggattatataatctagattagattatttgggtgtagctgtttggcaacctagtttattgaaaaattcaattattgattttagtcatatgttgcgtggtgggagcaagaaaaaaatagatgaaacatttttttaggtaaggagtg

SEQ ID NO: 2254 - DNA, 451 bp, Zea mays
cgtgctgcatgaaggtggtgttgtcgcaaaggcgctgtcaaggaacgcggaggcctgggacagggcggcggtcatggctcattgcaggcgcgtcgcgggatacgtgcataaggtgatcgtggaaatgtctaaaggggaaggagttgttttgctaaacagagtttgtaaaaaaaaggtgtagcaagtcctataaagaagttacttccgtagaggagccggagatggagcctttttatgaggagctggagctctgcgaaatagacccttagtttaggacactgagtccttgttcgtttgtatcagattggagggtcgaaactatttctagccggattgtttctctaatttatataaactttgattagctggaacgattttaggtgtaatctgatgtaaacgaacaaggtctaagacaaatcagtgttggagatgcttatagcaagctacatgg

SEQ ID NO: 2255 - DNA, 567 bp, Zea mays
cctttgctccttgtgtcattccgtaagtgtatacaaattgttttgtactccatccgttcttttttatttgttagtgtagttcaaaaataaactagcgagccataaatatttgagactagaggtaggtaggcagtacaagtttgcaacagaagttagatttatatgagacaagctagtaaacttgtagcaagtgttacttcaatggagtatcgacgaatatatatacgtctatatgtactagcgattgcgattgctattgctatcagtacgatgatttgtttctgtggttccaggaatggatgcgactgcaaagctttgcagtacgacaatggagagactcatttgcggcggagcaagtcgaggcgacgtgaacagggcatgcgatgaaacgtgcagatccaagggctacacgggtggcggcttttgcaacatgaaaatacaacgctgtgtttgtcgcaagccgtgtgtccaggaggagcaaacagaggcgcgcgccagagacgaagcagccgacgctggagatatgatgagccagacgatggcagattgagtgatgcgcatgacaga

SEQ ID NO: 2256 - DNA, 270 bp, Zea mays
gtttgcacacaagacactgcggattccactcccagggaggcaccctccgtcgtcttaccagcagaatggttcatatgagagtgacgacaggtagctagactgaaattgtactgtacatcagcatgatgctacataaccatgctaccagtgtgtctcatgttgtgtgtttctgatcaagcattttttttgtgtgaagtgataaccactagttatttaagagtcaatagaaagttcaatcaggatatgcatgtcaaggtcaaggtcaggcta

SEQ ID NO: 2257 - DNA, 364 bp, Zea mays
ttcatcttcctccccaccctccttccctggtgcaggcgcagggagcagttccctggccgagctccattccagcagggacgcccaggtcccgacggcctctgcggcgagctccttcctccaagctggacgccaggcgagctccccttccggtcgccgctcctccctgcgaacctccccaacagggagcctttccccctgcgcgcaggatctcccaggcccgatctcggcgtgctccatgtccatggcgctgcagcagcttgggtttcacacgtggacgcccctctgcagctcgcccctctctgtccatggccgaaatcccctgtagaagctccccacggcgcccagaaattccgacagcaacata

SEQ ID NO: 2258 - DNA, 262 bp, Zea mays
aatattcttcatcagcatttttgtgcaaacatggaacaccggttgggtgcttgacatccttaacgcgctttctggtgcaacagctactccctaggaacttaagagcttgatcagcgggaacggcaggtccctaggccacattttttttggatgacgcaagggaagtagcttgaccgatgcgcacaccgtgtttttcctagcaggcttgtactttggggctatttatctgtgcccggacagggatgatgcttccattatacag

SEQ ID NO: 2259 - DNA, 331 bp, Zea mays
ctgctgcccttctccctggccggcgccctctcccatggccgccccctccctcagcttcgtcttcagccgccgccgaaccagggtgagctccccatgctcgctgccactcccatcccctccccctctctgctgatggtcgcacgccctagcatccgctcgcccctgcgcgcactcctcccccatggcgagctcgccctcaactccctaccatggtgctcgcccaggctcgccggcgtccatggccacagttccctagacgctgccagctctggctcgccggtctccaggctcgtcggagatggagtattacctccaagacctacaacctagt

SEQ ID NO: 2260 - DNA, 491 bp, Zea mays
gcgtcaatgcgaaaagtgcattggagttggtcgtaaattccctacgacacaactatgttgcaatgctataaaaagagctgatatggcttgcgtttgtcgtagcataacactagaagagcagctcacaataagcgtcatgaaggttgtggatgttgcaaaggaatgtggcaacccggtgccacctgggaataaatgtggaagtgagtacctaacactaatcttttgtttatttaaattactctactattatgttgtttacatcaaataagtattcaaaagcaagaaaccaagacaaactatattttgagcatatgtaacttggacaaactatataatttgatgaacttgtttatcagcttggactgttccaccacaactgctgggatgggtgcatccgtaagggttcaacaaagcgagcaacaaagggcgcatggataggagttcaacaatgaaagcaatcataggaaaatcttgagataaatgaatgaatg

SEQ ID NO: 2261 - DNA, 419 bp, Zea mays
gggcgacaggccgacagttctttgctcacgttggtggacgacgcggggctctgctctgttccgcggcgttcttcgcgcacatattcccctgaggagttggccttgggccttggcggattcggcgacggagcgccaatcctgtttgtggggtccaaccgctaagacgtgtaacacatgcctgcttctgaaggtctggtccgaaagacagctgtccaagcagcaggctgggttcatctcctgctgccgatttcggtctccatcgatcgattccttactccgaggtggtgtctacagattgttggagattcttccatgcagtagatggaaaaccaacccagtttttttcttttcttttcttttctttttagtcttcacgacattctcgtcgagctttcgcaggatttgtaatctaatcacct

SEQ ID NO: 2262 - DNA, 553 bp, Zea mays
  misc_feature (356)..(547): n is a, c, g, or t
gctgccccgtctcgacggaggggtactcgccccccgaggaggtgcgtgtctccgagctctagctccggccgtctggttgtctagttggccgcaagattgatcatctctcggggagagcgaagccgaatcgggcagttcggcgtacggttctggcggatctcacacttgcgcgcgcgttccggtgctcatgtcgagaaatccatgtgatgttcagacttgttgatcgatgctgtattgctgtttccatcccagaagattctccttttgtttacttcactgattagcgtggattctcccggggagccatgggcagataatttgttttcgaagtttttacgggatggttagaggcgtcnnnnnnnnnnnnnnnnnnnnnnnnnnnnnnnnnnnnnnnnnnnnnnnnnnnnnnnnnnnnnnnnnnnnnnnnnnnnnnnnnnnnnnnnnnnnnnnnnnnnnnnnnnnnnnnnnnnnnnnnnnnnnnnnnnnnnnnnnnnnnnnnnnnnnnnnnnnnnnnnnnnnnnnnnnnnnnnnnnnnnnnnnnnnnnnnagtgat

SEQ ID NO: 2263 - DNA, 470 bp, Zea mays
  misc_feature (389)..(390): n is a, c, g, or t
  misc_feature (400)..(402): n is a, c, g, or t
  misc_feature (411)..(414): n is a, c, g, or t
  misc_feature (451)..(453): n is a, c, g, or t
  misc_feature (460)..(461): n is a, c, g, or t
ctcgaggtcgctctcacacccagtgggcacagtgggtgcgttttggacgtcgtccaccatcccacaggccgttctcgtctcggccatggctgctggagcctgtggagagggagaaaagctgtgcagatgggagaaagaggaagctgcggcgagacgagacagatgacgacagacactcctgagtcctgcttgtagtagtagagcaccaacaacgggctattgcatagctttttcataccatcaatgggcaggtctcctaatctagaagtgaatttactttctgccaattcttccattatctgctattgcatagctttttcattactccacttcattctagctaaggggcagtgaaaaattatcttagtggcatggcatttagaagtggnntccccagagnnncaatgttgnnnncgttctccgacttcccatcccccaaggtgtcggacannnctggtcnnaccctataa

SEQ ID NO: 2264 - DNA, 307 bp, Zea mays
ggaactccatctgttcaacaatcagagagctcagggtcagaaccatacaggttcagaacattgactggtttgtttgatgcaactgaacaagtgcatcactttgagtatagtggagtgtgcatgctggcagctgatgaacctgcatgtgtggaacaggctctttcacaggactgctggaaaagagctatggaggttgaactgaagttaattcaagaaaatcagacctgggagattgctgatctgccaagggatcactaaggctataggactcaaatgggttttcaaagtaaagagggatccaacatta

SEQ ID NO: 2265 - DNA, 317 bp, Zea mays
ttctcaagtggccagataggctgtctaaaccttctgctagggcatcagttatcaacaatggagcaaacttgtttgaagtagatagtcagaagtgggttaggagagtgtcatattataagaaatcgcttggtgtgaagcttgggagcacaaacatacgcaatgtcatggacatgaatgcattctttggaggattcgcagccgctataatatctgatcctgtatgggttatgaatgttgttcctggtcagaagccattgacacttggagttatttatgataggggccttataggggtttatcatgactggtgtgaacca

SEQ ID NO: 2266 - DNA, 1426 bp, Zea mays
  misc_feature (653)..(653): n is a, c, g, or t
ctctctccgatcccgacccaccgcctgcaactcttcttctctcctacgtgttcgtcagcccgctaaggtaacatcctaagaagaatcgcctcggcctatcattcgattcatcaatccatgccgttttttccccgtccgacgtagagtcgggcagctgtgtgcggcgtggctaacgtggcatggagccgcagttgcctttgcttgtttgaaagactaggattgcctttcctgcgtgggcgcacactagctgttcgccgaaattcctgtggagtgagtagtgatagtgatagagcaccatggcaggggtgagtccttctttctaggatttttttagaaaagtaggttgctcttgctttatttgtttgcaaataaagcattcaaattattacagcaaacgagacttttagcgtatttctaagcgagtctgcgccagtcaacaccaacatctcacaaaaggagtacagatgtgttttgattggattgggtcagacgtacagatagcctgtgcctattatattgggttatacacattaatatcttgtattcttgtgtgaggctgtgagccgtaagggcaaatgcctggaacaggatgggcatgtggtagcattagcttacactccttaaagcctgatgactttgtttcattactttgnagatttcaagaatccgcgcacgcgctgctgctactgtttctagtttgatctggacattctgtgctcacctgggcacattatggtgctgctgttcgttcataacatatggatcgacagattgcagttccgttaacgagttttgttctgtatcttgatgttaaattactagtgtgttggaatttcatagctctggtctcttgtttccgtgttttaagtttaagtcgatgttttaccatctttgagtgggctgaaagcttccttatagagttgcagtttatcctgacactctcccaaacttacttctgatgagatgtgcgcaatggttgctaagcatgggttttccacggctccctttcaccagacttcttacatgaattgttgtccagtgttaagatggcttcaagtgatggtcagacagaagctgcggccccatctgtccccaaaaaccctgctatggcatcatgccggaagaagaaaacagatgatgctaccttcctcgaagatctgaaagaccacatcgatgagttcatccatgcctccatggatgagcacaagacctgctttaagaagacgatccagaaggtcagttgcactacttcactgaaatttcttttatcgctttggtctttcaacggttgtcatgcatttggtgctcaaggcttgtgttatccatggattgttgcgcagatgtttgggatgtcgaaggctgttgcagagagatccgcggcagaagcgaaggaagctggagttgaaagtgcttgccactcagacca

SEQ ID NO: 2267 - DNA, 330 bp, Zea mays
gacggtaatattgatggtctggaaaggtcacggttgggacctattgtccatgctaaatgtcgatctgggcccagcaatacttagggtgggcatggctggtgagtatctatctatttccttgtgctataacaaacatctatggactttaaggtggacataatgttttttagagctagtttgggaacctcattttcccaagggaaattgtatcttgaggttaaccccactgtaaatagaggatagtctccttgctagtatttggctgtatgcaacatgtttttggctacgattatatatgttatctgactaaataaaaatgctggatgtgag

SEQ ID NO: 2268 - DNA, 342 bp, Zea mays
aaaaaacaactgtagcatacaatcttatacagtagtagagatatgcttcaatcattttgggtaatcctcagccagacaagtgtatattaatattagccctaactatatgtatccacccaggactgggctggctgctctggccattccgtcccatcccatccagaaaggcacatcataggcacaaatgatccaaaactcaacaaatttgcagaactaatttgcagaagaaaaaactatgtcaccagcaaagctgataataatgactcgaatgttgtgcagatccacctgcgtcccgccttgttctgttctgtgctgccgcttgtcgctgcgtcattgactaag

SEQ ID NO: 2269 - DNA, 1097 bp, Zea mays
  misc_feature (969)..(971): n is a, c, g, or t
  misc_feature (1063)..(1066): n is a, c, g, or t
gaaatacaatcctccatctgatctctgtaaggatctccagcatcctgaacataggtaagtggcacaccatgtgcactgaagaatatcattacctgtcatttattttcacaacaataaaaagtattgtcagaataaaattacagcacattttttcatgattatctataaactaactgcaatgcttctttcagaaaaaacaatatctcatgctactcagaaattaacgtggatgtcagataacatcttaaactattaatttcgtgctaatatgttagtaacagtaagaaacagtgtcacaaaagtatttttttatacatctgataataacatttgcattttagctactcttaacaaatttgtgtatattactggtcaagtttgtccagaggaaggtacctataacaatgtcaaatcacagttccaataacttctattagaaagaaattgtatagctagtggatagctctggtgaaatctggaatgtgtagatgaaacaagtaatcctctgcctatcacattctaactgtagaataaaggtggaggtagaattaggaatacagaacctcttcaggattggaaaaggcagatagctctttttcaattaggtcagccattgatttcacatagccatcacgttggtaccatgattcgataatggagattggcaagccagaaaaatatgaatcttccctgcatggaaacttacgcattaatatttcaagttcttgtagcatcgaagatgataagatctcatatgctatcaatcgcttctttgcccactttgtgaccaacatgatgactcaatcaatcacttgttggtgggctgctcctttgcacgtcttttctggttcgaattgttcaggccttttggactgcagggcttcattccaggacaggatattgacgattttgatctctggtggtgttccaatagtgctcggctagatgggctgagtcagaagggctttnnntctttggtcgctctgggtgcttggatgttgtggaagcatagaaatggtgtggtctttaatggttcctccccaagcctggtggtggccgttcnnnnggccagggaggaagctcttctgtggtccttg

SEQ ID NO: 2270 - DNA, 744 bp, Zea mays
  misc_feature (637)..(639): n is a, c, g, or t
  misc_feature (693)..(698): n is a, c, g, or t
  misc_feature (715)..(740): n is a, c, g, or t
tccgcctgtagtttgggtcagtccgccgtctccactgcttcgaacccatacccatcctcgcatcgcattgatccgggcgtagaacggctcttggaatatgtcgactctgcgacgtttgcttcgattttcaagaaccactcaaacttgatcaatggcttctccttgctaccgaagaggctgttagttactgaatcttgatacaattttttttggcacatcgtgggctataaaattactacatggtcttagggatcatgggttctgggttcttgaattctttatcatttgcatttccttcgtcttatactcttatcagcggatagttcttgatgagattagacttactcgtcttcccatttcgtactagctatcctcaacctgtcttggaattaatattgctaatcagttcaagaaactacaggcggaggttcaggaaactaattcctcaacctgtcttggaattaatattgctaatcagtgtagcctgcttgttttgctaatcagtgtattctatgtctgaacattttgttctgatcgtaacgagtattcagagttgccagtgtagtctgcttgttttggtttcctgaacactagtggtctgttccacggcaacagcctccagcggtgcccatcggtnnnccgatccgccgccagcgccgccgggtcgtccaggcgcaaccggtgcttcggcgnnnnnnccactatgtgcgggcannnnnnnnnnnnnnnnnnnnnnnnnntgtc

SEQ ID NO: 2271 - DNA, 725 bp, Zea mays
  misc_feature (647)..(654): n is a, c, g, or t
  misc_feature (692)..(697): n is a, c, g, or t
  misc_feature (703)..(712): n is a, c, g, or t
  misc_feature (716)..(722): n is a, c, g, or t
ggcaaggctacacttctgaccccagaagtcctcaagtaattgctaccagctctcggttatccctcacttgctttgctttgttagttatgtcatttaatcctcaagtaattgcaaagtccacactctgtcaaatgattcagtggctgctggcaaccgtttgaccttctctgtggtatgcttagtttgactctgaggtttgggacctagcaaaactagattgagatatgaatccaatccatgcacctttctaatagaattgcaatggtcgacactcgacacacatactgtttgattcgttgggtaagtaagattgcgaatgaatttaatccctctacttctctttgcagggaaatgcagctggagcaggagagaatagaagctgaaaagaagcgggtaggaaaaaaatatttcactcagtgataaatgtagttgcaatttaacctcagcgacctttttctttgtctggagagtaaacttcaattgcagtttatccttactgtccttatgaaaagaaaatatagtgcctttatgtcctccgtaatttaagtcctaagcatgatatgttcatgaaattctatgaatgcatttttatcagtttttgttgataattatggtcttaagaatttctctatttacacaggtaaaannnnnnnngcaacaacttgctcgagtttttgaaaccattggcgctnnnnnnctcccnnnnnnnnnnggannnnnnnaac

SEQ ID NO: 2272 - DNA, 355 bp, Zea mays
cggccgcctggtcgtcccccaccatgatgatcgactccgccggcgcccagcgccagcaggtcgtcgattcgtcgtccctcttcaactctcgttgatcgatgacgccgtgcgccctgcaccagctacttcgttgctagctgcatcgagagctgccagtgtacgtggcgaagcgagtcgatgcgcgggcccactggttcgtgagttacttacacatcaagtctcaagacgtaccagatggtggttactcgtgggttttatatttggataatgtttcatatttgtaaaatatatatactatagtagtggtgtcttaaacatatatactttgatagctatatagtcttttgggtttgct

SEQ ID NO: 2273 - DNA, 397 bp, Zea mays
acgaggccgatagtccaacacgcgtcatatttgggtgttataattgcacagacctgattgcctgaagacgaggcccatggtcgatcatacgggcgcgttgcagacaacaggaaaacttgccacgtggattatatggcggcaaatcaaggaaaacggcaggtgggcaacgctgggcacctgtaacaagcagaatgttaggcgcagtggtttagttgacgaagctgacatagacccatatataagctctcatcagattgtttggatcacacaaggctcccaacgttgcagcgcttcatcagattattctaaattctagccacatgctgattctttctgttaagcctatataaggatgcctaatccaagtagctcctttgttcatttttgtttgggtgta

SEQ ID NO: 2274 - DNA, 272 bp, Zea mays
tgtgcattgtacatgcatggctacaccactgagatgctgattgtccctgctagctggttgcaaagaaggaaaaattttggttttctcaccggaggatggatcgacctctgacccccaccccccacctgtccatcataatgtgcgattttctactattcttttttttccttaaaaatgtgatatatgtatattttttcctttttctttttcttttttactcaagagggtttaggtgaatacatacataataacccccttgaagtgtttctcag

SEQ ID NO: 2275 - DNA, 370 bp, Zea mays
ccgggctcgctaaatttccgcaccaccgcgaacgagagaaaaagggccaggtccggtcactggatgccgccgctgccaccgctccctccctagcccctgacaacgatctccaggcattcgcttccgcagtccgcaccaccgccatttcacgcacaccgccgctgggtgcgcggacgcgtggtcactcccacagtccaaactccacagtccccgcatctgccgctattgctgtgctcggctcggcacactcagactcggagtgagagcgaccaagaagaggggatgatggagaagtgacacggcgccggaggttgcaccctgctccgcctcctcggcgccacagccgccttagcggttcgacttagtgcta

SEQ ID NO: 2276 - DNA, 340 bp, Zea mays
tactgtgtagctactagcgtactctacgctgcagctgggcaagaatcgacgatcgacgccacacgacgacgacgacgatggcttatttccttgccagtaataagtgcgtgctgctgtccctcttctccgtcgtcgtgctcctctgtctcggcggcggcgcctccgccatgggcagcctgcccccgccaccgccgatggtgaacttcagcatcggcgtgcagggcgtggtgtggtgcaacacgtgcaggtaccgcggctacttcgcgcccatggacgcgtccccgctcccaggtatatattatatatatacgacagccagtagcagctagccccagtcgtc

SEQ ID NO: 2277 - DNA, 354 bp, Zea mays
ccttggtaccgagtggagaaaatggatccagtacgttctggattcttcaaagaactgcggtcctcgtcaatggcagcccgggtccctggattccatgcaaaagagggcagaggtagcaggatgactctttctcccccgtatccttcctttctcgtcaacggtgcagtgcagttgatttttcgtatgtttcaaatggaagcagcaccattcaaacaaagaaagaaagaaagaaagaaagaaagaaagaaagaaagaaagaaagaaaaacggaagcacgtggactgaagactgtgaaacaagcgccaccaaactttcgaggaagcgcgggtgcggaaagtgcgtcttcgttatgtc

SEQ ID NO: 2278 - DNA, 381 bp, Zea mays
gtcccaacggcattctccactactacggcatcctcctccactattacgcctggaccatcttcgatgggcgcaacggtatactcctccacttcctcaccgtccatccagaggtcaccaggtggccatcgcctccgctgccactgcggccgccacacgtgtggcaacgtgccacgcgccaacgccgatgctcaccgcatgccacgacgaggtcatctggtcagcgacgaaacccccctatacaccagtcacgcgggtaaggtgttcgtcgatatgaataagtcagtatcactgccttgcgtatgtaactacttgaatggactggagcaggggtaagaaatgttggcaacgtatagagcaccgtgtcagctcctgaatacattt

SEQ ID NO: 2279 - DNA, 930 bp, Zea mays
  misc_feature (848)..(852): n is a, c, g, or t
  misc_feature (887)..(892): n is a, c, g, or t
  misc_feature (894)..(908): n is a, c, g, or t
  misc_feature (912)..(918): n is a, c, g, or t
tcaagtactaatggtctaaagtctttatcacatgcccacttcggtttcgttgacatctttggacgaatactcaagtacctccccctcaatcttctcaaggaaacggtgcatgaccactaaactctcgtcatctgcacgccatggaacagccatacattgtggaattagtttggctgactgccgttcgtatatatcgaggcgaaaagaaagaaaaaatatgtttgttgctagatgacccagggttttggttcaaggtacgtagtttctcgtttggctgaagaagggggtctcaaacgcgggattagaccgaagaagaggagcttaccgagcctcggaactgtgtggccctttgggtgacggattacgaatgggtccacgcatgattctatcagcttttcaccatggactttcaggaagtcgttttcacctgcatcaaccaaatttggaaacgtgttcagacttgagtggtgcctcgtagtcagctatacaccggttcgcctatttaaataaaaggtaccaagacaaataacgaacagaaatgactagagaattggaccatgtgcatcttataataaacctaatcgaagcattctagaacagtagacatgatggagggcgaaagcgtacattattttccatgcggaaatcaaagttggcatatattcaattgggttttttttaatggtggacacaggtttcttgaacctttcttgacagcattatgcagcacattgccgaaagcaagccctgtctctttcaattaacaagagaagccggcaggcaagagcaacgaatacggagacgacgtgagtacgccataacgtttccaccaacgcaacgcttgaacnnnnncggacaaacaaacttggcatgacaatggaatgatnnnnnncnnnnnnnnnnnnnnnacgnnnnnnngaagtgaagcga

SEQ ID NO: 2280 - DNA, 365 bp, Zea mays
ggtagccatgcctcctaagattcaagttatggagcaccccattcacaacgacgtcattcggtttgcggacctatttatgatggtagccataactcagttatctcaagttacaactatttgcctcgatgtgtgtaacaccctgaatttgggggtataagatttctcttctaatatccaccaaattcatgtgttaccgtctcctttctttgctttccttctctttttttctaaataaagatgagttattttgttatattggtgtaagcctagtgaagtgagccctagaggcactttggttgttgcattcatgacattgcatagtgtttctatatgaaaaggtgtttgaaacatgttaatatgtctcg

SEQ ID NO: 2281 - DNA, 369 bp, Zea mays
tggagggaaagaagcctatcctaaagataaggaaggttatctcgggattacaatcaatcctaaaccaagcatatcaggagttgcataatatactctaatacccccccccagtcatagcgttagcaacacgaacggacagactggagaacaatggagatatccccccatagtcggaacgccggtgcgaatgctgcaactgcagtagcccatgcataggatagccctttgtgccgattatgtcgagatagccgagtgcaaggaagtcaagccattgtcgaggtgccaacagagaagacatccacgacggttgtggtgcgatatgacgggattgccgtcgcaactcacggttgtcagagcggagtacacgaa

SEQ ID NO: 2282 - DNA, 393 bp, Zea mays
acgatgctgggcgcggccgctgccgcggaggaggaggaggaggaggccatcgccgccggcgcgggcatggctgtggtgaagcgctcgagcaacccttacctggacttccgcagctccatggtggagatggtggtggagcggcgcatcgccagcgtggggaagatggaggagctcctgggctcgtacctctcgctcaactcgccgcgccaccacccggccatcctcgctgccttcgaggacgtctgggaggccgtcttcggcgaggagtgagagtgactgggagcgtcaagcgtgatctctttcagagtactgtttcaaaacttctacgtacatgccaatgtataaattggcaacattttgccacgccgagatgctgtggtgctcatcgtatgt

SEQ ID NO: 2283 - DNA, 384 bp, Zea mays
  misc_feature (19)..(23): n is a, c, g, or t
gcacagaagaaagtgaagnnnnntgtatctaccggccgtgctgctaatactcatgtttctagttccaggcctcgctctgtttttatcccccaagcacattggcccagccagccaattgttgatcggtttgcgcatatacctgagcacctgatcagcccttctgcttttagttatgggttgccacaaccacttatgcatccagcctatcctcatcctcattctcatcagggattggtaggtcaaggacagggtaatttccttcatttcaatcctggtattgagctgcagcatcaaggccaggctttcttcggtcctccagctgtctaccaccccatggtgaatgggtttcacccattcggtatcaatggtgctcagcaagtgcag

SEQ ID NO: 2284 - DNA, 369 bp, Zea mays
tctattgttgtatatcatctaggtgatgattcaggtgacacagtgtaggcataactggtgacgtgatcagtttcatatgtatcctgtcaaggtcaggggtgcaaaggtttttgatgttactattaatactgcttctcattcttttgctatctctctctctctcttttttggcgttgctagctgttctgttatctagattatcctgtaatgacgatgctgatcatgtagatcttgtttccatcaccaaggttgtctgcactctgcagtccatgggtacattgttcccactactagatgccacttgcaatccgaagttgttgggatgtaatatgtaatacttctttgggcactttaatttgtgaaagcaga

SEQ ID NO: 2285 - DNA, 749 bp, Zea mays
  misc_feature (680)..(700): n is a, c, g, or t
  misc_feature (709)..(711): n is a, c, g, or t
  misc_feature (713)..(715): n is a, c, g, or t
  misc_feature (719)..(742): n is a, c, g, or t
aacgtgacagctggagcagatggtaatgatctctgcccttcttctcctgatctgttttacatgtccatgtagtagatggtcgctagtacttgggctaaggaagctgtgttacttctgtgatcctttagccgtagtccataattccattcacatgctgtgtatatgataatgtactatcttgtcactgagtttgtttctttgctgtcaggtgttgctaatatcaatgtcaccgacagccaggtaataagacatctagacccgtatgattcctatatcaccctagccttctccttaacactgctaatgattttttttcagatcccactgactgggccaaactcaatcattggcagagctgttgttgttcacgctgatcctgatgatcttggaaagggtaatgatgttatttactgtcaacacttgtgccttttatgtgttgaatggtggtgtttttcctctgttctgagctaagtttttcacattggttctgagttcagatagtcctataatcactatatatacctgtttatggagcacttgaataaaatccatgtgagagtgtgactaattatatcagattattaaatggtggagagagttttggtaaggctatggcgatatgcttgtactgtcgcataaatccctaaaaaataatccagttttttatgccatttttatgnnnnnnnnnnnnnnnnnnnnnctttaaatnnncnnnactnnnnnnnnnnnnnnnnnnnnnnnnctgatct

SEQ ID NO: 2286 - DNA, 495 bp, Zea mays
gcgctctggtgatggcgatggggttataaggttagggtccgccagatttggtgaccgagttagagctccaaatctggccggatcttgtacaggagttgtttgtcgttcgttgttggcggcggcacatcacagaaggacgatggacgggttggtgtatgcgtggcggaggagctggtgcccggtcacgcctcgccggcaacgggtacagcccctgaaccggagagtcttggggtgcgtccccggccgatgttcttccttggtacgtttcttttgcagctcgttaaagcctttgggcgatgaagcttccccggtttttggtttgctttccttccgttgctacctcaggcgaaggtatcgacgttcgcagcgaaggatgacgacgaacggcgcctggcggcacaaaagttccaaagggccttgttataatttttctttttgtatggacttttgtgtacacctttcccttttgtacacctcgagaaggtgttgtggtct

SEQ ID NO: 2287 - DNA, 344 bp, Zea mays
agatggtgcgtctaggtatcgccgtgccgcgcatgctcgccaatggctatacttccatgagcagcatcggcccttgtagtggccagttttccagtatactagctagtagatggatgcgcatcaaggagccaacccaggaccacgaccaggaggcaaacaataatgtttggcaaagaaaaagttagggcatgatgcgatgctagcactagtattatgtggaataaagcactagtagatagtaatgtttttatatataactgcggcgatgtgaacagtaataataatatatgcgtgtgggaaccatatatagtgcttctatgtatatggttacattgctgctgata

SEQ ID NO: 2288 - DNA, 498 bp, Zea mays
tgccgagctgctggtgatgctttaatgatcgatgtcaaggagttgtagtgacgcaacaggagatgatagagtgctgtcggatggatggagtgaaactgcctgctgccgaggtggccgacggagagcatgctgagttgaaaaggggtgttggccacgctccacgataagtatgttatgttgcccccctgtcattatttatttatttgtttatttcaatttaaatttgcatgcagttaggctggtaacgtgaacagtctctaatcacatgattgctgttccctgtggaaggaatacatgggtcaccacattgtgttatgctgccttggggcacgtagtttatcaacaacatatcttatgttttttttgtagaaaaaatcattcccgtatgcccttgactaggaaaacatatgtcggcccatcatctcagaaaattctcatcctggaagtgatgtcctaaggattgagattcagattctcatcctgtcggagcatcgccaa

SEQ ID NO: 2289 - DNA, 1512 bp, Zea mays
  misc_feature (364)..(367): n is a, c, g, or t
  misc_feature (484)..(486): n is a, c, g, or t
  misc_feature (579)..(581): n is a, c, g, or t
  misc_feature (586)..(587): n is a, c, g, or t
  misc_feature (607)..(607): n is a, c, g, or t
  misc_feature (610)..(614): n is a, c, g, or t
  misc_feature (627)..(630): n is a, c, g, or t
  misc_feature (647)..(648): n is a, c, g, or t
  misc_feature (660)..(664): n is a, c, g, or t
  misc_feature (672)..(673): n is a, c, g, or t
  misc_feature (675)..(676): n is a, c, g, or t
  misc_feature (684)..(684): n is a, c, g, or t
  misc_feature (688)..(688): n is a, c, g, or t
  misc_feature (691)..(692): n is a, c, g, or t
  misc_feature (695)..(698): n is a, c, g, or t
  misc_feature (708)..(711): n is a, c, g, or t
  misc_feature (719)..(721): n is a, c, g, or t
  misc_feature (725)..(729): n is a, c, g, or t
  misc_feature (731)..(736): n is a, c, g, or t
  misc_feature (738)..(741): n is a, c, g, or t
  misc_feature (745)..(746): n is a, c, g, or t
  misc_feature (749)..(763): n is a, c, g, or t
  misc_feature (766)..(766): n is a, c, g, or t
  misc_feature (769)..(770): n is a, c, g, or t
  misc_feature (773)..(776): n is a, c, g, or t
  misc_feature (779)..(784): n is a, c, g, or t
  misc_feature (787)..(789): n is a, c, g, or t
  misc_feature (792)..(793): n is a, c, g, or t
  misc_feature (795)..(796): n is a, c, g, or t
  misc_feature (798)..(798): n is a, c, g, or t
  misc_feature (800)..(804): n is a, c, g, or t
  misc_feature (807)..(818): n is a, c, g, or t
  misc_feature (823)..(828): n is a, c, g, or t
  misc_feature (831)..(834): n is a, c, g, or t
  misc_feature (836)..(847): n is a, c, g, or t
  misc_feature (859)..(866): n is a, c, g, or t
  misc_feature (868)..(868): n is a, c, g, or t
  misc_feature (871)..(873): n is a, c, g, or t
  misc_feature (877)..(877): n is a, c, g, or t
  misc_feature (879)..(886): n is a, c, g, or t
  misc_feature (888)..(888): n is a, c, g, or t
  misc_feature (891)..(895): n is a, c, g, or t
  misc_feature (897)..(901): n is a, c, g, or t
  misc_feature (904)..(918): n is a, c, g, or t
  misc_feature (920)..(927): n is a, c, g, or t
  misc_feature (929)..(931): n is a, c, g, or t
  misc_feature (934)..(942): n is a, c, g, or t
  misc_feature (952)..(956): n is a, c, g, or t
  misc_feature (959)..(962): n is a, c, g, or t
  misc_feature (965)..(976): n is a, c, g, or t
  misc_feature (978)..(983): n is a, c, g, or t
  misc_feature (985)..(985): n is a, c, g, or t
  misc_feature (987)..(994): n is a, c, g, or t
  misc_feature (1007)..(1009): n is a, c, g, or t
  misc_feature (1011)..(1013): n is a, c, g, or t
  misc_feature (1015)..(1020): n is a, c, g, or t
  misc_feature (1022)..(1024): n is a, c, g, or t
  misc_feature (1026)..(1037): n is a, c, g, or t
  misc_feature (1040)..(1040): n is a, c, g, or t
  misc_feature (1042)..(1047): n is a, c, g, or t
  misc_feature (1050)..(1055): n is a, c, g, or t
  misc_feature (1064)..(1068): n is a, c, g, or t
  misc_feature (1070)..(1083): n is a, c, g, or t
  misc_feature (1088)..(1094): n is a, c, g, or t
  misc_feature (1097)..(1098): n is a, c, g, or t
  misc_feature (1100)..(1104): n is a, c, g, or t
  misc_feature (1106)..(1108): n is a, c, g, or t
  misc_feature (1112)..(1119): n is a, c, g, or t
  misc_feature (1121)..(1122): n is a, c, g, or t
  misc_feature (1139)..(1140): n is a, c, g, or t
  misc_feature (1142)..(1143): n is a, c, g, or t
  misc_feature (1146)..(1152): n is a, c, g, or t
  misc_feature (1154)..(1155): n is a, c, g, or t
  misc_feature (1160)..(1160): n is a, c, g, or t
  misc_feature (1163)..(1163): n is a, c, g, or t
  misc_feature (1166)..(1167): n is a, c, g, or t
  misc_feature (1169)..(1191): n is a, c, g, or t
  misc_feature (1194)..(1196): n is a, c, g, or t
  misc_feature (1198)..(1199): n is a, c, g, or t
  misc_feature (1202)..(1204): n is a, c, g, or t
  misc_feature (1206)..(1206): n is a, c, g, or t
  misc_feature (1209)..(1214): n is a, c, g, or t
  misc_feature (1216)..(1217): n is a, c, g, or t
  misc_feature (1225)..(1227): n is a, c, g, or t
  misc_feature (1231)..(1237): n is a, c, g, or t
  misc_feature (1243)..(1245): n is a, c, g, or t
  misc_feature (1247)..(1284): n is a, c, g, or t
  misc_feature (1286)..(1286): n is a, c, g, or t
  misc_feature (1290)..(1299): n is a, c, g, or t
  misc_feature (1303)..(1310): n is a, c, g, or t
  misc_feature (1317)..(1321): n is a, c, g, or t
  misc_feature (1323)..(1326): n is a, c, g, or t
  misc_feature (1328)..(1336): n is a, c, g, or t
  misc_feature (1339)..(1339): n is a, c, g, or t
  misc_feature (1341)..(1346): n is a, c, g, or t
  misc_feature (1350)..(1351): n is a, c, g, or t
  misc_feature (1353)..(1353): n is a, c, g, or t
  misc_feature (1356)..(1356): n is a, c, g, or t
  misc_feature (1363)..(1364): n is a, c, g, or t
  misc_feature (1372)..(1375): n is a, c, g, or t
  misc_feature (1378)..(1394): n is a, c, g, or t
  misc_feature (1396)..(1403): n is a, c, g, or t
  misc_feature (1406)..(1421): n is a, c, g, or t
  misc_feature (1424)..(1431): n is a, c, g, or t
  misc_feature (1433)..(1434): n is a, c, g, or t
  misc_feature (1436)..(1437): n is a, c, g, or t
  misc_feature (1441)..(1445): n is a, c, g, or t
  misc_feature (1447)..(1447): n is a, c, g, or t
  misc_feature (1449)..(1460): n is a, c, g, or t
  misc_feature (1466)..(1477): n is a, c, g, or t
  misc_feature (1480)..(1495): n is a, c, g, or t
  misc_feature (1497)..(1503): n is a, c, g, or t
gattggcatcacaacgccatttgagaggtgtatggaggggaggtgcgttgcaatttggtcaacaagaacatgtaggagaaaaaaacagattttagaaaaatcagatagtctttcttcctgaagttggtacttaacatttttttgttaagttatatgtcaagtaaagtcaatgaaattttagaatttaaacagattctaacacgatgacattgcgtagataatgatgacactggcctgagatggattttcagtttgtcaccattagaaaatgtaaagcctaatggtgaaatatggcacttcttcaggcacacaatcaaagaaaggaaaaaagggataaaaaagagactgtgatgggaaatttgcnnnncttgtttctgtttcttgttcttagttttgttcacagtttttttttagaaaaaacccgggccttttcgttttactttatttgattagatgcgtattgcttttttcatgtgggtatatnnntgtttttttatttgaatgaatcgatttcgattgacatggatctcaatagacctcgtagttcatcctctcttcttttctctcgaaggataagtnnnatacnnaatccagtctcccattacgntannnnntccttaactaccnnnntttctgagcatactcgnnattctgcttctnnnnntttctagnncnncattcccnaacngcnntcnnnnaaaaacaaannnngcaacttnnncagnnnnngnnnnnncnnnnattnnacnnnnnnnnnnnnnnnaanctnnctnnnnttnnnnnnctnnngtnnanngngnnnnnctnnnnnnnnnnnnccccnnnnnnccnnnntnnnnnnnnnnnncctcctgaaccnnnnnnnncntcnnntatntnnnnnnnncntannnnntnnnnntcnnnnnnnnnnnnnnntnnnnnnnncnnnccnnnnnnnnnctcacccctnnnnnctnnnntcnnnnnnnnnnnncnnnnnncncnnnnnnnncttcccccctccnnntnnncnnnnnntnnncnnnnnnnnnnnnccntnnnnnnccnnnnnnctccttccnnnnnannnnnnnnnnnnnnctttnnnnnnnccnntnnnnncnnnccannnnnnnntnnctttctcctcctccctnntnnctnnnnnnncnnccttnctnccnncnnnnnnnnnnnnnnnnnnnnnnnctnnncnncgnnntnccnnnnnnannttcctctnnncttnnnnnnntccccnnncnnnnnnnnnnnnnnnnnnnnnnnnnnnnnnnnnnnnnncngcannnnnnnnnnctcnnnnnnnnccacccnnnnncnnnntnnnnnnnnnccngnnnnnnctcnnanccnaccaccnnctctccannnnccnnnnnnnnnnnnnnnnncnnnnnnnnttnnnnnnnnnnnnnnnntcnnnnnnnncnncnntttnnnnncncnnnnnnnnnnnntcttcnnnnnnnnnnnnccnnnnnnnnnnnnnnnncnnnnnnntacccctat

SEQ ID NO: 2290 - DNA, 416 bp, Zea mays
cttgaaggtttgcctaaaattcatgaaagtgggagtgggttctatcatcatagaacaattcaacatcagaaagctcaggtgaccccagcggcagccatttctacgataaacagtgggataggtcgaaatatgtgcagtactctgaacatgtctaattcatatgggctttctcataagtctggaccagctgatgttaccttagatttacaacttaaaccaccaactagacctgagctagggataaactggaaaggacttgctcctgctccagaactgagtctctctctatttggtaagcctatggacgagcctaagtttcctagcacccccaatgccttatttcattctggaactgctggaagttccaaaaaggtcagtggggaggctgctgctacacttgggtcagataaggcacc

SEQ ID NO: 2291 - DNA, 1372 bp, Zea mays
  misc_feature (728)..(729): n is a, c, g, or t
tcaggtttatgggtgggttgcccgagctgaggactacgatgcaacgactgtggtaggaagattcttgagaaagcacactgtcctgcaaacaatagacgaggtttccaagactgaattagagaaatcaggggagatggtggcgatactggcatcccagatcgaggaaaagaaccgatacttgcaggatttggagacaaagaagaatgcgacagaactctccatctcaaggcttgaggaggacaacaggaaacttcatgaggcatacaatgaaggtaatctgtgcaaattgcctcccttttcctttggttctacttatggtatagagttttcctgcatgcttgacatgtatgtctagagcatattcacatatgttctctgtcttgtactttacatttttatatttttcatggaagtcctgaaactatttgtttggcttttgttccctctttttatattgtacatggattatttggagaaaaagaaattatgactttgttagacgaatgcaggacttattgagataacattatgatgcatgaagttattccttgtcttatatgctttagcattatatttatcagtaagacaaaacaaaagacttacctgatgatagatagatactagacgctgcaatgaaggaaaataggtaatagaccaactctgaaacttcatattgatgcaaagttcgtactgaaactgaaagtaaataaatcccttatgacctagtnncctcatctaaagttctaaacatttaaacaagcaaactcacagttactagagagtagagacctagagcagaagatcgtcgtccaactgaaaggcatcagcagggacagcagcagctccccctccaactatttcacattcatcttggtccatatttgttgctgtttctggtggtggtggttcagctggttcagtagcatcttcatattgattactgtcatcttcttcaccaagacctcgagttgctgtgtttctggaaagtttccttttcctaacatacgttctttaaggctgagaagatgaaccagcacctacagcagtagacctagaaaattttctgccccggacttgcacctaatttggtctggtcgaattgctccctaatcggacgatttaatcgctctagttggacgactagaggacctgatcgaggcctcctcctagtcgaggacctgctggcgtctggcgaccagaccgaataactgagattagttggacgacttgaaaacagagtttttgagtgcttgaatttcttggctttacaaaatcgacaaaacaaattatttcggttggaagtcatttatcttgtaagttttatatcctcttcatttatcttataagttttatattctctcttcagaaatgc

SEQ ID NO: 2292 - DNA, 718 bp, Zea mays
tgatggtgctgtccttgtgaatggaaacaatagtgaggaacagtggggtatgaaaaatgaagaaccatcagcataaaagctgtagttgagcaagtgtacagtcctaaataccttatttttcctggtcttacctcccagtgcacgatattaggaaagctgggtgatatccttaagttgcccttgtctttagcggtatggcagttcagggagttttgaccaacctaggattcataaattttattaaaagcttagtgaaacgttttttaaaagtatcccttagattttttttgtttaaaacgttcctgttcctgttactggtgcctgctctcttgctaccgttcccatattttgttatgttcaatctatatatgcagatatggtaaatggtcaaatcgttaggcaatctacattgagacattcttctgaacagtatggattgcagtataaattattgttttgacatttttttttatttctaccagttttctcagtatttgtgtttgatgtacacagtttcactagaatgtttctaatggttgtcttttctttgcagtgctgactcctgagcaatagtggatcaacgggacagcaactttgcaagtggttaagtttgtaaaggtgaaatgctattccaagtaattaatactcatataccatagaacattttctgtcatactaaagctataatacaagtaaccaatcctattgtaggttgctg

SEQ ID NO: 2293 - DNA, 483 bp, Zea mays
gactgccctttcttttcgctttgcttcctggatccaactgccgccgccgcatctgtcttcgttgattcggtgttcttcgatcggatgcctttatctgcctaggtacgtgcgccgattcttgcgtcgggggattcaattctcggatgggtggagggggattcgtcattcgtgttactgagctatgagtgggtggatgggttcgtgaggtgcttaccagatctcagcttctcgatctgtccttcgcgatttgtcgcccaattcgtttacctcctcctatttctgctcgcagatcggagcaagagcaaagcgcggggtgtaaatcctgagaggaggaagagaaggaggagaggagatcgagaccggctccccccgtcttgcttgtgcttgtcgcgtacggttcttgtaagaacccgcagctgccgcgtccggttctttcaagaacccgcggcggggatggatctgtacgacaagcgagaggacata

SEQ ID NO: 2294 - DNA, 701 bp, Zea mays
cgtgtcaaacagattattgaattgaaaaataaggtaatttgttctctgctttgtgcccagagtctaattttgccatatgctgcattatagtgggtaaacttcttatgtttccttgcatgcaggtttgtgctggaggcgataaaaactttgtggtgatcaatcagaagggcattgaccctccatctctggatctccttgctagagcgggggtaatctattctctacttcttggtggttacatgacccaaattcattttcaaccctgaatggattaaggttttcattttagaacttgtatcttatgaagttaacagttgaagtaggcattgactgattaaaccatgctctgaaagactgaaacaataatttatgctcagattattgctcttcgaagagcaaagaggagaaatatggagaggcttgtgctagcatgtggtggtgaagctgtcaattcagttgatgagttgactgaagattgtctaggctgggctggtcttgtctatgagcatgttcttggagaagaaaagtacacatttgtggagaatgtgaaaaatcctcgctcttgtactatactgattaaaggttggttttttcttgagaaacaacatctcatttctgatacactaattgagctgtgaattgaatatcgtttgacatattcaggacctaatgaccataccattgcacaaatcaaggatgct

SEQ ID NO: 2295 - DNA, 423 bp, Zea mays
  misc_feature (360)..(364): n is a, c, g, or t
  misc_feature (385)..(388): n is a, c, g, or t
  misc_feature (393)..(399): n is a, c, g, or t
cggctgctgggagcgcttccgtgctcatgctgttctgtgatacggcgctatcctcgccgagcttattcctcgacttccaacctattcaccaccgctgtcagaacccttcttgtgacaaaaagttaagcgagcgtcttcttgaccttgcaagactttttgtccggagataatctcctacgaattaccctcttgcatcttgcgactacctctcctcgtctcgcgcctgtcgatccttccatccctctcgtccccgtctatccctcttgagcttggaacactctcgatcgcagctagtagtagctagctatatattattgttttcctttcacctactttcgcatgaactactctgctatttgnnnnngctggaagttccaaaaaggtnnnnggggnnnnnnntgctacacttgggtcagataaggc

SEQ ID NO: 2296 - DNA, 331 bp, Zea mays
tgatgctgacgacgacgacgacgagaccgaaagcatggccagcgtttctgaagacgctagctaatgtttctgatcatggaggtttagccaattggggcgggcgaagtgtggttaccttgcctcacataatgaccttgttggctagaaatttgccttggatcgagccacctcatcataacatgcttctgttgtcagctgtaattaagcttcttcttcttctttttttggtgtggcggtttaccttgaaggacttgatgtatgccagtacaacaaattcagccaaatgtggccgtgtatctaacatatccttgtaataaaattgctccctcct

SEQ ID NO: 2297 - DNA, 388 bp, Zea mays
tctttctttcacctcatcttctccctggccagcatgtactcggcaatgctcttgactggctggtcaacttcggttggtgagagcggaaagcttgtggatgttgggtggccatctgtctgggtcaggattgcaacccagtgggcgacggcaggtctgttcatatggtcgcttgttgcacccgtcctctttcccgacagggaattctaagttcaaccacggtaagcctggagcatcaaacgtgtctactgtggtagctaatatatcctatcaagtatgttgcctttaaaacatgctccgagcatggatggcaaaaagtcggtgtttgtccactgttatcaagtttgtctacttaataacatgtgactttaggcattgtgccactatctta

SEQ ID NO: 2298 - DNA, 235 bp, Zea mays
ttcccggccttgacggcgtgggcggagcgcttcttggcggtggacgccgtgaaggaggtgatgccggacgctggaaggctgttggagcactacaaggggtttctggctaaacgggctccacctgctggttactgatcgctgtaactgtaagcctgtaacagcaagctcagtgttcgtgtacttttccgtgcgttaacaggtgtgtactggagtccaagaaaggctttgattctgt

SEQ ID NO: 2299 - DNA, 367 bp, Zea mays
cccggagtactgcttcaccaacgacaacaacggtgggcttgggctggccgacgagaccaccaccaccatcgctggcggcagcagcttcgtccccaggagcgtgctgtgagtgtgaggtccccacgagcggcagcagcttcagtatttggagaaatacgatcgatatgtgcacagcgtacgcgcagtaatgtatgtaatcttttgcctgtctgttgtttatctctgagcgaaacgtgtggcttttgtggtgtccacgagctctgcggactgcgtgacactattgaggaagagacggaaacaaaagcaaaaaagcaaaaaaagaaaagaaagacatcggcatgcacaaatagcatgacgagacgactgt

SEQ ID NO: 2300 - DNA, 983 bp, Zea mays
  misc_feature (974)..(977): n is a, c, g, or t
ggtctgattttctcagcagctgaatgtaccatagagaaggtagattattcagttttttccactcatggatgtttcggcatgttctcttcctatttaaactttgtattcgcatgttctggcaggttcgggcaaagcatgacactaccaatacagcggtagctggctgtgtcactggaggagctttagctgtaaaaggtaattagtttgctgtgtcatctatgaattcctgagacaattttcctaacttttaattatcaaatttttcttaactaaaacggtaaaatctcacggtgcaatcaatgccgttgcctttgtgtatggactgtggggaccggtatatttgacctcaagcagctttcttccagctatttgtgtctctggtcttcttcctatatctcaagaattatataggtgaaattaataagctgttctaaattaactgtaaatctgcatttctgataatatttttgttcctttcgtgtgtatgacataaacgttttctatcccttcctgcttcggtagctagctaagaataacgagacatttcgtatattgctgtcctgatgtatctatatttgaaaatgttcctaagggcttggttggataccataaattgagactagtgtctagaaagtgcttcccatttcgttattagattactttccaattcctctcaattcttgggaaccatacaaggcctaaggggattttgtatttttacaggtggccctaaagctacatgctttggatgtgtggggtttgctgcgttctcagtggcaattgaaaagttctttgatcggcatacttgaaatgggtgttgtgaatttgaacgctttttggccatgttcgtttgatcccaaaaccatagggattgaggtggattgaaagagattgaagaggattttgacttgtaggggatttgatcccctcaatccctatggatcagcacaaaacgaacagagccttagctgagnnnnagcagc

SEQ ID NO: 2301 - DNA, 732 bp, Zea mays
  misc_feature (724)..(728): n is a, c, g, or t
catacggaggtacatgcattcccaggcattgttggactcttcccttgtgcacattatacttttgtaccttgctggttgccacacgttgatattgattgactgacgcttgttatttctttcacagtgcaggcttgatactagcttcttggtttctttcattggggtaaaatctattttttttactattttcacgtttcctgtgcttcccatttatcatggtgacttgtggccatctgtttattccttttgtgctactacccgtaggattgagaatgctgaggttctgtgcctgggaatcgtctcagtggcagtgtttatgcttgttttgccgttatttaaagctactggtaatatcctactgcaaatcgcacctagcaatgtgccaccttcagcctttacaaagtgctcgagacaggtaaacaaggcctcaggtagtcgttcatttggttcaaaaagaaaatgcacttaagacgcatgagcaagtgatagatattctccagattgctgcttgtgaagatgtctccgaagtatggcaaggtcgattctgggagcttgttcctggtcaggcagttggatctctctccattagggtaaaacccttgacacagagctgcaaagtccatcatttgcactgaagcattcctgacgttgcttgttttgcgctgtataggtgaagagcggcgctgacgaccgggcagtccttgaatacacgcatggtttatannnnngatt

SEQ ID NO: 2302 - DNA, 423 bp, Zea mays
aaaggaacatacagcgaagaaggccggcaagcgtgtgacgttcgccgaggtggagcctgagaaggagctcaaggcctcgaacagtgactggcacccatcctctgatttccacgcggcgtaccctgagcagaacccatgggctagcggcttcatgatctttgaggatgaaaacagctactggaaccgaggacccctagactggtaaacactcaacacttctgaatctttgtatagtcttcacattacacacatgtttgtgatgatcatccgcgttttttgtgtagctgagatcaaatgtatcgaggtggacactttttggtccgctagcagtgcaaggtcccaccagttcatcttcagccgaggagatgggtctcactcgcattatggcgacttgcgcctggtgtctgactctcggtcctgtaa

SEQ ID NO: 2303 - DNA, 361 bp, Zea mays
ggagatctgggcagagtactgcaagctcgtgccgtggaggatcctgccttatgtgtactgaagagacggtagaaaccaaggcagctcatggccctgggccagctgtaaaccttattttgtttgcccttaaccagttggtgaatgttgatgtagcactcggtaaactgtgaccgtgcaaacttttgttattgttggtccatacatgtttggaatcgtgaatcagaccgcctcacttggtggcatattattccctttagcgcttgcttgggagctaggacccgagaggattgaaggggttaaaattttcttgttattcaatattgaatattaaggaaattttagtgactttaatcctctccgg

SEQ ID NO: 2304 - DNA, 415 bp, Zea mays
ttttccaatgatgagcacttttaaagttctgctatgtggcgcggtattatcccgtgttgacgccgggcaagagcaactcggtcgccgcatacactattctcagaatgacttggttgagtactcaccagtcacagaaaagcatcttacggatggcatgacagtaagagaattatgcagtgctgccataaccatgagtgataacactgcggccaacttacttctgacaacgatcggaggaccgaaggagctaaccgcttttttgcacaacatgggggatcatgtaactcgccttgatcgttgggaaccggagctgaatgaagccataccaaacgacgagcgtgacaccacgatgcctgcagcaatggcaacaacgttgcgcaaactattaactggcgaactacttactctagcttcc

SEQ ID NO: 2305 - DNA, 415 bp, Zea mays
  misc_feature (184)..(184): n is a, c, g, or t
ttttccaatgatgagcacttttaaagttctgctatgtggcgcggtattatcccgtgttgacgccgggcaagagcaactcggtcgccgcatacactattctcagaatgacttggttgagtactcaccagtcacagaaaagcatcttacggatgggatgacagtaagagaattatgcagtgctgcnataaccatgagtgataacactgcggccaacttacttctgacaacgatcggaggaccgaaggagctaaccgcttttttgcacaacatgggggatcatgtaactcgccttgatcgttgggaaccggagctgaatgaagccataccaaacgacgagcgtgacaccacgatgcctgcagcaatggcaacaacgttgcgcaaactattaactggcgaactacttactctagcttcc

SEQ ID NO: 2306 - DNA, 297 bp, Zea mays
  misc_feature (288)..(289): n is a, c, g, or t
cacccacccctcttcctcctctctgccggcaacaggacgcaggcgcataaaaaatagcaccgccaccaccacgctccacacgctgcagtttctggaaggccaccccctctgcccgctttaaggcgccgtccgcaccggtcgcctccctcccccactagcgctgccgcggccctcgccccgcccatatacagcgcggccgcgcccaatcgttcgttccgttccgctccgccacagcggctccgcaccaaatacaggcgtgtccaccgcgctcgccccctgctggtctgnnctgctctc

SEQ ID NO: 2307 - DNA, 382 bp, Zea mays
  misc_feature (375)..(376): n is a, c, g, or t
tgcgtgctaactcctatgcatcgcattcctggatgttcattggtcaatcacgatgctgtgcactgctgcagctcgggtagtttttgctaagctggaggtgcagcagacaagacaacaagcaagaggaggcaactaaggagtagtactatatatacactgatgactgatgccactagtccatcgtggagctcggttgaggaagctcatcgatctcgttgtaccgaactatctcaaaaaaacatagtgcctgtttgtctggatagctgctcggccacaggcacagctgtctggccccgggcaccatccaaacaatcccatatagagcgtgtttggacgcagattcgtaggcctgtaaagcaaacacgtcccaattanntgaact

SEQ ID NO: 2308 - DNA, 348 bp, Zea mays
tcttcaatagagtcttgcatgttccactccatcaaaggcgtgctcataaatccattcgccttggtcctcaaggtgacttaggaagaggaatctcgatttgtgggaagcaacacgtttcaaatgatattttgccagaagttactttgaatagtcatcatggtcaaacatcagaaaactcaagagacagttcatttacaggagtgacaagtaatccaacaggcttcaaagccggtaatacatcttggggaatggtggatctttcttcaccagtaccgtcaactataggtcaaacacatacatcctccacagtcagaaaggagatgtgtgctgaagcgcatacattccctg

SEQ ID NO: 2309 - DNA, 402 bp, Zea mays
  misc_feature (358)..(358): n is a, c, g, or t
  misc_feature (362)..(362): n is a, c, g, or t
  misc_feature (373)..(375): n is a, c, g, or t
ggagcagcttctagcgcgactcttgttggtgcagcgtagtccattcctgcagagatggagctgggtcccatttgtaagggaatgtaataacatctgcttaaaagtgaaatgtaataacgtatgtatgcaggattttagcctgggaagccaagttgtgcatccgaaccccctggatggtggcttcaagtactaagacacctgccgtggggcggtggagtatgcaggctcacggcacgggaccaggctgagcggctacatggcctccagaccccccaggagacaagtgcctgttcttcaaagccggacctccagttcgttggacgcacatgacttatagttttaaatactaggacacccntttngggagtaaaannnttaaaaaactaggacccccgtttggga

SEQ ID NO: 2310 - DNA, 331 bp, Zea mays
gcatctatgggggtgtagttttgttctctgtgcagaccactagttagaagctaactcgcatgtgtgatggcgtctgcggtttggccgcaagatagagattggctgtgagcgcacgttgtgttgtgtgattcttaaggatattgctccttgctcatgttaccatgcacatgcctcattatttgtggtgcgactgtggcatcacttacaatatcacacacacacgtggatttgtttcatattttcattgttcagtttgagtgtgtcccgtggaacatgtctagtatcctgcagcgatgcctcatgacagtaagcataaaaaataccttgtgga

SEQ ID NO: 2311 - DNA, 393 bp, Zea mays
ctcctcctacccacagccactgcctcgccaccacccgcctccacctccgctccacatccaccatcacccgccgccgccgccgcagcagcagccgcagcagcagcagcatgatgcatgagtaccgagtagccgcagagcagcgcgagaggatcagacgatgccattagcttattagctcctttatttatccttcttcttcttcttcttcttcccttgtaatttcagtgacatcccagttgttaaggagttgactcatcatgcagcagttaggagggattaatatgattgtgtgacctaatctcatcccagccatactcctactacaagtcttcctctcgtcctcgttgctttcttggacgacctacctccattattaggttattagcatcagtg

SEQ ID NO: 2312 - DNA, 309 bp, Zea mays
ggtcggcggatcacactaacccaactgcaagccctagccatgtccgccgccaccgccgacgaacccagcgtcgcaatggaggagcagcccggaaaggagagcgaggaagccgccgatgcaatggaagagcagctcggaaaggagagcgaggaggcggcagagtccgccgaggaagtggggcaagtcgaggaggagcccgaggagggcgtcgaccccgccgaggcaatggagaaggctggagaggaggcggaggccgaagagggggcgtcgctgcggccggcgctgccggtggggagggtcaagcggatc

SEQ ID NO: 2313 - DNA, 377 bp, Zea mays
  misc_feature (368)..(368): n is a, c, g, or t
gctccgaccactgcagaaccttctcatgcagcgaaaccagaaccgattcaaagcaagacaagggcttgggcaccggatgacatatttcgaccacagagcttacccagcatctccaagcagaccagcttcccagcaagcattggtaaccgctggcaggatatgggaatgagtgctgcacagcagggaattctttcattgccgctgtcgtgccccatttgctgtgacgatcttgacctgacagattcgagcttctgtccctgtccttgtgggtttcacatgtgcctcttctgccacaacaggatcttggtggaagatgggcgctgcccaggttgcaggaagcaatacaacacagtttcaagaactgtcancgacataaa

SEQ ID NO: 2314 - DNA, 512 bp, Zea mays
tggcggcaggcagggaggttctattaccgccgcgctgttcctgaaacaggtacatttctgtttgtttttttcttttcttttgacacgcctaataaatacattatgaaatttgatcagagcgataggaccattggagtggtgagagattaagaatccgccacgatagtgaacactttgacaggacagacttccagagcagtggtaacggcatgaacgccgcttttgtgtccctcccttgttgcagttcgtcgacgacaaggtccagtggatgcacatcgacatggccgggccagtgtggagcgacaagaagcgggccgccaccgggttcggcgtttccaccctggtggagtgggttctcaacaactcgtcctcgtcgtgaacaaaacccatacctcccctcgtatcacaatgcctttccatgcgtttttattttgttcctcctcttttgtgctaccattccatagttgcaaactgcagagcgcctcttggcatgtgataccgttgtgatagaa

SEQ ID NO: 2315 - DNA, 655 bp, Zea mays
  misc_feature (55)..(55): n is a, c, g, or t
ccacgccctcaggctgcacggtgacgaaaacataaacctgaaatggatcacatanagctgcaagagcaactccaatagttatgtaaattttagttctctaaatcatagatttaagaagttgttaaataattttgggagtaaaaaatgtgggttcttcaatagttctttaaatataggttgtagttttgttttgtatctatccatataaaaaaataaagtcacaaatgtaatcaattacctttattatctacataatgcagtaaacatttttgtttaggaagtttctaaatggttgccaaatatagagaggaaataaggttagatgagaaattgttaaatttagaaagttcatttagagaactgttggagatgagtttttgtgttaactacttaaattgttaatttaggaagtctattagagaaatactggagttgctctaatgagggcaaaaaactgaatgtcattgagattctgcaggcaatgaacagattcagctcaaacggccgatcgacatccaacactaaccgggttgctgctctcagccttgaaaattatcttctccgtgttgagcagcctcctgttcttaccgccccaatcccaatcgtccacgagtctaatggagaagctcgacggtatctacaggactacagacac

SEQ ID NO: 2316 - DNA, 715 bp, Zea mays
  misc_feature (668)..(680): n is a, c, g, or t
  misc_feature (686)..(693): n is a, c, g, or t
  misc_feature (696)..(704): n is a, c, g, or t
ttcataacttaagacctttatattggactattgacttggttttcttatgccttaagatatgcagatggatattagagacatgggatttttcggtgatgagtcatttgattgtgtccttgataaaggtaaattattatcatcacgttttataactctaaaacaatattagcatcacctttactcaaaagccattaaactaaaattgtttcattacttcagtgctcaattgaaatctttttttttatgaatgtcatacaaattgatccattatgctacttcatttatgggttagtttgttgtacctttctctttagggaccctggatgctatgatggtaagcactatctaccagttgaactacatagcagccttctgattaggcatgtgttgagatcggtattgctataattttccagtgtgctgatgatgctcctcatggtgctttcaaaatgctagcagaagtggcaaggtttaagacagtttttcctcactctttacctatcaatcaatccagattgatgtatcaattttcctgaatttatgtatgctgtatattcgtgcaggcttttgatgcctcatgggatctacttattggtacatcctctgagttcaaaaaatattctgttcctgaatcctaacgagatcattatatgaagagagattgtctnnnnnnnnnnnnnatatgnnnnnnnnaannnnnnnnncccacttctga

SEQ ID NO: 2317 - DNA, 360 bp, Zea mays
gtttttattctggatatgatgagttatgttattgtaatttttctgctttatccctgatgcatgtttatgaaatgtgattattgaaatgtccatgatatgggttgtgttcgatcaattgggaaagttaagttcaggttctatggaactcaacagaccttgttaagttatctggtacacatgcataactatgtgaggtcattaagacaaagattggtgttgggggcctcttatgctgaagatcacttattagcaaagatcatctatctaacacatattgcttctgcattaacaagtatatttcaggaatgttcccactaacggacgaagctaagcttcggctaaagcagtgtacaaaggcac

SEQ ID NO: 2318 - DNA, 361 bp, Zea mays
tcactccctcctttttatgggaccaaatgaccatacatgacggaaaagctagcttattattggtgtgcatgcgcatctatcccccctctcttcttgatctgatctgctacctctagctctctcacccgatctgctgatctgtgtccatacatgcaataatgaggttgttgtccaaggcgcataatttatttttgctggatttttcatttttctcataatgatttaacctttattttttttggtttttggtttgggctttgtggagtgaattgaagactaaaaggctaagagtgtgcgtgttaaatggggttttattttttgtaaagaggatttgcatgctcttgcatggcgttgcgcttgg

SEQ ID NO: 2319 - DNA, 691 bp, Zea mays
  misc_feature (327)..(327): n is a, c, g, or t
  misc_feature (542)..(545): n is a, c, g, or t
  misc_feature (556)..(561): n is a, c, g, or t
  misc_feature (565)..(569): n is a, c, g, or t
  misc_feature (584)..(586): n is a, c, g, or t
  misc_feature (651)..(664): n is a, c, g, or t
  misc_feature (672)..(688): n is a, c, g, or t
ttgctggttagtattgccacagttcaatggagctgcacatgtatatgagcattttgtgaggccaatgattgtaaatcagcaagttgtaaacatctggtatattccaaagaaggatgaatcaagtagacctgatgatgtaatttcagctgcacagaggtacattgagcaaaatggatcaaaagcgtttgagaatcttgttaacaaggtattatctgtttcctgttaaattttaccattctcttttgtgaaaatagtggacacttgcaccagttaggtttttttttgtgctgtgagaagcacagaaaaatgactctacaagtctacagngatgatgctgccctagtgtttaatgatattgcagtgtggtttttattatccatactacggaattcagttaacaactgtcattgtgttctatcaaatattgtttctgtgatttcctacattctaaaaaaatcaacaactggggaaggactgcctccatggttttgcacattttcacattcttaggcctttaaaccttactgaaatgcttattaccnnnntgagctttaannnnnncaannnnntgggctttatcttgnnnaaattgtgtaaggaaccctctacaacaaaaccgagggaaaaattaggggacctaaagtttgacannnnnnnnnnnnnntgtcagcnnnnnnnnnnnnnnnnnctt

SEQ ID NO: 2320 - DNA, 636 bp, Zea mays
ttctgcccacggcactactccgtagactttggtaatgtcttggtgttgttgctgacaacttattggtaaatttggtagatgtgcactaaattgtatcattaggcttatgagattagagcggttttttataaataatcttgctgtgctttactcggtatataggattgtgtttaaaaaattagctacattttagtccccctaaaaatgtttttttttcctgtgaaccagttctatgtagtggtttattatggtattcctacattttagttatatgtacgtaagcaaactactacattaattgttattttgtttagaatagaaaaggcagatggatgttttgaagtatataatgatatgaacattacatttttttaaactccatgttcagttactcacccaagacctatgaactgcagctcgacgcagcagatttcattcaactgcagctcggcgcagcagatttcatcagtaaatagatgttgcaggatggagcatagaaatgtacatttcagtattagttgaaccccaagaggttggtaaacatctaatacattcctattccattattggtgaacttctgttgctatgtattacataaacaaatctcagaatcgaggtaaaaatttgttgtccaac

SEQ ID NO: 2321 - DNA, 361 bp, Zea mays
cgagatgagcggtgaggcggcggccgtgggcggaggcgaaggagaggcgaatggcatcccgccgaacgtcaccatctatatcaacaacctcaacgagaagatcaagctcgaaggtctcctactcccccgctccgctccttcgctaaaccctagggatttatgtcgatttgtctttagtttttgcggctccgtcgggggatttgcatcttagaatgtcgatgtgggcgccgtgccctagtagttgggcaatggaaatctctggcgtttttccatgggtttggggtgggctggtgttagtccatggaatgtacgcgtgagtatattgtgcccgactagtctgtgcatgtgatggtcatagagt

SEQ ID NO: 2322 - DNA, 407 bp, Zea mays
tttcggctgctgcggtgtctcggcggcacgtctacgctgtcaagagctgcggagtgaagaagcgcccgtcgagggcgcggttgctgggccgggtcccgctccgggacatcaccaacctggttcaaacgagcttggcggtcgcgggacctgaggctcctctcgggcaggaggtttcgccggctctggcgacgtagttggccaagcccgatgtggtgctgcggcggtgttgagactagcagcactgctggatggagtcgctgctgccccggcggctaaagcggacagatactccctccggaaggggttcagctaggcgcccactgtacagtatagaacagttcttgcttcgtggcccaatttctcttcggttttggttgcattcgattggactggattggttggttgat

SEQ ID NO: 2323 - DNA, 413 bp, Zea mays
agctgtaggccgagcgagctccagatacgagcatgaagggatggagtcgtgatgctggagagacacaaccagaggagtgatggccggagccgtacgcggagctcacaaccagctccatggaagatgaagacagcgtgtcttccgagacctggcaacaccggaaggacaactcacgtggctgtgggtgtcaactcctggaggctatcatgatgggggataagcacatagtacatggacgttacgtgggaaaaaatccacctaatgagcggcggccagatttttcttcttgctgcgcgagcggatgagaacgacggggtataaaaatcggaggagagagaacggcgggaggaacggctggatattttcttttttactcgaaaatttaaatataaacgtaaatatcagctcgagat

SEQ ID NO: 2324 - DNA, 408 bp, Zea mays
ccagctgtgcgctgcctgcgacggcctgaggtcgcagctgcgcggcgccaccatcgtctacaccgacgtcttgctcgtcaagtacgacctcatcgccaaccacaccgcctacggtgagtgacgtcgtctcatcgatgacctccgatccatgagtgcatccaggaggcctcggtctcatcgatcggtccacggtttcagggttcgaggagccgctcatggcgtgctgcggctacggcgggccgccctacaactacaacgccaacgtgagctgcctcggcccgggattccgggtgtgcgaggacggcaccaagttcgtcagctgggacggcgtgcactacaccgacgccgcaaacgcccttgttgctgcgaagatcttctccggccaattctccacgccccaaatgccct

SEQ ID NO: 2325 - DNA, 349 bp, Zea mays
aattctggcgatccacggaccagtgtttggcctaccaatatcaaagaaaaaccattgattgaggagacccggagggcaattctggaagcacagtcgagcagattcaatgatttccaaggcaagaaggtatctcgtgattcggaatggatgacaattacttcatcctttgactccaatgttgcttcttctgatgttcccaaggaactgtccactggaaatactggatcacgagaatggagctgtaagggacaatcttttgctggaaatcagactcaagacaagttattttctgacagacaaacagaagttcgaaaagcgccaggagcaagaactttggttcactgcttca

SEQ ID NO: 2326 - DNA, 559 bp, Zea mays
tctcatgtcacatttcaataaaatcggagagtgccttgtttctggttatatataaaaaagtgcatattgtgatgatggttaaacaccttttctgaatgatgaaaaacgtttctgagttattacgaaggctaacatgttctggttaccatggtggtttccatactaattattatacatcgtgtaaatgttgcaggagcctctttcctcttcagcagccgagtttcagtctggcagccccattttacaagagaaaattaaggttcttgtgtgtcaggctgatctaatatgtaattactgcatttttatgtggttatgcaacatgccattgtctagtttgttcaactagtctcctactttgtctgtagttgctcggcgaacaatatggtgctttaagacgggcacgtggagatggaaactgctttcatcgaagctttatttatgttttcctacctggtagtatctgcagtgtacttttcacaaatattatcgttcataattcaggctatgatcctttcttatatttgcttacaggaacacatcctagagagacaagacaaag

SEQ ID NO: 2327 - DNA, 681 bp, Zea mays
tgctggggtgggggacgcatctgtgatctcatctggatttctctattcctccgcatcgtgcaggccgcccagctacagggacggcccgaggacggcgaccacctcgcggagcgcgtcggcggtgtcgccgtagcgcacctgcgtcagcgggaggcttctgctctccactgcgtcgccaagctgccattcgtgcaagcgcgtcttgttattaatcagaaaaaaggcatcaagcagtatcaacaaactaattgcctacgtgtcgcagtcataaagattactatgcatgtgtagactgtagaggtcatcaaacgttgattttaatatataagtttactacgcatgtaaaaacaaaaactaattttgacgtggagtggcagtacgtagctgcgttccaaaagaggacttgatgcacattctaaaaaaaacaaaaacaaaaaagacttgatgcaatgggccaagcaagacatgctgtgcgaaaaaaaaagaggtggaagggcgtgtggaggattcctcactcacctcatccatggagtagaagaacttgttggcgacgacagtgagcgccttcttgtgctcttcgccctggcagaaggcgatcaagcggctgaggtcgatgcacaggaaggtggccttgagccggaggtccctcccaacgaggtcccacgactcctcgtcgtccgt

SEQ ID NO: 2328 - DNA, 345 bp, Zea mays
cgcttcgtgttcgacggcaagcggctgaaagggaagcagacgccggaggagctcgggatgaagaaccgggacaagatcgactttttcgttgatctgagcgcgacggacgacggcggcgacgtggaggagccggccgtgtacttgacggtgaaggtggtggtgctggacatgaaagggcgtacgatggagcgcactttgcagagtacccacaagctgcaggtcgttatggatgcctactacgacagcgtgccggacgtctcacgcggcgtgggcaagttcctatacgacggcgggcagttgcagggctggcagacgctcgcacagctgaagatggatgacaaggac

SEQ ID NO: 2329 - DNA, 388 bp, Zea mays
ctggggcatatgctgccccacccggtgccccttcgcaaagccacggtgccaatggacatgtgcagaactggaatcccggcaactcagtctatcccccagccccaggaccaggaacatatccaggccagatgtactcatctccctcacagtatgcagcgtcagggggcttccctaataccccatccactgctccgccacactatgcagcatcagggggcttccctaacaccccactcccagctcttcctggtgctcctacacaacagttgcacgcttcgcagcagatgctgcctcagcatggaaatcagtcgggaggcgcatccggaactagccaaccggcgccaccagcatcatactaccgttgagttgaaatcttctttcgctattg

SEQ ID NO: 2330 - DNA, 444 bp, Zea mays
tttgttcttttgctacctttgttaaacaacatcagatcattcgtattgtatccttcctcggattgcttcttttgttctactacaaatatgctccacatggcagggagaggtatgctcctaaatttcttattttgtgcattgtgaaatgattgttctaacaacatcaagtttgtgttcttcatataatctatctcagattgctctgtgttttgcaggtctcgaggtcaagcctggacccactgtcaagtgtgtgcttggacatgactttatcctgcactttccagtgtaaatctcattgtaatgtgtacttacttttctcagttggatttgctctgtatacttacttggatttaatcctgtaggctgcacttggggaatcaaagaaaagtgaaagtgccatgtcaaagttgatgaccagaagcttgctattggaaccctctctat

SEQ ID NO: 2331 - DNA, 395 bp, Zea mays
cagtcgggctcgggcaacgcattattgccgttgccgcagatgcccggcgggtggcagcaaaggaccccaactctacggctgctagagttgcctcgccatggcgcggagtcctctgcggcatcgtctccgtcatcatcgtcttccgccaagagggaggcgcgttcagctgctttggatctcgatctgtgacctaaaggcaaaatcattcatatcaaaaggaaagttcaaacgattctttcttttccgcttgtttcgggttcttcctatatattgccttcttctctcttttgattgatccattatataacttttgatgataggatctaggatttgacgttttcatttccttgtttttggcccttcactttttttttctctctcttttgatgggttgg

SEQ ID NO: 2332 - DNA, 399 bp, Zea mays
ctaggcttcaggggctactcttccagatggcagataagctctcggtcctggtggagatcaatgagagggcatacgaggcaagaactggtggtgctctcgagggggtaccgcccaggcgcaggggcgagggtcaggataatatgggaaagtggcaggataactttgtctcgtcacaggggcggcagggtggtggcaacaggtttggatactccagcagaggtgcaatatctggtcaaagtggtggtggacaccagagggacaggggcaatcagggttaccgcgggggctatggtggcgtttcaaggtttcaggatgcaaggggtcgcaaccagtctaatccatcaggcagaggtggtgatggtggtgcacgcatggtgaacctgaacagggttggtagag

SEQ ID NO: 2333 - DNA, 691 bp, Zea mays
  misc_feature (488)..(490): n is a, c, g, or t
  misc_feature (585)..(585): n is a, c, g, or t
  misc_feature (588)..(592): n is a, c, g, or t
  misc_feature (619)..(632): n is a, c, g, or t
  misc_feature (637)..(640): n is a, c, g, or t
  misc_feature (645)..(653): n is a, c, g, or t
  misc_feature (658)..(687): n is a, c, g, or t
cggagagacagaggcttcaaaactgagccggccgaccgagtattgtagggcgtcaagaggtaaacatgatgtcgtttaatccttgatagtttgcgtttatcagcatctcttgtttccttttttattaaattggtttcttaggaaatgttgttttgattcccctagcctaaacttgctgtgtagatcgattgatctgggagggagagaaaagggtaaagaaatacttgctggctgctgctggccatggaaactggatgcttcttccaaatgtggtaggccgtttttttgtttctgcgatcaaattaaaaagttgaacgttcttcctaatgtgcaatatccactggaatttgcattttttttcgtttcacttttcttgtcttgtggaatctgttcgcaaggatttgtgaaactttattgttttcttcccagaaacaaaagaaatctaaaaccatggggaaaaagtgtctttcttgattctctttttcggnnngaaatgaattgagagggattagaggagattaaatcttaatctcctccaatctcctatccctaaaagtttgttcggttgtgtctgtattgaagggnttnnnnnaaattaaatctctttttattcaatttnnnnnnnnnnnnnntttannnnccttnnnnnnnnnttgannnnnnnnnnnnnnnnnnnnnnnnnnnnnnataa

SEQ ID NO: 2334 - DNA, 355 bp, Zea mays
  misc_feature (348)..(352): n is a, c, g, or t
aattcccgaatccccccgccagcctccgcaaaattccccaatcccaccgccagcctccgcactcgcctcggaacctagccccgtcgactccttcagatccggcgggatcgccggctcctaccctcggtcgccacgttccggcatctcggctccccggcgtcctctacccggcttctacacctgccatcttccccaggcggcgtcccgacgaatcgcttggtcgacaggctacatcaccaccaagccagcatcgacgactcgaaggattcgtgtcgtcgtcgatcgccgatagccggtcgccggtcgccggtcgcctcttcgtagatcgaattcgttctgtgattattnnnnntgc

SEQ ID NO: 2335 - DNA, 457 bp, Zea mays
cccctcctgcggaaaccaatatcaactcctttccactacatgagtctagtgctggacagaatgatgcaggatgcagtctgaatatctctcataatttttctgcaatggtaagcccttaagagaaagctaattatccatattccatacctttcgcctatagtttgccttggtgcgcttatgcttgtgacttataggttgaagatttgaaaaatgatctcccagtaattggtcgatatcttgagggaaacttgcttccttcagatgttgcaagcttcctagagagggtgagcacgatgatcaagagttataccccaccacagggcagccgaaggaaagatcgagtaagtcatggccccgctgacccagtcaggtcaaagaacccaagaaaaaggggaagacattcactctttcaagattcttttcctcatcggtatctaggcaccccggtaaacatagt

SEQ ID NO: 2336 - DNA, 572 bp, Zea mays
gtgcctggcctactgatacaggctgtacaagtcaagctggaaatgctgatgaatcatgggtaaatgctgctgaaggtagtagcagtcatgttcaatcatcatccggttctacgaagaagttggatggacattgtaaagaggtactaactgctacttgtaccatggctgtgttgtttcgtctttcttttctgattaatcatctttgtaaggctagtgtcctattttgaattttctttattacttttttggggctagatcaaagagtcatcagcagcatatggcagtgatgaagaagaggaagaagaagctgatgtccgtcctaattcagggagtgatgaggacctaagtgaagaagacaccatggagatcgatgaggaggtgagatgaagtctttatttggattgttacaggctttttcctttttttcttttatcctaaacagtaggtaaaaggattcacccatgtagttgctttctctgcactctacgctctggatccctttgtaagcatatttgtggatgtttgcatggcagatggaagggtctgtggacgaggactgcaacaggtccgat

SEQ ID NO: 2337 - DNA, 424 bp, Zea mays
tgcgaggtcagaggcctctgaggagcagaaaccacctagcggggatgatgatgtataccatttcataaactacgttccagtggatggtgtcctgtacgagcttgatgggctaaaggaaggaccaataagtctagggaaatgcccaggtggtgttggtgatgcagggtggtggcttaggctagcgcagcctgtgatcaaagagcacatcgacctgttctctcagaacgagataagattcagcgtgatggcgatcttgaagaaccggaaggagatgttcacggtggagatcaaagaactccagaggaagagggagggcctcttgcagcagatgggcgatcccaacgcaagcaggcatgttgagcagtcactcgcggaggtggcagctcagatcgagtctgtgacggagaagatcataatggaggag

SEQ ID NO: 2338 - DNA, 539 bp, Zea mays
atccccagtacaagaggtacgtgctgcatacattttaccttgttatgatacgccgtgagacttgcttaatatttctggtttggtgttcactcgtgctggaacgtttcgaatgttattttatatgataggagtgccgccttcatgcgaaagcaagctgggaagccaggggtacatgggggcaaatcaagcagagaacctccgctggagggttcgtctctgggaggtacagtaccacctgacgatgctgttactaacaatgatggtcagaaacctgatggttcagccacagagaagctgcaaattttgtctgctgttaagtctctcaagagaaaccttggtgcattcaaaaactcaaagacaggtgaccgataaaaagagcatcatttttgttccggctattacacttaatcagtgaaatccctttgttggaaaatggtctcagttatatagtcttcgagatagtttcatggttatgtatgcttatctctgattctgtagacacgcgtctaatctttggattttcagttttgacactatcc

SEQ ID NO: 2339 - DNA, 660 bp, Zea mays
taatcacagttctcgaatgcgatatgatctttgactcggagtattgaagactaatttagtttgagtttgagattagttgtttttgtcattaataaactcacattagcgtctggttacgagctcactactagattttagatctccatttttggtgtacttctgctgcatgtgcctcccatagttgcggatttgcaggtatcacctgattccttttgatttttggattgagatacagtaaaagttatctttgcctgtttccaccacactgtatcatacaggtaaacatgaatacaaggctggcttgatctggcaagtgctcgccattctatgggcccatcacacttttcgagtacactgtttgatcatgaagagcagtctgctgccactaaacttgaggttgttgatcatgattgtctgaaaatttatcgggtaaatgacttctctactatttgagttaattgatgctatctatctatctatctatcaacattgcagaactaattctagattttaggaatgcttttgtttctcttgaatttggttcctcagttcaagttttgtttttattgaagcatacatttacataaaattagaatgtcaattccatacacaaatcactgatgggtttttgcttgtagggatatgccttgggatggagaa

SEQ ID NO: 2340 - DNA, 632 bp, Zea mays
  misc_feature (511)..(629): n is a, c, g, or t
ctgccaaagtcgtcgttgccacatggaagcaccggtacaccgctcgacccttctacaggtgagcctccatcccgctcatggcagttcacctgtttccattcggccatccgacactccgaccgtctgtctgactgatgtgccgatgtggtgatgctcgtgagcctagactcctagaacccatcaggtttactgcacctgttccagtgtccctagtcctagttgttcctggagagtggcgactatcagcttcagagcttccccaaatcagccacttgaaaggtcagcatccacattcactgtccgagcatctcttattttgtttagtcaggtgttcatgtggcaaatggaatttaggatttggtagcaccatggtccatgtatgtaaatcacatcactgagatggaggatggtttaaatgatgatgaaatggaatatccatttgagggtgatgctaataccagtaacaatgatcagatagtagaggaccatgctgatgatgcccctattgctnnnnnnnnnnnnnnnnnnnnnnnnnnnnnnnnnnnnnnnnnnnnnnnnnnnnnnnnnnnnnnnnnnnnnnnnnnnnnnnnnnnnnnnnnnnnnnnnnnnnnnnnnnnnnnnnnnnnnnntga

SEQ ID NO: 2341 - DNA, 405 bp, Zea mays
tagctaatggttagctggactattagatgagacatgagagtgtttggatgtctctaactaaaaataaataatatctaaactattagttgggttattcggatgtcttcagctaattttagcagctaattattagctctagtgcattcaaacagggtctaagtatagactctagaaaaaaaaggaacatatttctatcctgggtttacactgcttattatgtgccatgtgtattgttgtacccgtgccttctcatgactccttaccaaaggatttgaggtgttaactcagattccattcatattgagaccattttgtgcttataggttgctgacttgctgatcagttactgtgtctgaaactattctcctttatgttttgctgcctcattatggaaacacctctgta

SEQ ID NO: 2342 - DNA, 376 bp, Zea mays
cactgagattttaaaatttccaatttctcaaggatattgttgcctttgatactataatatgtagcttacatgatatttgccctgtagattcaaaaatttcaatttgtcaaggataatgttgtcttgtgatattctaatatctaacttcaatgatttctgtcctgtagattcaagcggattggcggcaggccatatcgctgaagaaggcaatagaagataaaattgccaaaggtgagacaacgtaatcagctgtgcttggccacacttgttctgattaacttgcattggattctttgcaaaccaaatgctttgatcacttgaacgccctcatcggggccatgttcatgaaatgcggtgtagagctaaagacaatttc

SEQ ID NO: 2343 - DNA, 487 bp, Zea mays
caacctttgtaaggtgagcatcatactgttcttttggacatgcatgtggtgaaagcatatatatatattttgttcatttcgaagctggctggccttggtttatagtctgaaggagttctacttcggggaatctggatcttgcagaggttaccttctctcatgcttagggttttgatttgggcattgaggctatcttcatattggtgacagaagaaatgtcgttgtgtatgtttctgtctaaaatcggctgtagcttgtagagttgatgaatatagttgacatgcttatctgggctgtgaagttttgaatgtttacataatgtttcatgtgccttatatgtggaccctgcccattttctccccgctccccaacatcatgtaattcattagttaaggctcgtgttgtgtatacttagtctgtcgagtttaaggcctatcggcaattctgcttctatacagttgtttggtgaaaccgttgctggtaggat

SEQ ID NO: 2344 - DNA, 450 bp, Zea mays
aatgaggattcaaacgatgagaacagagacaatattgagagtaaggttgaatctaagcaaattactcaagacagcaggccaaaagagggtcagactccaaaaccttatttttcatagttcatactttcatagtaccaatttaatctttatgatttgtcaggggcagttggggactaatacttatttccttgcaatgtgcagtcagcgaagctgttccagtccagaaccaagctgccgcgcagaagctactgcagaaaatgtcgcaggccgtgcctgaggacaggcgcggtcgcggtcatagattcaagggcaaaggcaaggaagaagatgctcaggtttttaccctcgatgaatgggagaagaggaaagccatcagttcgaagcccgctgcggaaagctacgtgcatgacactagccgagacgaggagctggcgaggcaactgcaggaac

SEQ ID NO: 2345 - DNA, 353 bp, Zea mays
  misc_feature (348)..(349): n is a, c, g, or t
gagggtcgggtctagtaggagcagggggcctggcagcgtggtggtggagaacttcacgctggacatgctccacgcctcgacggacgggttctccgacgacagccagatcgggaccggcagcttcgggtccgtgtgccgtggcaccctccccgacgggcgcgaggtcgcgatcaagcacatcgaggactcggcaaaggcatcaagctcagtggcgtggcactgcgaccgagagacggcgttcgacttggagctgaacgcgctggcgcgcgccaaccacaagaacatcgtgtgcctgctgggctgctgcgccgactccggcgagcgtgtgctagtgtacgagttcatggnnaata

SEQ ID NO: 2346 - DNA, 370 bp, Zea mays
ttcggtaattcggttctggaaccgagtttaggatacggtgggtagctggtttatcagcgtccttggttcttgtatgagctgggtgggtagcgattggtaactcgaattagctccgcctgccatcgatggttaattgagctccaggaccatcgccatggtggttccaaggaagagccatgatcggcttatatgtagcacagcttcttgtgaatcgtgattgagtcacggccgacggatggagggagaagatattggtattgccacaaagcaattgaagggatgacctgctcccttttgggcaaaaaggtagatcatacagttgttggggagacgaagacatgtctggttgtcataaaaataactggaactg

SEQ ID NO: 2347 - DNA, 255 bp, Zea mays
ggcgggtgctgccttagtacaaggcgcatagggctcgcggcgttggcactggcgctgacacgcgcgtcgtcaacgttctctgcgaatgcaatgtcccgatgggtgctgggtgcaccaacacatgtttaaactagtgcagccactcagttattcttagctcagactcagattattgagtgtcaattttggaaacggcaaattcaggttgtaagagtccatggatatgaggctgatgatgtggtggctaccttgaca

SEQ ID NO: 2348 - DNA, 770 bp, Zea mays
tggatccagcgtccaggggcaccgttcacatttattctcagcatagacaagcagcaaagttggtctgcgaccaaaggccattggggacgacccacgatagggaggcagaaatatctctctctactagcctactgggtcttgaacatgtggcggatcaggtcgacgacgcggttgctgtagccccactcgttgtcgtaccacgagacgagcttgatgaagtggtcgttcagggcaatcccggccttggcgtcgaagatgctcgacctaggtgagtggagacagccaagtgacaaaatgaatcagaatatgtccaaacaaattccacaaacgacacaatcagaactcaaacataagcgtgtgctataatggtcagttatgttggattcctaataaatggtgccagagcagagagcccatacctgctgtcaccggtgaagtcggtggaaaccagatcctcctccacgtagcccatgatacccttgagtgggccctcagaagcggccctgtaaagcaatagtaattatgtcaatgctattactgtcaatcctaaccgaagcagatggagaaagtactatgtatgatcaagacgatgcagaaaacagacaacattgagcatcaaatgtgatagtagaaataaatccaacaaggaatgttattgcattcatagacattggtttataaaaaagaaaaagaaattacactcacactgactgagtattaattaaaaatatataagcttacttaatagctttcttgatttcctcgtagga

SEQ ID NO: 2349 - DNA, 468 bp, Zea mays
  misc_feature (382)..(382): n is a, c, g, or t
agaccggatctccttgatcaacctgacaaagagatactttagacatggttctaaaaagttcaagtttgcgattgcttgaattgatatatacacgggagtactatcataattttttgaagttgatatatacacgggagtacttggacatggttctaaaaagttcaggtttgagattcatgtacatttgaaaaagttccacttacttgttaacatcagaaagtgatgactgcatgcttactaggtttgccatcagctccttagcagccccagcatcgacattcttcacaaacaaactaatgtatttagaatgatatatatctgaaacatgtggtacatatatgcaaggcacatgtgaaaaaaaggaagtacctcatagtcatancgtgagtaataatggcgaccatatgtggcccaatgctgacggacaatatcttcaacagtgacaagcttatctcctccaaggttgtc

SEQ ID NO: 2350 - DNA, 376 bp, Zea mays
atgttgatggctctgtgtccaagaaccagggcatccgatacctcttcggagatggttcacgactggtatgtagacctgtattgtttcagatatcctctattttatgtcttgaaccaaaacaaagggtctggggtgaaaaccttgttccgcggtcaactgtacatcttttttttgcaatattatcagtcagtacatgataagtctgagccttggtcatggatatatttgagatatctgactatatcatactggccacaagttgtgctggtgagctaacatggatttttggcgttctaggtgttccgtctctccggaaccggttctgttggtgccaccatccgtgtctacatcgagcaatacgagaaggattcctcca

SEQ ID NO: 2351 - DNA, 751 bp, Zea mays
caccacctgaaggcatttgcctcgtatatcttgtttgtccttttctttttgtagtgtcaaagtatcataatttgatatcttttgttgttccttacagtccgttatcaaaaagaagtatgggcaagatgccacgaatgttggtgacgaaggtggttttgctccgaacatccaggttagtttctgatttcacagttggggacatctgtttttttatttgtttcactttactggaacattggtctttatgtaggtaaaactgaaaacgatgttttgttatgagagttaatctgtttcaatttcctgatactaggagaacaaggaaggacttgagctcttgaaaactgcaattgagaaggctggatacactggcaaggttcaccagatatttgttttgttcagtattcacctgagacttgaagtttgtcatatgtttttcttatctctatctgaatgctaggttgtcatcggaatggatgttgctgcttcggagttttacagtgacaaggaccaaacctatgacctcaactttaaggaggaggtagaccattgttttctttctgtgaacaagttaataaacttgccagacatgtccctaactaaacattctgttttttttgtagaataatgatggttcacagaagatatctggcgatagcttaaagaatgtatacaaatcttttgtgagcgaataccccattgtttcgattgaagatccttttgaccaggatgactgggttcactatgctaagat

SEQ ID NO: 2352 - DNA, 751 bp, Zea mays
  misc_feature (436)..(436): n is a, c, g, or t
  misc_feature (447)..(447): n is a, c, g, or t
  misc_feature (507)..(507): n is a, c, g, or t
caccacctgaaggcatttgcctcgtatatcttgtttgtccttttctttttgtagtgtcaaagtatcataatttgatatcttttgttgttccttacagtccgttatcaaaaagaagtatgggcaagatgccacgaatgttggtgacgaaggtggttttgctccgaacatccaggttagtttctgatttcacagttggggacatctgtttttttatttgtttcactttactggaacattggtctttatgtaggtaaaactgaaaacgatgttttgttatgagagttaatctgtttcaatttcctgatactaggagaacaaggaaggacttgagctcttgaaaactgcaattgagaaggctggatacactggcaaggttcaccagatatttgttttgttcagtattcacctgagacttgaagtttgtcatatgtttttnttatctctatntgaatgctaggttgtcatcggaatggatgttgctgcttcggagttttacagtgacaaggnccaaacctatgacctcaactttaaggaggaggtagaccattgttttctttctgtgaacaagttaataaacttgccagacatgtccctaactaaacattcttttttttttgtagaataatgatggttcacagaagatatctggcgatagcttaaagaatgtatacaaatcttttgtgagcgaataccccattgtttcgattgaagatccttttgaccaggatgactgggttcactatgctaagat

SEQ ID NO: 2353 - DNA, 1130 bp, Zea mays
  misc_feature (53)..(53): n is a, c, g, or t
  misc_feature (55)..(56): n is a, c, g, or t
  misc_feature (1074)..(1075): n is a, c, g, or t
  misc_feature (1078)..(1078): n is a, c, g, or t
acttgtctatatgaaatgcatttgcgtggattcacaaagcacaactcaagccntnnaaacacccaggaacttacattggtgctgtgtcaaagcttgaccatctaaaggtactgttacgaacagactagctataagtctgcgaaagtgtcctcatgcatttgtttaggttttgcaactatgccaagtaatgctgccctagtctattagttcataggcataaacacagattttactttgtgcttacataaatgtttttgctcagtaaacttgtcagtggtattggtcgtcttagactttttggcatgtgtttgttgttggaatataatataagtgaattgtcaaccttctcctatcagcttaagcttttggatagaaagaattggttggtgcatgtaacttaatatggtattaaagacagaggtcatgaattcgaatcctgactagcacaattaaataaaacccaaaagcttaagcttataggaagagatggataattcacttatattatattctaacatttatgactaaactctttgtttgacctgcataaactcccttcacaggaacttggagtgaactgtatagagctaatgccctgccatgagttcaatgagctagagtacttcagctcctcttcgaagtatgtggatttggattacagtatatagatgccatcagttttataggactctggaactgatatctttttgtttcattgagcatgatcgtatatgaccttttcgttctattttccatgatatttcccccatttccagatttgctagtgtgatctccaattttgtgccttacccttatagcttgatcacaactgacttatattcatatattgacacattatttcatataattgttcatccttgtgccaggatgaacttctggggatattccacaataaattttttctcaccaatggcaagatattcttcaagtggcataagagactctggatgtggtgccataaatgaatttaaagcttttgtaagggaggcccacaaacggggaattgaggtaaccaagccaatttaagttaatggctgaatgctaaccgaaatnnaangttccttatatcatttttgacatggagatatgtcactattaggtgatcatgg

SEQ ID NO: 2354 - DNA, 846 bp, Zea mays
cgcacagtttcttgctatccttgctgcaactgactacttgttttcagactcctgaacagttgcacagtgagaaagttccagaaaatcttatccctcataaggttgtgactgctcacttattacttaaattaaactgatgtgtaagtattacacttagagatatatatatatatgtgtcttctgattgagccccctcggttatcctttttaacagacttttaagggcaaccggccatcactaagtttgcttctgcctacactatccgcatatgaggttggacaggttagccacaactcaagaggacattatcaatacatcatttatgcaagtcgttcaatcctcaacaggattttgtgctcatttggggaattaacagtacctatactcttcagcttttatccatctatgagcaccggattgcagttcagggcttcatatggggaattaactcatttgaccagtggggagtggagctagggaaggtatgtgcatgatgttcgtcttgttcagttacatgaactgggccaccattctgcaagtgccatataattttctccccatgctgacatgattgaacttgggacctgattttaattacgttatccctggaatttgatgttttcagtcactcgcttctcaagtgaggaaacagctgcatggaacccggatggaaggaaagcctgttgagggttttaaccacagcacttcaagtttgcttgcacgatatcttgctgtacgctcctttgctatgtcatgtccactaatggtcataataataataaaacccgtaaaattcttaaagtatcatgtctaaagtaaaattggaagcacttaacttcgtcttt

SEQ ID NO: 2355 - DNA, 737 bp, Zea mays
  misc_feature (50)..(56): n is a, c, g, or t
  misc_feature (723)..(726): n is a, c, g, or t
aatacatcatttatgcaagtcgttcaatcctcaacaggattttgtgctcnnnnnnnggaattaacaatacctatactcttcagcttttatccatctatgagcaccggattgcagttcagggcttcatatggggaattaactcatttgaccagtggggagtggagctagggaaggtatgtgcatgatgttcgtcttgttcagttacatgaactgggccaccattctgcaagtgccatataattttctccccatgctgacatgattgaacttgggacctgattttaattacgttatccctggaatttgatgttttcagtcactcgcttctcaagtgaggaaacagctgcatggaacccggatggaaggaaagcctgttgagggttttaaccacagcacttcaagtttgcttgcacgatatcttgctgtacgctcctttgctatgtcatgtccactaatggtcataataataataaaacccgtaaaattcttaaagtatcatgtctaaagtaaaattggaagcacttaacttcgtcttttttttgtaggtcaagccatccaccccgtatgatactaccgtgctgccgaaggtgtaattactcagttgtttttgacatgccaattgctgagttctgacttggcaaggttgagcataagtctttcttcattttgggagttatcacagagccagtttggcagtgctgtagttttggttttacctactcnnnntagaagaaaag

SEQ ID NO: 2356 - DNA, 434 bp, Zea mays
tggaggtcgctcaacaggcaattgacgccgctcatgtggaggctgttagcgccgtcaacggcgtaggcattgtcaaactgatgggaaggagtacaggccatatcgcccttcacgccaccctcagcagtcgggacgtcgactgctgcttgatcccagaggtggatttctacctggaaggcaagggtggcttgttcgagttcctgtacgaacggatcaagaagaaggggcatgctgtcgtcgtggtcgccgaaggagctggccaggaactgattccccggactgacgatcagaagcgggagcaggacgagtccggcaacaccgtcttcctcgacgtaggaccctggctgaagtccgagctgggcagatggtggaagagggaacatcccgacgagctgttcactgtgaagtacattgaccctacgtacatgatccga

SEQ ID NO: 2357 - DNA, 569 bp, Zea mays
ctacctcacagacacacgatccaatcagtgtccacacgcagtgtgtaagagatccacgatcggatccacccacaacaacaatcacactacacttaactaagatgaaattggcacgggcgatcataccttcgggaggcgacgcgacggtatcgtagggcaccaccacctcatccgtaggggtctggatcttgctccactcgatctgctccgcttccccactgcaaaacgccacagcacacataactcggctgacgagtcgatgcgcacaaagcaatcatacagagtgaacctgcgggatctacttctacttacctgaggtagcgtgacacgaggctgatgaacccggacttctcgttctcgctgcgcggaaaaacacactcagaaatcagcaaaaatgggaggcgaagcgatcgggcggcgagatctagtgcggagaggaggggggcactcgcctgatctggtcgagcttggcgacctcggcgcgaagcttgtcgagcttctcgtcgaccgacaccgcggcggtggccatcgtcggggctcgcgaggcttcgaaacgaaaggacgggacg

SEQ ID NO: 2358 - DNA, 776 bp, Zea mays
gccaaaagaatggctcgaaaagcaggtgctctagtatgtctcttattctatgcatgattgcttgtgtattttatggcgctctgtaatttatgttgcttgcgtgttttgtgaattgtgataaatacgatgcattttactatctgtctgcttgtgtgtgctctggttatggtacaaacacgcctgtccagtttagcctattcatgagacttaaccgctcccctggttggaattaattgacaggtcatatttgttgtggacgctagtggtagcatggctctgaatcgtatgcagaatgctaaaggtgcggcgttgaagttgcttgcagaaagctacaccagcagagatcaggtaaacctttacttcatgttgcatatcctgccatgctgaaggtcatcttggattgtgcttcccatttaggatatacatcatttgtgtgtgtggtcgtgtgaatagttcgtataccatcaatgcttattgatctgccttagctttgtgtcttggcatctctctcaggtttcaattattccttttcgtggagattatgctgaggttttgcttccaccatcaagatctatagcaatggcccggaaacgtcttgagaagctaccatgtggtggtggttctcctttagctcatggcctaagtacagtaagaactaagcattgctttgagttttgcaataagctatgtatgatctgataacatagaggtttattcttcaaggctgtcagagtgggtctgaatgctgaaaagagtggcgatgttgggcgtatcat

SEQ ID NO: 2359 - DNA, 418 bp, Zea mays
gtctcttcctacctgaagaaggttggatacaaccctgataagatccacttcgttccaatctctggttttgaaggtgacaacatgattgagaggtccaccaaccttgactggtacaagggcccaaccctacttgaggctctggacttgatcaatgagccaaagaggccttcagacaagcccctgcgtctcccccttcaggatgtgtacaagattggtggtattggaactgtccctgttggacgtgttgagactggtgtcattaagcctggtatggttgttacttttgggcctactggtcttactactgaggttaagtccgttgagatgcaccatgaggctctccaggaggcccttcctggtgacaatgttggcttcaacgtgaagaatgttgctgtgaaggatctgaagcgtgggtatg

SEQ ID NO: 2360 - DNA, 1069 bp, Zea mays
  misc_feature (502)..(506): n is a, c, g, or t
  misc_feature (589)..(592): n is a, c, g, or t
  misc_feature (639)..(642): n is a, c, g, or t
ggtcattcaagtatgcgtgggtgcttgacaagctcaaggctgagcgtgagagaggtattacaattgatattgccctgtggaagttcgagaccaccaagtactactgcactgttattgatgccccgggacaccgtgacttcatcaagaatatgatcactggcacttcccaagctgactgtgctgttcttatcattgactcaaccactggtggttttgaggctggtatctccaaggatggccagacccgtgagcatgctctccttgctttcacacttggtgtgaagcagatgatttgctgctgcaacaaggtatgattccaggaatttctatttattctggttcatgaactgagatgcctgtaaatgtatttcaatagtctagcaatatttatcttctctcagtattactgccttcaagttgaaaatactgcatttgtgctgtgattgaatagctaatgttagttgtatgctagttttgacaaagtgaaacactgattgcttgnnnnntaaaggccatctgcttcctacatgtttatgtatgatagcaatccatctttattacttcgcaagttaacatctttattacctcnnnnattggcataatataatatggttttccaggattttttcccaataggtnnnntgtatttatgatttcacctgtttttagttttttttgtagttggagtacttgcaatgtgtatgtgctgaaagcacaaggaattgcataattaactgttattatatgattgcaatttggtacttattttactttgtcaattagtaggatttgttggcatgcacctgatgagctcttatttctgtatacttgctttagatttttatacagcctgcacttgttagcatgaataaattttggaaatatgtttttctgtctggggattattgttgttgacaccccaagaaatttcatgccataaaaacaagtgtattgggccagttagttttaattagtatgttattgcatttttaatgtttgcttgctgtttaggttgctagtttcattgaactaatcatattgtttgggttttgctgttttacagatggat

SEQ ID NO: 2361 - DNA, 881 bp, Zea mays
gcgccgctgccatgtccgtacctcctgtcccgtccatccaacccccatcttttcctgtacctactccaatctccatgattcgaccaaacaaaaaagagggtcttttatgatttattattatttatccatcttgctggtgacaacgtctgttacagacccgtttcttgatgcagagtcgtggcgttccagctcttgttcatgttcgcgcccgtcaacgacagggacaaatggggccggagcgtcgccaggtacgctgttcttcattccttccttacgtttcgaaactctaatagttgggattcgcttccctcttctcctcggttgttaacttctaccagcatgcgcaccgtgcaggttcatatgcagacacgcaatgggctacttccctatcactctgcatgtggaggactacaagtccttggatcccagcagggcttacggtatgctcccgaaaacctgcttctccattcatggatgctgcagtcatcgtatccattatccaatccataagtgcccacgggagtcgagaaagtatcaacttcagttgctgagtgttaagggaagggaatcttttatttgcagagttggtgtggtgatagtgatggtagtgttgtgcatttgcagtgttcggttatgagccgcactcagtgctgccgataggtctgtcggctcttgctgaccttgttggctttctgcctctcactaagatcaaggtccttgcgagcagtgcggtaagtcagctaaatgccttgacgccaaatgccacaggattcagggactcccctcatgatggttaatttcgaattggggccaggtgttctacaccccgttcttgagacagatttggacatggcttggcttggtacctgcgacaaggaaga

SEQ ID NO: 2362 - DNA, 216 bp, Zea mays
  misc_feature (117)..(120): n is a, c, g, or t
  misc_feature (124)..(136): n is a, c, g, or t
  misc_feature (162)..(164): n is a, c, g, or t
  misc_feature (172)..(192): n is a, c, g, or t
aatgtcataggactcttagatgaaggccaggatatccaactttcgccttgtacctctcaaagaggtcccgcatggcaatgatgaactgtccatggacttcattaatctgtcagcacnnnnaacnnnnnnnnnnnnncttttttaaaaaacttaataaagatnnnttttattnnnnnnnnnnnnnnnnnnnnnccccaacaggatcctcactcatac

SEQ ID NO: 2363 - DNA, 545 bp, Zea mays
  misc_feature (514)..(530): n is a, c, g, or t
  misc_feature (534)..(538): n is a, c, g, or t
cgaactattaatgtgaactatgatggatttgctgaaggtattggcctatttgttaatattgtttgtagttactgttctttagcgtaacgttgcatctaaatcctacacagatgtgagagttggtgatgagctccttgtggatggtggaatggctcggtttgaggtgattgagaagataggaccagatgttaagtgccgttgcacagatcctggtttattgttgccacgtgccaatcttacattctggcgtgacggcagtatcgtccgtgagagaaatgctatgcttcctacaatttcatcaaaggtaaatgcactagcataataaatgtcctactgtaatgaccaaaaaatactgtaagcaaaaccctacaagtctatagcttacctcgcgttacaatggatttacagcttcttcttttttatcaataacatgatcagttcaaaacattgtgcactgaaactcatctctggataatttatcagccatttctaaagaaggctgctacaaaccaannnnnnnnnnnnnnnnntgannnnngaatctt

SEQ ID NO: 2364 - DNA, 912 bp, Zea mays
  misc_feature (461)..(905): n is a, c, g, or t
ggcctccctgctctcgcggtgccgccccgactgcccggtcttcgccttcacgacgtcgacgtccgtcaggaggcggctgaacctgcagtggggcctgatccccttccgcctcgccttctccgacgacatggagagcaacctgaaccgcaccttctccctgctcaaggccaggggcatgatccagtccggggacctcgtgatcgccctctcggacatgctgcagtccatccaggtgatgaacgtaccctgaggtagaagagccttacctttacctccatgccgcatggtcccgtatcggaaggaaggaacacgcgcgttatcggcaccttggaaggacggttccttccttccctgcgcctaaatcgctgccctttgttttcgctgtatcagatgctgctatgctatgctaggctctagtctggcccagggaactgtggcaataatctgtggctttcaggctnnnnnnnnnnnnnnnnnnnnnnnnnnnnnnnnnnnnnnnnnnnnnnnnnnnnnnnnnnnnnnnnnnnnnnnnnnnnnnnnnnnnnnnnnnnnnnnnnnnnnnnnnnnnnnnnnnnnnnnnnnnnnnnnnnnnnnnnnnnnnnnnnnnnnnnnnnnnnnnnnnnnnnnnnnnnnnnnnnnnnnnnnnnnnnnnnnnnnnnnnnnnnnnnnnnnnnnnnnnnnnnnnnnnnnnnnnnnnnnnnnnnnnnnnnnnnnnnnnnnnnnnnnnnnnnnnnnnnnnnnnnnnnnnnnnnnnnnnnnnnnnnnnnnnnnnnnnnnnnnnnnnnnnnnnnnnnnnnnnnnnnnnnnnnnnnnnnnnnnnnnnnnnnnnnnnnnnnnnnnnnnnnnnnnnnnnnnnnnnnnnnnnnnnnnnnnnnnnnnnnnnnnnnnnnnnnnnnnnnnnnnnnccccccc

SEQ ID NO: 2365 - DNA, 466 bp, Zea mays
tgagtggagccttggtggccgtcggtgagcgcgaggaggagggcctccttgaggtaggaagcggagcggaggaaaggcttcccgattgggggaagctgctgattgagccgcgccaatatctcgcgcccgccgatggagttgccgacctcagccgcttttgccgccgccgcaagctcatccagaagaagctgatgttgctgcgccgccggggttgttttcatcgaaccccgtggtggttgcagcgatggttggagctggaagggcgcggtggtatgcagtggtgggaatcgtagaccctgcggcggcggcggcggcggctggagttggttttggaggaggaacagattttcgggcatagagtggtggcgcttcggcgggggcgggagatgtggctggtgctgatggtcagggaaggaggggagcggcatgaaggaggctgctggcaacgcttggtgttgattgagga

SEQ ID NO: 2366 - DNA, 525 bp, Zea mays
tatatagctaagtaaagatagccatcaaactgctaaaagccagaagaggcgattgtcaacggtataaatagagcatctaaatgcaagtcaaaaggcgtttctcaatgttttggtgagtttgagcaccgtgcttgcaaacagaaattattgaatggcatggccatatcccttctcaaaactatagaaccaaaattggacatagctggccagtatttagttgtcagccacttcaattagggtttgctcgtagtcagcaggggcctcaaatccatggaggttcatcacagttgcggctacattggcgagcccagggatttgaatgtcgttccggaatttcactccggggtgaagaccagggcctccaatggcaaccggcacctgcaagttttacagaggcattaacatccaagcaatcaacatgtgtttggttttactaggagataaccaaagacatggcgtcaaatggcattgcactcaccggctgaagggtatgcgaggttagaatctggataccaccattcttgt

SEQ ID NO: 2367 - DNA, 525 bp, Zea mays
  misc_feature (49)..(49): n is a, c, g, or t
  misc_feature (126)..(126): n is a, c, g, or t
  misc_feature (139)..(139): n is a, c, g, or t
  misc_feature (152)..(152): n is a, c, g, or t
  misc_feature (253)..(253): n is a, c, g, or t
  misc_feature (328)..(328): n is a, c, g, or t
  misc_feature (345)..(345): n is a, c, g, or t
  misc_feature (466)..(466): n is a, c, g, or t
tatatagctaagtaaagatagccatcaaactgctaaaagccagaagagncgattgtcaacggtataaatagagcatctaaatgcaagtcaaaaggcgtttctcaatgttttggtgagtttgagcancgtgcttgcaaanagaaattattgantggcatggccatatcccttctcaaaactatagaaccaaaattggacatagctggccagtatttagttgtcagccacttcaattagggtttgctcgtagtcngcaggggcctcaaatccatggaggttcatcacagttgcggctacattggcgagcccagggatttgaatgtcgttncggaatttcactccggngtgaagaccagggcctccaatggcaaccggcacctgcaagttttacagaggcattaacatccaagcaatcaacatgtgtttggttttactaggagataaccaaagacatggcgtcaaatgncattgcactcaccggctgaagggtatgcgaggttagaatctggataccaccattcttgt

SEQ ID NO: 2368 - DNA, 488 bp, Zea mays
  misc_feature (409)..(411): n is a, c, g, or t
  misc_feature (442)..(444): n is a, c, g, or t
  misc_feature (451)..(454): n is a, c, g, or t
  misc_feature (458)..(467): n is a, c, g, or t
  misc_feature (471)..(474): n is a, c, g, or t
  misc_feature (483)..(485): n is a, c, g, or t
tcagtctctggaactctgtatcaacaggggatgggaaatatgtgtcatgttcaatgtttagctcatgaaacatagaagaccccattagaagctattatgtgcttacatttgatttttttatccaagactcaagtgtattaatggctttcccggaccgctgtgtctcctgtgctaaagcaacaccgtcatgtaaatttttcactttaccactgacaagtagggacgccgcagcatttagaacctgtgtaataattaggaattagcctaaagcttataggcaccaaatggcaattgatcattacaagtgcagtccatttctacaatttttaatcagttttcctattttaagcaagtaattcatgaaaacagttttgtaccgaaataatggtaatcaatacactgaattttnnntagcacagctgattaacaagatcttgggtannnaacattnnnnattnnnnnnnnnnatannnnagaaatatnnnatg

SEQ ID NO: 2369 - DNA, 708 bp, Zea mays
atgttcccccggttagaattatagttgctgatggagaagaggatgttactatcaaggtagtagtccttgtcataacctgtcggcaacattctagctacatctattcattgatggaagttcatatcactcttgatgcatgtggcactgtggcagagactagaagtaaattgtgcaacagagtggtgctgaagtttgattattgagtgggtgctcttgttctaattaacgcaggttagcgatgaaggtggcgggataccaagaagcggcctcccgagaattttcacgtatctgtacagcactgcaaagaatcctcctgagctagatagacctaatactgaaggggtaactatggctgggtatggtttcgggctcccgatcagccgactctacgctcggtattttggcggcgacctgcaaatcatctcgatggaaggatacggtatgccatcataatattttaatttaattctcgcatcagacgtcgggacatatatatgactaatgtttcttttcggtcgtgtaggtaccgatgcttacctccacttgtcgcggctgggagattcagaggagcccttgccttgacgacatatttttgtggacctccagtaccactcttctcctgtaactatgtggctcgatcttcttgtaatccagtgctggcctcgacctatatatatatagctatagttggcctcgaccttatttcac

SEQ ID NO: 2370 - DNA, 602 bp, Zea mays
ccgagtcaccaaatccaccacttgagcggccaaacccagaattgccaaatcctccaccgcctgatcggccaaaaccaccaccaccgccacgtccaccaaagccccctcgtgagcgcccatagtttgagccaccatacccaccacctccacccccgaaggagtcaaatccaccacccagcaagtcggatccctcaacattaatttttggaagctgcaaggcaaacgaaaaccaagtgaacataatgcagtgggaacagcccaaaaaaagcaatgtacaacacaaaccacaagcccccacctccgtaaacttgcatcctacgtcacgttcaatgacccgcacagctctactttgttcatagttgtacatcacaattgcagtgcccttcttcccagcacggccagttcggccagatctgtgaacgaatatctctgacgaatttggcaattcgaaatgtatcacctgaacaaggagaaccgcatgagggtacacaacagatgatgcacatggtgattgcaacaaaaaataatggagatagcttagagaaggggaagcacaaaccagatctacatttgggatatccaatccacgagaagcgacatca

SEQ ID NO: 2371 - DNA, 709 bp, Zea mays
tcaagaatcatcatatctatctgtcaaagtatcaacaaacaagtaaagaaatgaaatagcaagaaaagatcgttaatcatataaggtaccagatccatagcaagaatcgcagaacccatgtttgtagttgcaaaaggtacacagaatgggttcatcttcttgtatgaaaccctcaaagcttcaattgcatcactgaaaacctgatcaaaatagaattagaagagaagctaattaaaaaacgatcttttcagcaagtatatcatgtaatgtaagaatctgcaccttcatgccacccatagcagacccaatgaggactccacatcttgatttttccaactcattcatgacttcttcagtgattccagcattctccaatgctttctttccagctgttatcaaatattgcataaacttgtccattcgcttagctagctttggtgcaacccaaccatctgtcgaaaatgatttgatttctcccgcgattctctgtatgaaacatagtgtcgatgaagtacagcatgtttcagcgtaattctacaacaaacctcacatcattaaccatgataagaaactaaataccgtgggatagtgagaacaatcaaatgcctctatctcgcttattccactgataccccttaaaaggttattgtagaattcatcaggatcatgccctagtggcgtcactacacccatgccagtgacaaccact

SEQ ID NO: 2372 - DNA, 629 bp, Zea mays
tgtttgattgctctcttgttttttactttaaatgttaaacacaaatcctaatgcagatcaaaattggtatggatgttgcggcatctgagttccttacaaaggatgggaactatgatctaaactttaagaatcagcctaatgatggagcccatattctctcagcccagcatctgggtgatctgtacagagattttgtcaaggatttccctattgtatcaattgaggacccttttgatcaggatgactggagttcatgggcatcattgcagtcctcagttgatatccaaattgtgggtgatgatttactcgtcacaaacccaaaacgtatagcagatgctattgataagaaggcttgcaatgctctgttgctaaaggtaaccatttactaaacaatctgaaatggagtactatatacccttaatttttttttgcttccttccagttctcaacatcatgactgcaaaacagtatctagctcgagataagcttgcactgcaaaactaaatgtctttgttaaagttggtgtacctttttccaggtcaaccagattggtactgtcactgaatcaattcaagctgctctcgattcaaaagctgctggttggggtgtgatggtcagccacagaagtg

SEQ ID NO: 2373 - DNA, 1016 bp, Zea mays
tctgtataacatattcaggagctagcaggaattaaggagcttgtcatgcctgttcctgcttttaatgtaataaatggaggtagccatgctggcaacaatctggccatgcaggagttcatgattttacctgttggagcaactacatttgctgaagctcttcgtatgggcagcgaaggtaataatgttttggcggttttttataatattgtagggccatcacaaaatgtaggtccttttagttttgtcctaactcaaacttctctaactttaactgaatctatgtaaaaatacattaatatctataattactgtaccaaataaatgcactattgaaacatgtttcatggtggattacatgaaactaatttgttgtctagatgctagtgtatttttctataaacttggtcaaagttagagaaggttgagttggacaaaactaaaattacctacattttggaatcgtgggagtatagcttagttattttatgatcagctagctgactattttgctcttttgtttttttgaggatttttttgtgctcttttacgcatgctataattttttatttcccactgtatttcatgtttgttgaaagtcatctatgttgtatcagtgaatagctatattgggactatttgcttctgctagctggtcacttcatcttctaacctcacttggaatatccttgttctggtaacagtttaccatgtcctgaagagcatcattaagtcaaaatatggtcaagatgcatgcaatgtcggagatgaaggaggttttgctcctaatgttcaagacaacagagagggtcttattttgcttatggatgccattgagaaggcaggctacactggaaaagtgtgatatcatctaactagtttcattggccacttgtttgattgctctcttgttttttactttaaatgttaaacacaaatcctaatgcagatcaaaattggtatggatgttgcggcatctgagttccttacaaaggatgggaactatgatctaaacttaa

SEQ ID NO: 2374 - DNA, 915 bp, Zea mays
ttcttggccgccgagaagcagtggacgatgcttgattggaagcccaggcggcctgacatgctcactgacacttttgggtttggccggatcatacatgatggcctcatgttcaagcagaacttctccattaggtcctatgagattggggctgataggacggcatctatagagacaatgatgaaccatttgcaggtaaggatttgttacatttgaggtgtgagattgttgtggctgaggattggactatgaaaaagtttggatttgatccaggaaacggcacttaatcatgtgaagaccgctgggctgctaggtgatggattcggctccacaccagagatgagtaaacggaacttattctgggtggttagccagatgcaggctatcgtcgagcgttatccatgctggtatggtttgcagcatcgcatgatcttgtttcagttttcttatcgtgatttgagcttgaaataagttgcacccatgttgctatttgtggagacatagaatgactaatgattatgacttatttcctcagagctgggtattgtgtgattagttgaatgatggtttcagttgttcggcaataaatgtgaaaggaaagttccccagtgctttttttgaactgtttgacaataacttgttggaggagcctatatagtttttttagcataaggagcctatatagttgtatgtcactgggcagtttgtagacatctattattgacacagatacactcattgaacctcttgaagtcttgatacatttcctatgttaactaacatatactagaacatttaccttctttgaactgaatgttgatccctcatcatctgggttctactgttatgcgttctaagtcgctcctctattctgctgtaggggtgatactgttgaagtaaatacatgggttagtgcta

SEQ ID NO: 2375 - DNA, 440 bp, Zea mays
  misc_feature (424)..(437): n is a, c, g, or t
cagcagcccctaccaaacctgatttctcatatcatcacaagcatcttcaaaaggaggaatgctgaccaccgacaacccgaaacgcggtgtctatttacattttggttaacctaggtatgattaattatttggggggagcctccaagttcaatgacatgatcagggtaggggttccacaaaccttctgcaaggaggcggctaacgaatcttggctctatcttacaaattgcacacgtcgtccaacaacaggcaatacgcaccgggagcctcttcacaccatcttggatcttgtagctggaccatgctgcgggggagcatcacttggccaaaaaacaccaggcctgccggttgccttgtggctgcattgtcatgagatgtaggcctcaccttacttgtaattttcctcggcgtagatagagacaannnnnnnnnnnnnnctc

SEQ ID NO: 2376 - DNA, 440 bp, Zea mays
  misc_feature (65)..(65): n is a, c, g, or t
  misc_feature (87)..(88): n is a, c, g, or t
  misc_feature (424)..(437): n is a, c, g, or t
cagcagcccctaccaaacctgatttctcatatcatcacaagcatcttcaaaaggaggaatgctgnccaccgacaacccgaaacgcgnngtctatttacattttggttaacctaggtatgattaattatttggggggagcctccaagttcaatgacatgatcagggtaggggttccacaaaccttctgcaaggaggcggctaacgaatcttggctctatcttacaaattgcacacgtcgtccaacaacaggcaatacgcaccgggagcctcttcacaccatcttggatcttgtagctggaccatgctgcgggggagcatcacttggccaaaaaacaccaggcctgccggttgccttgtggctgcattgtcatgagatgtaggcctcaccttacttgtaattttcctcggcgtagatagagacaannnnnnnnnnnnnnctc

SEQ ID NO: 2377 - DNA, 918 bp, Zea mays
ttttggtgagatgtgagttccttccattctccccctccgcatctcctgtttgtccattatatccgtgttgtgttcctagagctgccattagtgtacacatcccttcccttcctttctagtttagcatctcaccgagtgttcgagtgccttatgccaacatctctgtacctacacaggaatctgaaactgatgatgagccggagaaggaagtacgcgagaggtaaacatattccttgctgttaaccatgctggtagatttcatcatgtgaacgtttgttactaattcccctcccatgcccgtctcaactatcaaatagattacctatcaagaaacggctaatgtttcctggcaagacgctgaggaagaccaacgtcaagaagaagaaggcgaccccaaaaccagaagatggcacaaaagccgacaagtctgctgataagccgagttcatccacacaagcagatcttcctgatgaactggaggctgagaaggccatccggaaatcaaccagaacgtcggtcatcgtgaggcaagctgaaagagaagcgatacgtgctgaaaaagaagcaacggccaaggtatgtaccagatgttgcaagttctccaccgctattatcaaatgttgtaattccattgagcatttgagatacttgtgtaggacataatgttgtgctacttggattagttcgtctgctgtggcattttttggaatttgtgttggcttacttgttactctctggctctctgctgtaccttgccagccgattaagaggaaaaaggagggagaagaaaagcggatgacacaagaggagatgcttttggaagcagctgaaacaggtttagactatgtttcacttgtaccgttatccagaaatacacagatggagtttgccagcatgccttttacattttattcgttt

SEQ ID NO: 2378 - DNA, 520 bp, Zea mays
catcttgtggctttaattcttagatattttaccacgaaccatggaaacaagttcaagtgtgcctacctgacggttgctctttgtttagaaatctgaaatgctatggcagaaataaacctgaggcaggactacatatgcctacataaccaatttaattagtataataaataagcagtttacactagactcttgagggacgtttatgcttatgtgaggcttgcttcctgtagataccgtgatccgaagacagggctgccttatgcaactatggaagcatttaaaataatccgggagaggtacattttgtttgttctcatagattcctactttgctctgacagctaagtcgtaaaccacttgcctgcaatgtttcttaagaaaaatactgctttctatctggatgcgcaatcaaaacttgctaacatctcttcaactgatccatgcattcagtttcctgaaagaggaggctgatagaaagcgtccgaacatgtcgaatatgggagagcttttcgaatcaataa

SEQ ID NO: 2379 - DNA, 408 bp, Zea mays
cagggcccaacggtcacttcatgccacctccaatgcctatcccagacatggttcctccctccacattcggtgcttccgccacagccaagatcagcgtcgatgcatcccttgctggcgccatcattgggaagagtggtatcaacacaaagcatatatcccgagtgactggggccaagttagccatccgggacaatgaggctgatcccaaccataaaaacatcgagctcgagggaacgtttgaccagatcaagcacgctagcgcaatggtcacagagttgattgtccgcatcagtggtaaggcgcctccacaagccaagaacaacccaggcagggggcctggttctcatgctgggggtcctgcaagcaacttcaaaaccaaattgtgcgagaacttcaacaaaggctcct

SEQ ID NO: 2380 - DNA, 421 bp, Zea mays
ctcgcatgtgtaacaagtacaacactgccgaaggatgtaaatgggggagcaagtgccactttgctcatggagagagggagcttggaaagcccctgcagatggacaacccgatgggacctcctccaatggggccagggcccaacgggcacttcatgccaccgccaatgcctttcccagacatggttcctccctccacattcggtgcttccgccacagccaagatcagcgtcgatgcatcccttgctggtgccatcattgggaagggtggtaccaacacaaagcatatatcccgagtgactggggccaagttagccatccgggacaacgaggctgatcccaaccataaaaacatcgagctcgagggaacatttgaccagatcaagcacgctagcgcaatggtcacagagttgattgtccgcat

SEQ ID NO: 2381 - DNA, 515 bp, Zea mays
tattacgagaaaagtagatctggtagtgcagaaaggggggcactaattagtcattacatttactaatttacatatagaacgtcagctgatttaggcttattgtatacagatacgatggtgacatgaggttatccaccatacacatgataaagatctaggatagattccaacaacaacaaaaaaaactggaagacacgatgctgttttactgagtgtgcacggattattgctttcagtttccatgatggaagaaatgaaacaccaaaaaagatctacagatggttattttgccttctcagtccggttcatcacatcatggtaatataatagaacacacattggctgcccgtatatgcagaaaaaaaaccaaaagatcatattgccaacctattgaatataccacaaattagacaggttcccataaaaaacgatcctagcaagtatcaactaagaaaaatatggctcaccattgtgtcactgaatttatttttgaggtatgatgtcaatatgatgag

SEQ ID NO: 2382 - DNA, 431 bp, Zea mays
ggactgagaaggcaaaataaccatctgtagatcttttttggtgtttcatttcttccatcatggaaactgaaagcaataatctgtgcacacagtaaaccagcatcgtgtcttccagttttttttgttgttgttggaatctatcctagatctttatcatgtgtatggtggataacctcatgtcaccatcgtatctgtatacaataagcctaaatcagctgacgttctatatgtaaattagtaaatgtaatgactaattagtgcccccctttctgcactaccagatctacttttctcgtaatatttaatattaaaacaatcacaccacacattctactgcctggtgatgatgttatataacatttggtatcacgagcggaatctaagcatgtctgtaatctgatatgtagtagatctgtgatgccctctcactt

SEQ ID NO: 2383 - DNA, 787 bp, Zea mays
cagcagcaaggctatgaaaactcttatgggggtaattgtaatcttttttgcatgtttcagaaaatattcttgtgtctcaaaatgttaacgttttgataaaaatgcaggttatggctccaatatgtatagctcttacggcggatatagtggaccctatggaaataacatgtactcaggttatggaggaggttatggcggtatgtatggaggttctggaatgtatggtggaccaatgtatagcggtggaatgggaggaccctatggtggttatggtatgggcatgagtccttataatcagggaccgaattcatttgggccacctaccccaccccctggtttctgggtgtccttcctacgagtggtaatatatgttattttatctagttactgctgatgcagatgattactttcaattgaccatccacacaactctgcataaataagatcttttacagtgcattaacagctgttttcaaatgctttccagaacttagattgcagttgtaccccatagtccctggcttgccatgattgttacacacatggtgaagcaacacatttcgtattttacctgcattattggaacatatattttgctaattcaataccaaattccatgtagtgactgcgtatcgtgttcatgacgctttgcatcagttgatttaaaaatatctttcacaggtgacaggactcatcgttctcctaaccagatctcttcttaattacagatgcatggtgttgtgaatttctgtgggagggttagcttccttgttagccagaacactca

SEQ ID NO: 2384 - DNA, 409 bp, Zea mays
cctccttcaaccttggtgcggctatcctaagtgacaagttcctcatgccgacgccgatgaaggaggagaccgccgacgtcgagttcatccagaagaggaacgcccccgctcctgctgagccagagctaatgctaaacaaccgggtgtacacctgcaacaacgtccagtgcccgcacagtgactacagctatggattccttgaccggaatgcccgcaacaaccaccagtacacctgtaagtacaacgatccgatcactcagagcgccgagaacaagcctctgccagcaccgccgcaaccacaagccttccagccggccttcagccaagccaatcaggcagtgaacaatctggacttcagcctgcctatggacgggcagaggtccatcgccgagctgatgaacatgtacga

SEQ ID NO: 2385 - DNA, 413 bp, Zea mays
tgtttagcattagctctggctcagcaggagcgggggcgttcctcttctggatgaactcgacgtcagcggtctcctccttcatcggcgtcggcatgaggaacttgtcacttaggatagccgcaccaaggttgaaggaggttgggtcagtgactgctgtcttctggttgccagcctcatcccccttgcactcatcaacgatgtccacgtcgtactcgcttgaggtggtgttgaaagatatggcactggcgatgccaccagtggatgccggcgggcgtgcgccagggtgcaacttcaggtacagctcctcttcctgcttgacgaccgccagccaggtcgagatctccttggcagtcatcttgtcctggaggcacttggactggcgaacgaggcgacggatcttctctatgtctggt

SEQ ID NO: 2386 - DNA, 378 bp, Zea mays
gatgtgttccatgcgctctactgcataatggagaaggaaggggttggcggcctgtacaaggggctcggaccgagctgcatcaagttgatgcctgcagcaggcatctcgttcatgtgctacgaggcctgtaagaagatcctggtcgaagacaatgaggatagtgagtgaagctgaagcatgtatgcccctgaggaggggtatgactgatgtgccaggctagaagaggtttgggttgggttgggttggggagtataccctagtattatcaactgatgaaaatgtagatccaagatatttgaacgccctttagatcataatttggttcagttttgtgttgaaatccataaacaatacacttacttgatggtgcatgttgca

SEQ ID NO: 2387 - DNA, 1459 bp, Zea mays
  misc_feature (270)..(270): n is a, c, g, or t
  misc_feature (272)..(272): n is a, c, g, or t
  misc_feature (356)..(356): n is a, c, g, or t
  misc_feature (358)..(358): n is a, c, g, or t
  misc_feature (366)..(366): n is a, c, g, or t
  misc_feature (371)..(378): n is a, c, g, or t
  misc_feature (383)..(384): n is a, c, g, or t
  misc_feature (409)..(409): n is a, c, g, or t
  misc_feature (413)..(413): n is a, c, g, or t
  misc_feature (415)..(416): n is a, c, g, or t
  misc_feature (418)..(420): n is a, c, g, or t
  misc_feature (428)..(435): n is a, c, g, or t
  misc_feature (438)..(441): n is a, c, g, or t
  misc_feature (443)..(450): n is a, c, g, or t
  misc_feature (455)..(458): n is a, c, g, or t
  misc_feature (463)..(468): n is a, c, g, or t
  misc_feature (482)..(489): n is a, c, g, or t
  misc_feature (491)..(498): n is a, c, g, or t
  misc_feature (502)..(508): n is a, c, g, or t
  misc_feature (515)..(525): n is a, c, g, or t
  misc_feature (529)..(531): n is a, c, g, or t
  misc_feature (533)..(533): n is a, c, g, or t
  misc_feature (543)..(553): n is a, c, g, or t
  misc_feature (555)..(559): n is a, c, g, or t
  misc_feature (563)..(567): n is a, c, g, or t
  misc_feature (574)..(580): n is a, c, g, or t
  misc_feature (583)..(583): n is a, c, g, or t
  misc_feature (585)..(585): n is a, c, g, or t
  misc_feature (588)..(590): n is a, c, g, or t
  misc_feature (594)..(597): n is a, c, g, or t
  misc_feature (600)..(600): n is a, c, g, or t
  misc_feature (602)..(613): n is a, c, g, or t
  misc_feature (618)..(621): n is a, c, g, or t
  misc_feature (627)..(630): n is a, c, g, or t
  misc_feature (632)..(635): n is a, c, g, or t
  misc_feature (639)..(643): n is a, c, g, or t
  misc_feature (645)..(645): n is a, c, g, or t
  misc_feature (651)..(665): n is a, c, g, or t
  misc_feature (667)..(668): n is a, c, g, or t
  misc_feature (676)..(685): n is a, c, g, or t
  misc_feature (687)..(687): n is a, c, g, or t
  misc_feature (689)..(692): n is a, c, g, or t
  misc_feature (694)..(694): n is a, c, g, or t
  misc_feature (696)..(696): n is a, c, g, or t
  misc_feature (700)..(701): n is a, c, g, or t
  misc_feature (703)..(718): n is a, c, g, or t
  misc_feature (726)..(733): n is a, c, g, or t
  misc_feature (735)..(742): n is a, c, g, or t
  misc_feature (745)..(745): n is a, c, g, or t
  misc_feature (751)..(758): n is a, c, g, or t
  misc_feature (763)..(763): n is a, c, g, or t
  misc_feature (774)..(775): n is a, c, g, or t
  misc_feature (780)..(781): n is a, c, g, or t
  misc_feature (786)..(788): n is a, c, g, or t
  misc_feature (790)..(790): n is a, c, g, or t
  misc_feature (793)..(807): n is a, c, g, or t
  misc_feature (819)..(822): n is a, c, g, or t
  misc_feature (829)..(831): n is a, c, g, or t
  misc_feature (834)..(836): n is a, c, g, or t
  misc_feature (842)..(857): n is a, c, g, or t
  misc_feature (862)..(873): n is a, c, g, or t
  misc_feature (875)..(884): n is a, c, g, or t
  misc_feature (886)..(888): n is a, c, g, or t
  misc_feature (890)..(912): n is a, c, g, or t
  misc_feature (915)..(919): n is a, c, g, or t
  misc_feature (925)..(931): n is a, c, g, or t
  misc_feature (933)..(934): n is a, c, g, or t
  misc_feature (936)..(940): n is a, c, g, or t
  misc_feature (943)..(963): n is a, c, g, or t
  misc_feature (966)..(967): n is a, c, g, or t
  misc_feature (969)..(981): n is a, c, g, or t
  misc_feature (983)..(991): n is a, c, g, or t
  misc_feature (993)..(994): n is a, c, g, or t
  misc_feature (996)..(998): n is a, c, g, or t
  misc_feature (1000)..(1004): n is a, c, g, or t
  misc_feature (1006)..(1008): n is a, c, g, or t
  misc_feature (1010)..(1023): n is a, c, g, or t
  misc_feature (1027)..(1027): n is a, c, g, or t
  misc_feature (1029)..(1035): n is a, c, g, or t
  misc_feature (1039)..(1039): n is a, c, g, or t
  misc_feature (1041)..(1046): n is a, c, g, or t
  misc_feature (1048)..(1060): n is a, c, g, or t
  misc_feature (1063)..(1065): n is a, c, g, or t
  misc_feature (1070)..(1072): n is a, c, g, or t
  misc_feature (1077)..(1087): n is a, c, g, or t
  misc_feature (1091)..(1101): n is a, c, g, or t
  misc_feature (1103)..(1108): n is a, c, g, or t
  misc_feature (1116)..(1118): n is a, c, g, or t
  misc_feature (1120)..(1124): n is a, c, g, or t
  misc_feature (1130)..(1136): n is a, c, g, or t
  misc_feature (1138)..(1148): n is a, c, g, or t
  misc_feature (1151)..(1156): n is a, c, g, or t
  misc_feature (1158)..(1167): n is a, c, g, or t
  misc_feature (1169)..(1170): n is a, c, g, or t
  misc_feature (1172)..(1175): n is a, c, g, or t
  misc_feature (1180)..(1190): n is a, c, g, or t
  misc_feature (1192)..(1194): n is a, c, g, or t
  misc_feature (1196)..(1201): n is a, c, g, or t
  misc_feature (1203)..(1205): n is a, c, g, or t
  misc_feature (1207)..(1209): n is a, c, g, or t
  misc_feature (1211)..(1213): n is a, c, g, or t
  misc_feature (1215)..(1221): n is a, c, g, or t
  misc_feature (1223)..(1223): n is a, c, g, or t
  misc_feature (1227)..(1227): n is a, c, g, or t
  misc_feature (1229)..(1235): n is a, c, g, or t
  misc_feature (1237)..(1246): n is a, c, g, or t
  misc_feature (1249)..(1254): n is a, c, g, or t
  misc_feature (1256)..(1258): n is a, c, g, or t
  misc_feature (1262)..(1280): n is a, c, g, or t
  misc_feature (1283)..(1291): n is a, c, g, or t
  misc_feature (1295)..(1297): n is a, c, g, or t
  misc_feature (1300)..(1312): n is a, c, g, or t
  misc_feature (1316)..(1316): n is a, c, g, or t
  misc_feature (1319)..(1333): n is a, c, g, or t
  misc_feature (1335)..(1335): n is a, c, g, or t
  misc_feature (1339)..(1340): n is a, c, g, or t
  misc_feature (1342)..(1345): n is a, c, g, or t
  misc_feature (1348)..(1348): n is a, c, g, or t
  misc_feature (1354)..(1357): n is a, c, g, or t
  misc_feature (1359)..(1373): n is a, c, g, or t
  misc_feature (1378)..(1394): n is a, c, g, or t
  misc_feature (1396)..(1400): n is a, c, g, or t
  misc_feature (1402)..(1413): n is a, c, g, or t
  misc_feature (1415)..(1420): n is a, c, g, or t
  misc_feature (1426)..(1430): n is a, c, g, or t
  misc_feature (1432)..(1432): n is a, c, g, or t
  misc_feature (1440)..(1444): n is a, c, g, or t
  misc_feature (1448)..(1450): n is a, c, g, or t
  misc_feature (1452)..(1454): n is a, c, g, or t
cgtccgtccagcagagagaagcgaaggcgttggccctgccagccaagccagactagtgcaggggtcgtagaggaaaaaataaataaataattaaataatttttgacgcagatgagatgggaaatcccagcttgacactttgttagggtattgtgcttgataaaaaatatggcaccaggtgaatctgaggtgccagtaaatcttggatgaattctgccgcacgcatccgaccggatcagcagaaacttgtctccacgccatgatctgaagnangctatagcgcaccgcgagccgcgtcgcgttcaacaacgcatcagcagagagtgtgctaaaaggagccagtctcataggtcgacngnaggaatgncgtannnnnnnngcggnnttgcggcggcgacgaggattactgncttntnncnnnctaatttnnnnnnnnttnnnntnnnnnnnntcatnnnnttttnnnnnnggtttttttgtggnnnnnnnnannnnnnnntgtnnnnnnncccaaannnnnnnnnnntgcnnngngcgctagccnnnnnnnnnnncnnnnntttnnnnngattttnnnnnnnttntnttnnnacgnnnnttngnnnnnnnnnnnnaactnnnnccactnnnntnnnntgcnnnnncnataatnnnnnnnnnnnnnnngnngacctaannnnnnnnnncncnnnntngncggnncnnnnnnnnnnnnnnnnctggattnnnnnnnntnnnnnnnnctnccttgnnnnnnnntaatntctggggggcnnggatnngatannntngtnnnnnnnnnnnnnnncgtttcctacgnnnntccgaannntcnnnaactcnnnnnnnnnnnnnnnntcccnnnnnnnnnnnnannnnnnnnnntnnntnnnnnnnnnnnnnnnnnnnnnnnctnnnnncccttnnnnnnncnncnnnnntannnnnnnnnnnnnnnnnnnnnctnncnnnnnnnnnnnnntnnnnnnnnncnnannnannnnntnnngnnnnnnnnnnnnnnttcncnnnnnnntttntnnnnnncnnnnnnnnnnnnnctnnnctttnnntccgnnnnnnnnnnnttcnnnnnnnnnnncnnnnnnctatttcnnntnnnnntctctnnnnnnntnnnnnnnnnnnccnnnnnntnnnnnnnnnncnngnnnnttctnnnnnnnnnnngnnnannnnnntnnngnnngnnntnnnnnnncnctancnnnnnnnannnnnnnnnntgnnnnnncnnncccnnnnnnnnnnnnnnnnnnnttnnnnnnnnnctcnnnccnnnnnnnnnnnnncccnctnnnnnnnnnnnnnnncntttnnannnnaanttcctnnnntnnnnnnnnnnnnnnnccttnnnnnnnnnnnnnnnnntnnnnntnnnnnnnnnnnntnnnnnncgtctnnnnntntccccaannnnncccnnntnnnctcct

SEQ ID NO: 2388 - DNA, 897 bp, Zea mays
  misc_feature (757)..(757): n is a, c, g, or t
  misc_feature (760)..(761): n is a, c, g, or t
  misc_feature (793)..(797): n is a, c, g, or t
  misc_feature (803)..(809): n is a, c, g, or t
  misc_feature (821)..(823): n is a, c, g, or t
  misc_feature (825)..(830): n is a, c, g, or t
  misc_feature (834)..(843): n is a, c, g, or t
  misc_feature (859)..(859): n is a, c, g, or t
  misc_feature (866)..(867): n is a, c, g, or t
  misc_feature (870)..(871): n is a, c, g, or t
  misc_feature (879)..(882): n is a, c, g, or t
  misc_feature (886)..(891): n is a, c, g, or t
ttctgtctttttttactgacatattattgtacaataggcatcctactacttgatgttgaagaaaacataacaaacatgtaaatgtttttctttgcttaagttttagttgatcccttaatggtcgtccattgggctgtcactgactctctttgcctgaatagagtatgggtggatcggagtacactaaaatcagaagggctttttagaattttaagaaaagaaacaatcaatttggaaatccgatgtcgggtcaaatacttgctgcttactttttgaatagtttccattctaacgttgttttggtcataaaatggcaaggggcacaaataggatagtttcttctactttgttttactacattttctgtgagtaccagttttataaaaaaaacttgacctgcggggggtaagacagcccccgggtattgtattaagaataagaccttctcacacaggtcaagaaaacccccgaacccctgccccacacatacacagcggcatcgaagctcatgtgagaacgaccacgaccagggctgagccttagacctatgctttggcgtggaacagacgaggggatttttttaaccacagcctggaaattcgctcccacggggagtcgaacccaggacctgaggagtgctactcagaccacctaaccaactcagctagaggccctttcgcgagtaccagttttatcatatttctctaattctctttatgtttcaggaatggtggcagctttaacaaacgagagtgcnacnngcaaatctgtatattttgctcattgcacgtcnnnnntgatannnnnnnctcatttgctgnnngnnnnnnctgnnnnnnnnnntggccctctgctggcngacacgnntgnnactctctnnnnaggnnnnnntgcatg

SEQ ID NO: 2389 - DNA, 621 bp, Zea mays
aatcgatcttgaacttcacagatccaatggctgatgatatggcagcagcaggagtccatgctgccaaaatgttgacacctggagcagcaatgtctggctgcagaagaaggtgcagggttttttcagcctcccaactagaactggaggtttgatcaacactgtagaggtttgatcaactgtcgaactggaggtttttttttaccttcagaacagcgggggacagagaacttggaccccgagatgagaaatatgcaacttctgggcccatcagttctccaagaatcgtttttgctgagccaaactggactgttggatttctgtgtatggaaaacagaaattattggaaagttgctgacagctacagcatattgctagattgttacgactgttggaacatgtgcggcactgtttgcatacctcgtgctagtggtgtatgcgagtatagctgttccaacctggtagtctacttgaaaacagggaatatcgaatgaagacgcgatgtccttagttaagaactgggcgaagatgactccgacgccacgagctttcttgacagtctccactgccactgcagctgatctctgtgcccttgtttggaagcaaagtaccacagttcccttc

SEQ ID NO: 2390 - DNA, 428 bp, Zea mays
atcgatggtgccagcagcgacggtcacgagccacggcgccgagttgatcaccgtctctgaataaggcccagaatttcctgcagagcagaccacgacaatccctctcgcgacagcatggaaggacccaatggacaggacgtcgtcaacgtacgcggggagcggtggcgcttggcctagggacaccgaaagcacgtcgacgccatcatgtatcgcgtcgtcgaaggcagctaggatatctgccgaagtgcagtctccggtggcccagcacactttgtagaccgcgagcctcgccctgggtgcccctccccttgcgacgccaccggcgagtcccctgaagcttgcaccggctaccagagcaccagcggcggtggaggctgtgtgcgtgccatgcccgacggcgtctctcgcggacatgaactcgtagatgt

SEQ ID NO: 2391 - DNA, 529 bp, Zea mays
ctgaactgtgttgtagttatttgctcgtatgcgtggcaacacattgtctgcaaattccctatatgtgcttactgctggcttttcaccactcatacctacatgggcttcatagatacgtggagcagcaggctttgaaggccgaggatgcttaaatgtgtacctgcaaaccagaggtaaaaggtactataattttgtcatatatttttgtctgctaaggtctattgcttaagtttacaatgtggtccaggacagtagaaagagacctttcagaagcaggaggatcccaatgaacaccatcatagggagctccaaatttagaggcatcaacagtcgcataacgaatcaatgctggaatacgatcaacccatactccaccatgtagaaagcgaaatttaaccttggaattgtgagggatggcaggtttccctttgacatggtcaattttgatcgaccaaacaccaaatttatccttctccatcttatggtttgcaccattccagtcattgaagtcaccaataagctctgcctc

SEQ ID NO: 2392 - DNA, 441 bp, Zea mays
  misc_feature (6)..(10): n is a, c, g, or t
cttctnnnnnacctgagatattggttggatgaattcatgtttgatggcttccgatttgatggagttacatcaatgctgtatcatcaccatggtatcaatgtggggtttactggaaactaccaggaatatttcagtttggacacagctgtggatgcagttgtttacatgatgcttgcaaaccatttaatgcacaaactcttgccagaagcaactgttgttgctgaagatgtttcaggcatgccggtcctttgccggccagttgatgaaggtggggttgggtttgactatcgcctggcaatggctatccctgatagatggattgactacctgaagaataaagatgactctgagtggtcgatgggtgaaatagcgcatactttgactaacaggagatatactgaaaaatgcatcgcatatgctgagagccatgatcagtctatt

SEQ ID NO: 2393 - DNA, 413 bp, Zea mays
tctttgcacattgcagggatttgttttatacgacgtacagatatgggagaagttagttttgagtacaacatgaatttactttaccttgccttgcagggattaatcctagatcaaactcatcttctggtacagaggatacaaacaaggaactgctttgctagcttcttccaaacaattctgcatgctatgccaatcgttctgtctctgtctctctctctaataacaatgacaagaatctcaagtagcagttcaatcaatctgtgcatgctatggagtatgaacaagaatcaattttgatggaaagttagtcggcggtgagagtgagacattcgagcaccctggcccctgtcaggctggcaatttgcccaggtcagctacgttgttagattatagtatacgtgtgcatgcatggc

SEQ ID NO: 2394 - DNA, 386 bp, Zea mays
ttctggtacagaggatacaaacaaggaactgctttgctagcttcttccaaacaattctgcatgctatgccaatcgttctgtctctgtctctctctctaataacaatgacaagaatctcaagtagcagttcaatcaatctgtgcatgctatggagtatgaacaagaatcaattttgatggaaagttagtcggcggtgagagtgagacattcgagcaccctggcccctgtcaggctggcaatttgcccaggtcagctacgttgttagattatagtatacgtgtgcatgcatggccaggtcaggtgccgaggtgttgctgcagcttgctcagatcagacgccgttggatctcgggctggcgccgccgtgttgtgtgtcgacgttgacgt

SEQ ID NO: 2395 - DNA, 413 bp, Zea mays; identical to SEQ ID NO: 2393

SEQ ID NO: 2396 - DNA, 484 bp, Zea mays
gcgttgatccttctgaagtccacatccacgtcagaatggttcagctccatcacatccccacaacagaagacaagataacagaatggatggtagagaggtttaggcagaaggaccagctcctggcagatttcttcatgaaggggcactttcctgatgaaggaactgaaggagatctgtcgacgccgaagtgcctggcaaacttcttaacagtagtatgcttgacggccatctgtttgtacctaactcttttctcatttgtgtggttcaaggtctatgttgtagcaagctgcgcttacctctcatttgttacctattactccatactaccaccccaactgataggttcaccagagggtgatgtcaaggccaaaaaggttgtgtagatgttgatgtaacttgccatgaaaactgtacatccgcaaacgattttttctgctggaatttctgccttgtgacatttaaggttccctttctgcagtaggag

SEQ ID NO: 2397 - DNA, 488 bp, Zea mays
aatggatgatagagaggtttagacagaaggaccagctcctggcagatttcttcatgaaggggcactttcctgatgaaggaactgaaggagatctgtcgacgccgaagtgcctggcaaacttcttaacagtagtaggcttgacggccatctgtttgtacctaacttttttctcatctgtgtggttcaaggtctatgttgtagcaagctgcgcttacctctcatttgttacctattactccatactaccaccccaactgataggttcaccagagggtgatgtcaaggccaaaaaggttgtgtagatgctgatgtaacttgcgatgaaaactgtacatccgcaaacgatttttttctgctggaatttctgccttgtgacatttaaggttccctttctgcagtaggaggtatgaatgtatgatagtgcgtatgtaggaattttctgtgattcatcagtgtgtgagggccctatctgaaggcagtaaactgaa

SEQ ID NO: 2398 - DNA, 686 bp, Zea mays
ttatgtcccaggacctttgttcggcctgttgatccgtaaacgccgacttttcgtatgggacacgacccattacgtcaaatgcaagccctatgcgtccattctcaccctgcaatttatttatcagtatattggagtgtgtgtataataatatcacaatatagctaccttgtaatacttgttgtaaagatcaacagcctcagcgtgggctcggagaaggttatggccaacagtgtatggctcagtgagcgagtttccaattgggttagcacatttttgtcctggggtgcaccgccctggggcgcatagcccggttccgtatgaaaaagaagaaaacgtttgtggctcattaaaggtcaaccaattgtttactttatcaccgaagttctcaaagcacaccttagcgaagtctgtgtaatcttttctgaaaaaatacaaagccgaatgaatgacaattaatgcatgtttctctaatacttagttgtgaaacaacatgaagttaaaccataaacatttattttgtccaaaatgtatataaaaatattttagtccatagtttattataaccataatttttgacaaaactttagaatcatcatcttctcgtcggtattattttgtttaaggaaggagtgaaagcaagttaatgatagatgggagcatattatttcaagtgtatataatactac

SEQ ID NO: 2399 - DNA, 431 bp, Zea mays
  misc_feature (407)..(409): n is a, c, g, or t
  misc_feature (414)..(424): n is a, c, g, or t
aattcagtctctctgttctactctatctctccttctccgtctctttcttctgtgttcttcctccattgctctgtacttattaattaatgcgcgctgccttttcaatcaggggcaagatcctcgaggtgctcaagaactggcccgagaggagcatccaggtcatcgtcgtcaccgacggcgagcgcatcctcggcctcggtgatctcggttgccaggggatgggaattcccgttggcaagctctccctctacactgccctcggaggtgttcgaccgtcagctgtaagtgctgctcacaatgctctttcttaagtattactactactgctatgtaataaacttgtagcactagtcgtagtaggaaagatttggaatcgattttttttcttcagtattactactacttcnnnattannnnnnnnnnnaatgttt

SEQ ID NO: 2400 - DNA, 780 bp, Zea mays
ctggtggcgatgctatgaagcagttcatgagaaaggggctcactgtaagtagcataatcatttgcttcgtgtcttattgtgccacatgcgtaccatggttgtttcttgaatgtaagttttctcatggaagtctgttaacattgaacagcctaggtggtggggcgaccttgatgtcaaccagcacgtgaataacgtcaagtacatcggttggattcttgaggtaatttcttcggggcctgcctcttttcatcgtattcaatggccactgctctggccatgtggtgggtgttgttggagagatctcgctggcatggcttcaaagtttataaagctctgtgtacttgtgcttgtgtaactccttgctgatgaatgatcaattggtagtctggctgggtctgtatttgaaaaaacagacgttgctagtacggttgatcagctgagctgcttcttgatctttgcctagtacgaagcaaagccccttagtgcctgaaccctttttcttcttcttcgcagagtgctccgatcgcgatcctggagaagcacgagctcgcaagcatgacgctggattacaggaaggagtgcggacgcgacagcgtgctgcagtcactcaccaccgtcgcgggtgaatgcgtagacggtgacgcagactccaccatccagtgcgaccacctgctccagctggaaacaggagccgatattgtgaaggcgcacacggagtggcgcccgaagcgggcgcatggtgaggggacccccatggggggtttcccggcggagagcgcg

SEQ ID NO: 2401 - DNA, 344 bp, Zea mays
attcccatgggcagaagacaatcctgtgctttctggaatgcgcttatctgcaaggagagagaaaaatgtgttacaaaagtttcctttttgtgtaaaaaggaaaaaaactatttcaatttacagtgtggtttataatccttacttttgggttaacttgtccttcccaagcaatggaatttatggacatggattccaaaccagcaccaatccctgtttagagggagagcagcgattcagcaggcaaactaaagcacaagagcgaaagtagcatgtatattcagatactaagtacctatgtcatagtaaccagcctttatagcagctgcgacatcggctactgcctg

SEQ ID NO: 2402 - DNA, 539 bp, Zea mays
tatatagagtagtgcttgtgaagaaaaaaaatacggatttcgaatatattacaaatgcagcaggcttatgctgctctaggatggatggtttttctgcgcctctacttcgcatccttagacagaaaattatgtgcctgcatgtccctcacgttggagagtccatccaccgcgtctccccgctcgaacacagctgctgcccccattccagatcctgcaattgtcacgatgcatcacggtcaactacagaagatcaaattacatctatgcgttgacatgctttgcctatacacgttagtatgtgataactgataagtaagactaaccgatacacatggtgacaacaccaaatctgcagtctctgccccggcgcttcatttcatttagaagagtagccacacaccgggcacctgaacatacaaagaatcacaagtttaaccgactttgctcagaaaaaaaaatatagcaggtaagtagatgttccattacctgttgcacccagagggtgtccaagggcaatcgcgcctccatttacatttact

SEQ ID NO: 2403 - DNA, 362 bp, Zea mays
tttaccgcatggaagctcaaaggcaggagatgcacctttaggtgcattttgggcgacacagcatgcacaaggtgctcaagctgtagttaataggaaccctttgtttgatggggagtcaattaaggcatcactgtcatcaaagcagaaccaaagctgggtggacaccagcatcagtattcctggcaataggcatgatcattctggtcagatgtcactgacaagtaaagcacaaaataactctttgtccaataatggtttcagaggtctctctgacacggagatacaaaattctgggaaaagtagagcacaacaacctcaacccgagccaaaatgtgagaaagacccatttaacagctttgttg

SEQ ID NO: 2404 - DNA, 558 bp, Zea mays
cgcgcccgcttcccggcactgcttctcgatgtccaagagccaggaagggtcaaaagggtcggcactgcctatggatgtgagctcgaaatctatctccacatctgcctgttccaacaagaacaaaagtgtgccagattatctatctatctatctatctatctatctatctacatgagaataatgactgaaactaacctgcagagtgtcaatttccttaatctcaaacagatcccccttcctgagctccaggccttggtgtctgacttgttttcctcggagcgactcgatctcttcgaccggccattgcagcagctgcttgctgtctttatccaaccatatagtcctgggaattgcctaaaccaaatcaaaaaattacatgcgtgcgtgttaaattacaaaactacagtatagtcagaagcttacatggattccagcccatcctttggcgacgtcgtctgacgaactgtccgtctcattcgtccagccccatatgaccctcctccctttcttcgagtcgaagaacgacttggaagcgtagtagttgccgtagtcaatcct

SEQ ID NO: 2405 - DNA, 396 bp, Zea mays
aagggtctcatgccttcccctgtcacacccatgcaaacaatgcacaaagcagagaggaagtatgttgttgggaaagtttctgatgaggaggaggcgaaacagaggcagttgaaaggcattcttaacaagctgactccacaaaactttgaaaaactgtttgaacaagttaaggaagtcaacattgacagtgtagcaactcttactggggtcatttcacagatatttgacaaagctttgatggaaccaactttttgtgaaatgtatgctaatttttgcttccatctggctggtgccttgcctgacttcagtgaagacaatgaaaagatcacattcaaaagattgcttttgaataaatgccaagaggagtttgagagaggtgaaagggaagaagctgaa

SEQ ID NO: 2406 - DNA, 324 bp, Zea mays
  misc_feature (98)..(98): n is a, c, g, or t
gcagatgattgtaagaaaaaagttgagcttgatgattgggaagatgctgcagacatgtctactccaaagctggcaccagattctggaaatcaggctgncaccacccaagtgctagattcagatacaagtgaagcaaacagcaggaagaaatattcacgggattttctgttgaccttgcaacaccactgtactggtcttcctgttggatttcagatgaatgaagctgtcaatgcaataatgaataatttggttggaaagtcttatgttgttgaccgggaaccttaccctagtcctggaaggggtttggaccgcccaacttctcgt

SEQ ID NO: 2407 - DNA, 922 bp, Zea mays
taatggacgatgctgatgttgaccatgctgttgagcttgcgcactttgccctgttctttaaccaggtatttgtcggtgtaatgtcagaatgagcatgataactgtgttttcagtttcgttctacctaaatatctttcttgtcgtatgaatttgtcagggacaatgctgctgtgctggatctcgcacgtttgtacatgagcgtgtttatgatgagtttgtggagaaggccaaggctcgtgcattgaagcgcgtcgttggtgatccgttcaggaaaggtgttgaacagggcccgcaggtacatctctgaattggatatttaatgagttacttagttacaacctctacattgccagccatgaattccatggagctcctataagtttgacatatcattcgcatagtatctgcttcgccggtaaactcataaaaaaaattctatgttcaaccaacgagccattactttgccaattttattctgatataactgatacaaattttaaccattccttcgatcaactaaagccatacaatagaatcttgaaagtttcatctatcgaggttgacgatgttcactaacgtgacactacattttctccgcatttggactgatgaaaacatgcaaattttgtctcttcctagattgacgacgagcaattcaaaaagatcttgcgctacattaggtatggtgttgacggtggagctacccttgtgacgggtggtgataggttgggtgacaagggtttctacatccagccaacgattttctcagatgtccaggtgagctgtgactgcatccaagtaccagtacaaaatttctgtctcttgcaagatatgcttagtgttccattagaaacaaagaaggatatatttaaagttcgttacatggctgttacaggacggcatgaagatgctcaggaggaga

SEQ ID NO: 2408 - DNA, 903 bp, Zea mays
ttgattgctcgtcgtcatctaggaagagacaaaatttgcatgttttcatcagtccaaacgcgaagaaaatgtagtgtcacgttagtgaacatcgtcaaccttgatagatgaaactttcaagattctattgtatggctttagttgatcgaaggaatggttaaaatttgtatcagttatatcagaataaaattggcaatgtaatggctcgttggttgaacatagaattttttttatgagtttaccggcgaagcagatactatgtgaatgatatgtcaaacttataggagctccatggaattcatgggtggcaatgtagaggttgtaactaagtaactcattaaatatccaattcagagatgtacctgcgggccctgttcaacacctttcctgaacggatcaccaacgacgcgcttcaatgcacgagccttggccttctccacaaactcatcataaacacgctcatgtacaaacgtgcgagatccagcgcagcagcattgtccctgacaaattcatgcgacaagaaagatatttaggtagaatgaaactgaaaacacagttatcatgcttattctgacattacaccgacaaatacctggttaaagaacagggcaaagtgcgcaagctcaacagcatggtcaacatcagcatcgtccattatgatgaaaggggacttgcctcctaactccagtgtcactgtcttaaggttgctctttgcagccaactcgagaataatttttccagtatcggtagatccagtaaatgcgatctttattgaaggaaagaaataaatgtttagtcgaaaggtatagtttttcagaccattctctataaatgcatacaatatagtttaaaggtgtatttaccttatcaacatccatgtgactagcaagagcagcaccagca

SEQ ID NO: 2409 - DNA, 1103 bp, Zea mays
agcggcccaccgaacccgcctagggattcctaccgagggaggccgcacgcagccatggatttcctgcaggagcaaagcgtcgagaccacagtggccgtcgccgtcgctgtcgccgccgtcgccgcaggcggcgccttcctcctccttcgatccaggaagcccaagggtatggacatgtgtgcaccctactagtctagcagttgtgcggtcgcgagatgcctctggttcgcgtaagatctggttgccaatgggctccgcgctttcatcagctccagtggaattagcgtgctagttcagttatctcggggaaatgactggggaaggggttccagcgcgtcgtcgcacacagtatagttcttttaattattatctggactccgtctgtagagtttctacttgcagcctccaaggcagtagttgttgggggcaaacatcaaatgaaaaggaaaacgagcagaagtttatgcccatggagttttgcttgtagatgtagtaggctgtcagtgtcaatcaaatatagttaagtttaacctgctttcactatctggcaagcatctgttctggctgactgctccatttctgagtggcaggggtggagttttgagtttattttccttgaaaatgtcttattatctctgattggagcatgttattgctagaaaaagactccctccgttccaaaatataagtcgctttgattttttttatacatagattttgttacgtatctagacataacctagccaaaacgacctgtaatttggaacggatggagtgtctgttgcctaactgttctaaccacaggatgtaacagatggtctctgttattacctgcgtggtacgaaatgtctgctactgttgctgtttttggttctgatgtgattttagtgaccgaaagccttattatgtgcaatatagttgtagtttcattgtttattcttgcttctgaaccgtctataagtattagttcttggcaggacatgataatttattcctggcatccattagattttttgtttatcacccaaaaaatatttgtgcttaagtttgcttctgcaattcaaggttaatgcgttatagctcaatttgattgttgtgctgtg

SEQ ID NO: 2410 - DNA, 424 bp, Zea mays
tgttggtagtttacttggctcctattactacttttgctgtgcggctgttcagtgtgcattacagccgaaaggcgacttcctttctatttggaatgtggttatctttatggccgtttttgtttgagaagataaacaaaaccaaggttgtcttctccggtgaaaatgtgcctccaaaacgacgtgtattgttatttgctaaccacaggaccgaggttgactggatgtacttgtgggatcttgcactgaggaaaggccatttaggatatatcaagtacatacttaagagcagcttgatgaagttgcctatttttagctgggcatttcacatttttgagtttatcccggtagaacggaaatgggagattgatgaagcaattattcagaacaagctatcaaaatttaagaacccgagagatcctatctg

SEQ ID NO: 2411 - DNA, 1073 bp, Zea mays
gctggtaaacccccactacagttgcatgttatatagtccgcaatggcatgtcactggctcactgcctcgctgccagtggcaacctcacaatctgtagatggtcattgtgtttgctcaataaggaaaaaagtttcttactgtcatgggaaattggtgttttgtgtaaagcttgttagaaaacagggttgtgccagtgacccaggttacaaaaggcaagcaagtgtcatgtagaatcttgattttgccaactcatgatcttgcagaaccaatcaaacagtattacgaatttatctattccccagcttcgctggccattttgccgagattgaaaatgctaaatacaaagcaagacatctgttttgagtgaaccgaagaggtcatgggtttacatcagaatgatcgcatattagtttgtgtcccatactcaattgccagttgtgggggagggtggtggtcatgtttttggggttatatgagagcgcataagaggtcactgtgccggtgctatatgccttattaggagtactaccgtgtgaaacctctggcagttgttgcattgcagctgggagctcttccttggtacttatggttgaatctgtttcccattccatagctcaatgaatccgtttttttttgccgaatgtgcatcctataaatgtattgatatgtcttctgggctctggccactgactttctattcccactgatggagcaggtgaccctgttttggtcgtgcctgctgttgtttggtgccatcgagttcttcaagtggacgcagctcctatcgacatggagaggagtggcattcactgccgcagggatggcgctcgtgacaggggtcatgcacgtcttcatcatgttctcccaggctgagcggtcgagctcagccaaggcggcacggaaccgggtcaagaaggaatgaaaacggagggtggagatgtgattctgggctctatttatggctagctttcaaaatgactcgattcatattaatgtatacagcaccaaattccagacattgatatgctctgaaacaggatgctctgctcctcttgtatttgtgtgcaggaaag

SEQ ID NO: 2412 - DNA, 423 bp, Zea mays
  misc_feature (386)..(386): n is a, c, g, or t
catagaaaaaaaaaccgaattaggtttttaagacagctagcttttgatacatgtgtgtgttatctcaatattatgagggctccaaaagagtatgatgggtagctcgagtaaatcgaattaaattattttttttactggcagatatctggaacagtttacaaatatatgaaacatttgtcgccagcacgtataactctaattattttgataatcaccacctgtttctgcatttggcaatgacgactgcaaattttgcccggcagctaccagaaatgttgaaggatccattcggacggaagaagcgtctgtgcttgcgaagaacattgactgggccttggtgatgactatctgaaacagcagacgagtcgcgctgcatacctgcagtngtgcctgggatctgtacacaatttgtctcctatagac

SEQ ID NO: 2413 - DNA, 546 bp, Zea mays
actgggccttggtgatgactatctgaaacagcagacgagtcgcgctgcatacctgcagtggtgcttgggatctgtacacaatttgtctcctatagactagcgatggacgtagtggggatgattgtactgttaccgcttagggcttgttcggttagctctcaatccatgtggattgagcgggattggatgggtttgaatcccaaacaagtcaaacttcttcacaattttttccaatcccatccaatccatgtgtattgggaataaccgaacaagcccttatagtggagtcgggaaactgacacatgtgtagattatgttagtagagaaccaaatggagtgaagccggccgcgcaagactcggcggcttcagccatcctccagagcttgtgtagagttgcctagctttgcatcttgccggaagcagcacatcgtgtagagattggacggttttaaaggatcggtggctgggtgtaagtaggttggtgggattacaagcatgggcatggcgacgttcaggatgcaaccggcttgacgactgtacatctg

SEQ ID NO: 2414 - DNA, 627 bp, Zea mays
aggggagccctcttgagagtgagtctggctgcgtagacagcagaagcagcgaccagcgatggcaggcgcgtcaccaaatcgtattgcatcagcgccaattcagcgaagaagaacaccatattctccatctgcagcattccccaccgggcaagataaatgtaagctcttgattggtgaatctctgattggctggctagccatgccgacgaaatttgtttacctctttctcaactttgccgcccaatgttgcggccttcagaaaacggacaaggaacatatacactgtagggacagtcaggttccactccagcctattcagaattcccttctccatcgaaagaatctgttctctactgtatgcactgtctgatatgaggatgaagtcgttcacctgaaaaaacacatatgaatatgaatcttagaagagaagtagcacactgagaacatgggaacagagagagatgaaaagctttctgtgcgcacctctggggcccaaatctcctcgtacttgcaggcgatcagcatagatgaaacgccgacaagctgcagctccttacgcaggactggttgcagcgagaggtactgatcgatgatgtacatggtcaggtagagagtttcgggcatcag

SEQ ID NO: 2415 - DNA, 1462 bp, Zea mays
  misc_feature (1086)..(1087): n is a, c, g, or t
  misc_feature (1298)..(1301): n is a, c, g, or t
  misc_feature (1315)..(1321): n is a, c, g, or t
  misc_feature (1380)..(1384): n is a, c, g, or t
  misc_feature (1392)..(1397): n is a, c, g, or t
  misc_feature (1400)..(1400): n is a, c, g, or t
  misc_feature (1418)..(1423): n is a, c, g, or t
  misc_feature (1425)..(1434): n is a, c, g, or t
  misc_feature (1436)..(1440): n is a, c, g, or t
  misc_feature (1451)..(1452): n is a, c, g, or t
tacgacttgagctactgataaagtattgtgtcttttggttccattgcacacaccctggcttcaaacattgcctaccggaatgacaccaacaatatgcagtttaccttggtatgcattcaccttagctcctgcccttacatttttgttgttgtatagatcttcctattttaacaatcattttgctatgccattgtatatccactgtatacacttaggtggctatgacaaggaggacaaggcagcaagggcttacgatttggcagctctcaagtattggggcactacgacaacaacaaatttccctgtacgcaaagttctatatggtgtttctttgggtgcttataacagaagcattttgacttgttttttaaacactatatatattaatctttgttcttgaatttatttttttgccaaaatttcattgttgcagataagcaactacgaaaaagagctagaagaaatgaaacatatgactagacaggagtacattgcatacctaagaaggtattattttgatgcttgtgtccttctcattggttcacttccatgaatgatttgactaacagttaatatgatcttatacattcagaaatagcagtggattttctcgtggggcatcaaagtatcgtggagtaactaggtaattaaacttcactagtaggcaatgtatgatttgtgtgcatacaaaaaaattgtccttttatttcacattatcattagatgcctgttgtgggaaaaacataactttacaagagatttatggaacttgtttttgtttcctttttttatattgacatcaatgttgttaatcgatcagacatcatcagcatgggagatggcaagcaaggatagggagagttgcaggaaacaaggatctttacttgggcacattcagtaagctagctagctgccttcttttcttgtttgtttgttttgagaactcagtgaagctagcacccattgattagtgattaatgcaactcataaaacctaattgctcggttaatggtgatccttaggttagttaatgactagctcatagtgttatatagtatgtccccaagatataagtcatctcgcccnntccgtacttgtttagtcaaatttcttgaaatgtttgtctggtagaattgaagattggatattctatatgttgctctatgggagcataaaatagtgactactccattatctatgtcccaaatgtgcctttccgagtgtttgtcttaaagttgtctgagaaaatcggggcatgcggtcaaaggggtagagcagaaatcctaagtgctttgaannnnacaatgtgcatacnnnnnnnggcatgcatgcaataggcgacatataggatatatgagacctagcctgcattggggaacnnnnnccgtaatnnnnnntcnagaagggaagggcagagnnnnnncnnnnnnnnnnannnnnagaaggcaaanncagagaggtg

SEQ ID NO: 2416 - DNA, 566 bp, Zea mays
  misc_feature (546)..(551): n is a, c, g, or t
cagtgcttttactgtagcatatttgaaaacctttctatacttcttttattttctccaaagtaatttctcataattcatttactaaaacgtttatgccttgatcttgtgcacacagaactgcaagataaaccattctgtagttggactccgatcttgcatatctgaaggtgctatcatagaggacagtttactaatgggtgcggactactatgaggtaaatatatacgtacaagtatatactgctgtcaatgcaacaatagagctcacacagctgtgttctttttttccagacagaagctgataaaaaactccttgccgaaaaaggtggcattcctattggtattgggaaaaattcatgcatcaggagagcaatcattgacaagaatgctcgaattggagacaatgttaaggtattccaaactgatgttccaacggtcaagaatattaatttagatttttccttaggatattacataatacttgatatgccattttgtcctcttatttttaacatttatttttgaaaatattaacttgaaaatatgnnnnnncttgcatgctctttt

SEQ ID NO: 2417 - DNA, 412 bp, Zea mays
agctgcagagagggaccattgattggtgagcgagggcagccatggcggcagatggagatggagagggaggggggaagaggcaatgagttgcggtggatggatgatgattggtagggttaaatgaggtggtcaaagggccgggcggtcagtgctcctgccaagatgcagccctgcctgcaaagtttctgttcatattcatgagggcaaaaattgtttgtttccgagtggtttgtttgtattttgttgatgccgctgaggtgaggtgagggcgtcagagagagagaaagagagagagagaaagaggggcatgctttgctttgctgtgatgggagtcacatggatatgccctactgtggtggtgctctggagggaaatatttgtccatctccagagctaacagtgtccaagcatg

SEQ ID NO: 2418 - DNA, 375 bp, Zea mays
gaaaaaagagatacaaacaatcagcaagggcccccaaaagccccatgcttggacactgttagctctggagatggacaaatatttccctccagagcaccaccacagtagggcatatccatgtgactcccatcacagcaaagcaaagcatgcccctctttctctctctctgacgccctcgcctcagcggcatcaacaaaatacaaacaaaccactcggaaacaaacaatttttgccctcatgaatatgaacagaaactttgcaggcagggctgcatcttggcaggagcactgaccgcccggccctttgaccacctcatttaaccctaccaatcatcatccatccaccgcaactcattgcctcttcccccctccctct

SEQ ID NO: 2419 - DNA, 413 bp, Zea mays
tcctaatgtcagtctctctgaccctagatcctttggagctgcggttggacaggtttgggcatcattatacacaaggagagcaatccttagccgtcgagcagccggtgtacctcagagagacgcaaagatggcggttctcgtgcaggaaatgctgcagccagatctctcttttgtgcttcatacaattagcccagttgaccatgatcccaaattagtagaggctgaggttgcccctggtcttggagaaaccctcgcttctggtacccgtggcactccatggagactctcatgtcacaagcttgatggcaaagtcacaactctagcttttgcgaatttcagtgaagagcttatggtgctcaactctggccctaccgatggtgaaatgagtcgtaggaccgtagactacagcaaga

SEQ ID NO: 2420 - DNA, 763 bp, Zea mays
gagctcgtcagtcttcacaacagaggtgccgggcgtgcaccaatctgaagttgtggactgctctgccctgactacactccagatgacatacgctcatgaaaccgtctggcccttctgttgcaataagcatttgctgtcacacgagaatccctcattcaaaactcaccgctccagatgtcaattttgttgggccattatgatattatgggtccatgcttggaacctccatatgtggcccgtcaactgtgaccggctgctgattatgggctcgaggggtgacaacatcttctgacaagaaatctatctggtcccactgcacttcttctattttccatgtcaagaaattcatgctgtaacaacaattatgtaacagaacagatgattttaaaccagcttaatgcatgatcatcaaggatacgtcctgttttccacatatcagtcatgctaacatccccctctgttaggagccagtaatcagaatccgtctgcaaattttgtgtagaatggtaagttactcaagatagcacaaccacctactttataacttagcaggttctatacagatttgcattcaggttctaggaagtaaaactcagaaaagcatatgaaagattcatatgtacatgcacattgatggaacattattttatagcacataatttcagatggggtgcattgttaataataagctttatgatcatggcaaagggggaaaagctgaagttcaacttcacaatgatctgacttacatggacgtcggaag

SEQ ID NO: 2421 - DNA, 280 bp, Zea mays
  misc_feature (192)..(207): n is a, c, g, or t
  misc_feature (228)..(236): n is a, c, g, or t
  misc_feature (258)..(263): n is a, c, g, or t
gtgaaaaactaaggggcttaactgaagatgaaaataataaaaggtaactatatttcttttacatcagttatgtttgtatgtcaccatctaatactgcatctatgtttcgtctgtctattaggtggctctatgtgactgaagacgacatcaagggattacccagctttcaggtctgctttagtttaaaggttnnnnnnnnnnnnnnnnatggattatctgttgctttannnnnnnnnaattctcttgaagtcaacatgnnnnnnagattggcaaataacat

SEQ ID NO: 2422 - DNA, 1074 bp, Zea mays
  misc_feature (564)..(568): n is a, c, g, or t
  misc_feature (1047)..(1047): n is a, c, g, or t
ttgtttctaatgcaagttgcaccaccaactgccttgctccacttgccaaggtcattttgcttattgctgtctgtttaccagtgtctagtttctgccaacaacggttcttgataatcaaaataaacggctcttgtacttcatattttctgcctttccaaaccctaatttcttaaacacggtgtgcaggttgtacatgaggaatttggcatcgtggagggccttatgacaactgttcatgccacaacaggttggttactggctttcatccagtgtctacctgttaagtcatttgccattttcatgcattttcaaaataattgtcatgagcatgttactgtaccatgtccagccacccagaagaccgttgatggtccttcaatgaaggattggagaggaggacgtggtgctggccaaaacataattcctagctccactggtgcagcaaaggtagctgaagccaaaggcacaccatgcgtattttagactcaaattttgcactgactgatttcactttgttgtcaggctgttggaaaagttctgcctgagctgaatggaaagctcacnnnnntggccttccgagttccaacaccaaatgtctctgttgtggacttgacatgccggattgagaaaaacgcctcctatgatgatgtgaaagcagccatcaagtatgtagaagtacctcacttgttgcttccgtatggttttcagcttccggtttgctattctgatgagtgaaagcacaacctcttgataaattagtaatcagcaatttgaaggctcacataatggtcgtagcacttcatactttgcagcgcatgatttacataaactagagatagttgcagcatttgttagatctggagagaggtagcaaaatatctcggtccaacatcttgctcactgtaggctgcacgattggacagtaggtagctcaattgcatgctcatgttactctggccccactagaaattatgtgtgaacttcatttgaagcgtgctctgctgtggtattcctaagatttgtgcagagagcaaccatgcgcatatnaccagccatcctacggtggatcttatg

SEQ ID NO: 2423 - DNA, 603 bp, Zea mays
ttatggaggttagcttctgataagccgtgttaagctgcgtgtaagaggatagataagcaaaaaaacagtttcaaatctcatagtgctacgcatatgatgagatggggcagacttacatccatgttctcaaaccaaaacatgtaagcgattgcaaccgcaggtgctctcccaagcccagcggtgcagtggacataaacccgccctttgcgctgcgacgtagcccattctagcgccgaaactgctttcagcagttgcgacctcagtgagtctggatcaaaatccacggcctgcaaacaagcaaccgtaagcatgcatgtagaagaggtcaggtgctcctagtgtcgataactggaatgcaaactgagctaagagaggcactaattagtattttcaaagttatcagaaattcagaagaaaattaagcgaacagggtatagcaagctcaccggtctcctgatgtgctgaatgccaagttctttgcacctattgacaatggattggaagtcaatgccccaatattcaatgtccttgtcctgctgtaagcaaagaatatatgctactcgctcttcatttttcaagcgatcgatatcttcaggcttctga

SEQ ID NO: 2424 - DNA, 299 bp, Zea mays
ccgccgccggcatcgccttcatgtgctacgaggcgtgcaagaagatcctcgtcgacaaggaggaggatgaggaggaggaggacggagccggcggcggagaggatgacaagaaaaaggttgaatgatcaaagttcttggccaagaaggtggcaatgtcgtgaagcgtacgtgaactggaaacggatggacaagtatatttggagtttgatgtggtgtttccggatcgtgtgtttgtctcagatgaaaaaaaatacaatattttgagtccaagttaatcaatgttccatttgcctatcaaa

SEQ ID NO: 2425 - DNA, 392 bp, Zea mays
ctgctggcttggaccttctctctgtaagtcaaatggattgctgatcatgaccgctgcatcgtatatcctcgctgtattgaattcacctatttccgtctgctgacagaaaatgcttcgatatgagccaagcaaaagaatcacagctaggcaagcacttgagcacgagtacttcaaggaccttgagatggtacagtgacctgctaaatgtgcttggggttgctttggcatttgtaattgtatgagctgagtcgctcattcctttttatgggcgtctgtactctctcattctctctgcatttttgtcgttcaactggatattttgaatctggtgtgttttgagatgtattaaggaatatcaaatagattaccgccttggtctctatttactgaaa

SEQ ID NO: 2426 - DNA, 690 bp, Zea mays
  misc_feature (663)..(663): n is a, c, g, or t
  misc_feature (683)..(684): n is a, c, g, or t
tgccagtgcattcttattataaatttattacaaaattggttacttttgtacgggatgccgatcaagcagcagaccacgggttgcatccaaatgttctcttttcctgagcggttttcgctcccaaagaatacgtcaaaacacggtaattgcctcctttcatttacaatagcagcctcctgatgtcgctgaaattcagcgccagctccgtgaaaaacttgcctgctcccgcccatacagtgcaagaaaagaggagtgactaaattgtgatgaaatagtacacactaaaagggaatgatataaagacaaaacaaagcaagaaaagagatgcacacctcctacttgcccatcaaatacacgatggtcagcagatagtgtcaggctcatctttgtaactgcagcagccttctcggttcctggacaatcacacgagtttaaaaaaaaagaagtgtctacgttgttccgaacaggagcgcagtgtgtctagaaaatataccatcgctgtccacaacaggttcaacaaccttgtttcctctacccactgcgagaatgccagactgatagaaagaaatgaagaataggaacgtcactacgtcagtatataaattagaagggtcccattactagggaagcaaacatgtgcacataggggacctgtggagggtnaatgattgcacagaaatggnncacagg

SEQ ID NO: 2427 - DNA, 600 bp, Zea mays
tgctgattgcttcaacgtaccatcaaggatgagggtttctcttccttgtggaggggtaacactgctaatgttattcgttacttccctactcaggtagcccacacattccattatattttgtactgagtaactattgtaaatatgttgaaactgcatggtctttcagtacctaaattattgaatgctcattatggttttcctgatcttgccgtgtgtacaagttactgattataatttaacttatatattactaattgtcttaatatctttgtcctaggctttgaactttgcgtttaaggactacttcaagaggctgttcaacttcaagaaggacagggatggttactggaagtggtttgctggcaacctggcctctggtggtgctgctggtgcttcctctttgttttttgtgtactccctggattatgcgaggacaaggttggccaatgatgccaaggctgccaagggaggaggcgatagacaattcaatggtcttgtggatgtctaccgcaagacactcaaatctgatggtattgctgggctttaccgtggatttaacatatcttgtgttggaattattgtttatcgtggcctgtattt

SEQ ID NO: 2428 - DNA, 640 bp, Zea mays
ctaactgaaacagttatcatgtggctctccaatgagcaagagttctgggatatctttgacgaccgatctgtccaactccagccttcggggctgcagcaggtatatgttttctcgagttctcgtgctacttggatgcaaacgctgaagttatcaaatcataaccagagctgtctgcggatggtttctcttttcttgaatgctccttcttgcagcttattcttgatatgcacttcattgtcgagattgctgtgtgtggaaggtttccatatagaccagttcagcagcttgtgtccacaatcataaccagagcagttgcagctttctcagcaaggggtgttgatccacaaaggtctgtactctgtagccagaatcctttttctattcttttttggtactattctcgtaatgttttaggtcgaatgcttgcctagtgtttaacgtcacctttgtccttccactaaaaatgatttcagtgttcttcctgaggacgggtggtttgtcgacaccgccaaggccgcaatccacaagctcatgctgggggtttctgggtctgagtctgagcccgagcccgaggcggaagaacatattgttctgcatggcgaggtctcagattctgaggagagctcaggtgcatcgacag

SEQ ID NO: 2429 - DNA, 617 bp, Zea mays
  misc_feature (579)..(580): n is a, c, g, or t
gcaggcagatcttcatccatgcctaactctcttcgcagctcatcctattaaaaaggacaacaataggtactatagtcggtaagttctgaaagatagaaaagatccataaaaatcagtatgacaacgctatactgcaattagctgaagaaattttgtaccttcggtcgaacaggtttgacaaaagagggccggacagggaggccatagactttaatctgtgcgggcttcagtccagcttttagtgctctcttttccacctcagttgatggacagtaacatctagtgacaagcttatggaacctaaggggcaacaatagaataactatttcattgtaagagtgtatgtctcgcattttgataagaaactacaaaagaagtatttgacttatgtagaacactgaggccagcataccatgttgggtgacaagtgctgagatccgtgataacagttgcgaatgggatcttatccaagagacctttcgatcttagaattcggagggggacatgttgcattaaagggtgtacactgataattacatctggttggtacttcattagaccttttgccacttctctgcnnaaagaagtagcaatttaagtgagggagagagagagag

SEQ ID NO: 2430 - DNA, 417 bp, Zea mays
tacatacattatgagcataccaccagtgttacactagatttaaaaatactgcatactaatgcaagcatagttaggaagtacaaatactgcaaatctgctaggcagatagctgagtggcctgaccaatatagatgtattccttcagccttcaatagcgatggccttatttaccataagcccataaccaaatcgtgcagccaacatcttgatttcattttccatcacatcatgatttcttgatctcccatcttccagaatatctcagggcatttgtagtcccacattacaggtgatggtagatgacaggggctactgctgcacgtcttctctttcccttcagcaatactcagcaagttaggtgcatgtggtgcctcaatctccttccatatctgatccatgggatatccatccatgaca

SEQ ID NO: 2431 - DNA, 427 bp, Zea mays
cctcctcactgacataccaaacctgccttcttgacaccattccagtcattgggatgggcagtggtgacactcacaatggtagctgtgtcaccagcaccctcgagaacacacagagtgtcatggatggatatcccatggatcagatatggaaggagattgaggcaccacatgcacctaacttgctgagtattgctgaagggaaagagaagacgtgcagcagtagcccctgtcatctaccatcacctgtaatgtgggactacaaatgccctgagatattctggaagatgggagatcaagaaatcatgatgtgatggaaaatgaaatcaagatgttggctgcacgatttggttatgggcttatggtaaataaggccatcgctattgaaggctgaaggaatacatctatattggtcaggccactcagctat

SEQ ID NO: 2432 - DNA, 495 bp, Zea mays
ttcttttacttttttgctgctttgtccttcagcgatctgctcagttcgtttgtaatttgcacagattgatcactcggtggtggagagcttcggagctgacgggcggatgtgcatcacggctcgagtgtaccctgagcacgcggagacgagcaacagccacatgttcgtgttcaacaatggcagcggcacggtggaggtgtccaagctcgaggcatgggagctcgcggcggcgaccgtaaattccgttgggggcaacgacagcttggttatgtctgaatctaataaccaaagtgaatcctattaaaatcttcaggttaatgtgtcaaaaatggggtccgtttgatttgattgctatactttgttatggagagggtgggggaaaggtgtacgtatttcaaataagaaatattggccgattgctgttgagaaattcatattggttgatttggagaggagaataaacaagttctactgatctggcacctctggctagca

SEQ ID NO: 2433 - DNA, 602 bp, Zea mays
  misc_feature (8)..(8): n is a, c, g, or t
  misc_feature (545)..(545): n is a, c, g, or t
  misc_feature (584)..(592): n is a, c, g, or t
atgcatcngaagccagactagccaaagttacaagggagctaacaataaaaagataaaagttcagacattgatatttctgcttgcatactccctggcaactgtttttgtgaaaccaatcactccagccttggctgcgctataattagcttggccaacattgccagtaagaccaactacagatgcaatgttgataatttttccctgcatttttacataaaaatgtgcacattacaacaacattttagagatcagtatacaagacaaatacaaacataactcatggtaacaaactatcaggcccattactgaggtgcgattcaatagttatgcattatcaatgtgagtcactgactggtctaaattcttaaggttttaatcccattcagctattcataaacacagggtaaaaaaacgatgcaacaagccagtaatttctttgtacttctaaaagaagtaaatctatcccagttcctaactggaaactgtgtaagaggaagagagttgcgacagttgtttacttatgaaacttgagtattgcaaaagtnctgactaaattctatggtgcttttctggctaatttgccnnnnnnnnnacccataatt

SEQ ID NO: 2434 - DNA, 488 bp, Zea mays
actgcatgtatcactggccatgacattcctgttgcggatcaatggttcgtgtccaacggaaatgctgatcgcctgagtgtgatctgattctgatcctatccaaatagccacgcgatcttgtcgagcacccagtcgacagcctctgcgagcccgccgccgacgctcatgtcggtctccggatcaaacgggaacgccggcgccggcgcggtggcttccagcagccgctccatgggcatctccggcgcggaccgctctaggggcttgaggggccgaccgtaccggtccgcatcagggcagtaatccttcatgaatgaagcaggagagagagagagaaaaaaaagacagatggttatatccggtgcagcccacatcatagaagcccagcctgtgtattcaaatgggccagaacgagatacgccaagcccgagaggcttaccaggtcggcgtgcattttccggacgaaggtccggaagatccggaagttgttg

SEQ ID NO: 2435 - DNA, 1138 bp, Zea mays
tactcttcagaagatgcccgaggcttgcttaaagctgctattagagatcctgatcctgttattttcttggaaaatgaattgctgtatgtcagtctgatcttgttgaatcattttgctagttgcctatcattttgctgagatgctattgtaccatttgcagttatggagaatctttcccagtttctgctgaagtgcttgattctagtttttgcctaccgattggcaaagctaaggtatgttgtgtcttgggtgcatatgggtgtatgggaaggagattactttaggtaggactatttctataagtttaccttgggatggttttgagtggacttcctattgctttcaaaacggttctccatttccttttctggattatacttgataccatgtgcacttcactgtgggcctcatctttctgtagatagaacgtgggggtaaagatgttaccattactgcattctccaagatggttggctatgctctccaggtatgcgatgttgtactttgtaaacaatgtaaaggaggattaattattaattcattaatcgaataagcattaccctataggttggaaaataattagcatatgtgtttcccaatatatgtttacttctgtagggatttggatgtactgcatcaatgcacttttgttagtcgttaaactgatctacaaggttgtccgttcgaaaactgtaattttgatttttgtcctaagagggatatttaggtgacagatggttttagtagtgctcatttcacttgtctgtcttaatttttcatcatagtgggctgttattttggtgcattctcatgctaagtttgcttcaggctgcagagatactgtccaaggaaggaatcagtgctgaggtaattccttttgtagacgttataaattcacttgttcagtatggccatttagttttctccatatgccatctgtagcaccttacttttggttcgtatttgttgacaggtgatcaaccttcgatcgatcagaccacttgatagagctgctattaatgcatctgtcaggaaaaccaaccgattggtgactgttgaagaagggttccctcaacatgggattggtgccgagatatggttcgtctagcccttaccctctcacacatttgtgtgtggt

SEQ ID NO: 2436 - DNA, 1134 bp, Zea mays
gctgctattagggatcctgatcctgttattttcttggaaaatgaattgctgtatgtcagtctgatcttgttgaatcattttgctagctgcctatcattttgctgagatgctattgtaccatttgcagttatggagaatctttcccagtttctgctgaagtgcttgattctagtttttgcctaccgattggcaaagctaaggtatgttgtgtcttgggtgcatatgggtgtatgggaaggagattactttaggtaggactatttctataagtttaccttgggatggttttgagtggacttccttttgctttcaaaacggttctccatttccttttctggattatacttgataccatgtgcacttcactgtgggcctcatctttctgtagatagaacgtgggggtaaagatgttaccattactgcattctccaagatggttggctatgctctccaggtatgcgatgttgtactttgtaaacaatgtaaaggaggattaattattaattcattaatcgaataagcattaccctataggttggaaaataattagcatatgtgtttcccaatatatgtttacttctgtagggatttggatgtactgcatcaatgcacttttgttagtcgttaaactgatctacaaggttgtccgttcgaaaactgtaattttgatttttgtcctaagagggatatttaggtgacagatggttttagtagtgctcatttcacttgtctgtcttaatttttcatcatagtgggctgttattttggtgcattctcatgctaagtttgcttcaggctgcagagatactgtccaaggaaggaatcagtgctgaggtaattccttttgtagacgttataaattcacttgttcagtatggccatttagttttctccatatgccatctgtagcaccttacttttggttcgtatttgttgacaggtgatcaaccttcgatcgatcagaccacttgatagagctgctattaatgcatctgtcaggaaaaccaaccgattggtgactgttgaagaagggttccctcaacatgggattggtgccgagatatggttcgtctagcccttaccctctcacacatttgtgtgtggtatctagtattttaataaatgatgcttgtt

SEQ ID NO: 2437 - DNA, 556 bp, Zea mays
  misc_feature (194)..(194): n is a, c, g, or t
  misc_feature (196)..(196): n is a, c, g, or t
  misc_feature (482)..(486): n is a, c, g, or t
  misc_feature (491)..(496): n is a, c, g, or t
  misc_feature (505)..(523): n is a, c, g, or t
  misc_feature (536)..(549): n is a, c, g, or t
tgcattttttgtcttactataggtcacaagggcaattcttgagaacccaaaggacaacacgaaagtacacttaatctatgcaaatgtcacgtatgaggatattcttctgaaggtatatgcctttttatgctgacagacttcattgactcttaacctgatatcagttatatacctgtatgcaaaagggtctggtncnattgatggtgcctatttggtgagacactggtatcattactctccatctgtccagcttacattacgaataaactagtaggtctggtttctgagatatggaaacaatctgattttttgctcataatttatggatcatgccatgaagagcataaacatgtctcagaataccaggcaagttgtgttttttactagaattctatatacggtctcttgcaaaaaattcttatataaaaatatgtgtaagcagcactctttgtctacaaataattacggatttatttctccannnnnaaacnnnnnnctcttgtcnnnnnnnnnnnnnnnnnnntacattactgttnnnnnnnnnnnnnntgtttat

SEQ ID NO: 2438 - DNA, 371 bp, Zea mays
  misc_feature (263)..(267): n is a, c, g, or t
  misc_feature (288)..(292): n is a, c, g, or t
  misc_feature (310)..(324): n is a, c, g, or t
  misc_feature (347)..(360): n is a, c, g, or t
atggcgatatggtcaggcttcgtctgctcaaagaggcgacgaaacttgttccacccccgtttattctggtactggtagagagaatgtaacgcttagaactggaactgcatctccttcgtgtagccaaggtcgtccaggtgcgcggccatggctttgttcatgggaggaggtccacatcgcaatacctgaaaacggaaaactgatctgacttccaccgagcaaaaactgatggcccccatccaagttccctcaaaatactttcnnnnnccggaaaagcttacctgaatnnnnncggcaggcgctgggcaannnnnnnnnnnnnnntccttcgacacgaacccgacgcnnnnnnnnnnnnnntcaggaggctg

SEQ ID NO: 2439 - DNA, 378 bp, Zea mays
cctctcagtgttgttaccacttgttttgcatcttctctgcagcagcatctctcaccacatgcaatgcaacattgcatcaacaatggtttatcaaacagtgcaactttgaagtaaagttcactgaatgtgaagtgtgccctgtttgggcgctggcattgggcttattaacctaagctctcctctccataggaaagctcagccctctgctttgttcatctcttccacctctcacaaaccaaaccaatcaaatctgacaacagccaatgccaacccatggcaatggctcaaagaacctaaaaaaatatcttctttttcgcaaacatataagttcaaaaagaagggaagaaaatgaaagggaagatcaaaccaagcccccct

SEQ ID NO: 2440 - DNA, 401 bp, Zea mays
gttcgagatggtgactttggcagcaaactatctggcagaagatcagaatggttactagcatcctctattggaagcaaatcacacggaccgtgacctaaactaatttaactatgaagtgtgaccaatagaggagatataagtggtggggtcacaatggaggagaccaaagcggggagatcgaagacaaaggaggcctcctgtgcatggtttgtttctgtttccgcctttcgagttctttcttacgacaatcttgggtcgcacaaatgggtgttgtaagtattgatctgtagctacaaatgtatgatgggggagtgattgcttctcatacatgttccttctggggctatgtccatatgttgtaagccccatgaaaacagatttgtcgcagccatatccattca

SEQ ID NO: 2441 - DNA, 368 bp, Zea mays
gttccgtttactcatctctggtgtggagccgaatccatcacctagcagcccagcggtcttcacatgattaagtgccgtttcctggatcaaatccaaactttttcatagtccaatcctcagccacaacaatctcacacctcaaatgtaacaaatccttacctgcaaatggttcatcattgtctctatagatgccgtcctatcagccccaatctcataggacctaatggagaagttctgcttgaacatgaggccatcatgtatgatccggccaaacccaaaagtgtcagtgagcatgtcaggccgcctgggcttccaatcaagcatcgtccactgcttctcggcggccaagaagatggtcgtgatggcag

SEQ ID NO: 2442 - DNA, 603 bp, Zea mays
acccacaacttgttcgggcagttccgctggatctctgcccagacaaacagggcccgtaacggcgagctctatcgctacatcgctgatacccatggtgctttcgtacaggtatatatatatatatggctctggattacaatctagattatatagaggttccattccatacctggcatatgtaccgactttaatcttggcatgttaactacagccggccttctatgaagcgttcggtctcaccgtcgttgaggccatgacctgtgggcttcctactttcgcgacgctccatggaggtccagctgagatcatagagcatggcgtctcgggcttccacattgacccgtaccaccccgaacaggctgctaatctgatggccgacttcttcgaccggtgcaagcaagacccagatcactgggtgaaaatatctggagcagggctgcagcgcatatacgagaagtcggtgctggaaatcctgttctactcatggttggtctctagtcagtgtgatgctcattttctttcgtacgtgttgcgtacccaggtacacatggaagatatactcagagaggttgatgacactggccggggtctacggtttctgga

SEQ ID NO: 2443 - DNA, 635 bp, Zea mays
  misc_feature (599)..(601): n is a, c, g, or t
  misc_feature (608)..(612): n is a, c, g, or t
  misc_feature (619)..(624): n is a, c, g, or t
tctggagcagggctgcagcgcatatacgagaagtcggtgctggaaatcctgttctactcatggtctcatggttggtctctagtcagtgtgatgctcattttctttcgtacgtgttgcgtacccaggtacacatggaagatatactcagagaggttgatgacactggccggggtctacggtttctggaagtacgtgtcgaagctcgagaggcgggagacgaggcgctaccttgagatgttctacatactgaagttccgcgagctggtgtgctctgttctcaactctcttatcatttacaaagtttacaaatatatggaaatgaaatttagtctcttgtcattatatttccttgtaagattgactggctggcttctgcttcccgtgcatgcaggcgaagaccgtgccgcttgcaattgaccaaccgcagtagcttgcgcaactgcgactgcgtagcacttggtacaagactgaaacctgaaggaccttcagtaatttaggcgcggcagacggtagccaataaaatgtgccggagctgaactggtttttattatgtacataatggcagtataacaaaattactgaaggcaggtgggttgcannngtgtgtnnnnnactgttnnnnnnattatgtcaag

SEQ ID NO: 2444 - DNA, 860 bp, Zea mays
aacgacgatccaagcctgaaagattttcttaccaaggtaaggatttctcctttatgtcatggtatattagtgtgtgttttattttataagtcctcatctggaactatattcgtagtggcagttgtcattcaggtaaatatgacattgcacataagtttatggtttcgctgagcatagagcacataagttgagtactcgagtctgttttactattattaagtcatggaaatgaaagcataggatgatgataccgttgcaatacttgctaaagaacgaacaaaaataaacactattctacattttctcttggtcttacgactagtggattgtaacgtgggcctaatttgtttgaatcacctagatgtacaggtgtatatatgtagtgttgcttttgtacatgtataagcgaaacactccatgatccatgcaggaatagagaagtaacgttctgtgcttcctgctccattccatgtagatttcctgttcactgcaaattcttgcatggtctaaacctgtaatatcaactgccgcaactgttctctattagtctaatggatctgttggtctattacccgagctaactcctcatggccacctggtctgagcagaaatcgtcgttcctagaagactggctgagatcactatccgcatcgttgaacagctccgagcgccagcccttgccaacggaggccacaaacgacgaggacggcttcagcccaaacgtgactcagaaaggcatgctgtcttccgccctgcagtccttgctcggcgtatacgcgggcaggacccagcaggtcatcacccagagatttgagcaactggctagaagcgtcgcttgaatggtgagcagcgacgagcag

SEQ ID NO: 2445 - DNA, 444 bp, Zea mays
ccgtacttctttccgaagaagaggatctggagctggtcatagccagaaagcacaccagcaccagcaatggcacgaagaatgttagcaccagcacccttgaacagggacttgggcccttccttcttaagaatctgctggaacgcgtccaaggagctcttgtacttgacagcctcaccagatgtcatcatcatccttctgcggacggtatcaatggggtaagatgcaagaccagcaccattagtgatcagccaacccagagcgaaactggcaaagaaattgtcctgcaagagagagaaacatattatagctcacactacaaacccacaagcaatatatagaaagagacagaaattagacaaacctggaggttgccagtaaggacaactggcttgatggaatcatagagcccaaagtacagaccacgataaacaatgatccaacaca

SEQ ID NO: 2446 - DNA, 633 bp, Zea mays
cttatagctcacacaggcaaaagcaaaatacattgagagagagagagacattatgcaaacctggaggctgccagtgaggacaactggcttgatagaatcgtaaagtccgaaatacaggccacgataaacaataattccaacacaagatatgttaaatccacggtaaagcccagcaataccatcagatttgagtgtcttgcggtagacatccacaagaccattgaattgtctatcgcctcctcccttggcagccttggcatcattggccaaccttgtcctcgcataatccagggagtacacaaaaaacaaagaggaagcaccagcagcaccaccagaggccaggttgccagcaaaccacttccagtaaccatccctgtccttcttgaagttgaacagcctcttgaagtagtccttaaacgcaaagttcaaagcctaggacaaagatattaagacaattagtaatatataagttaaattataatcagtaacttgtacacacggcaagatcaggaaaaccataatgagcattcaataatttaggtactgaaagaccatgcagtttcaacatatttacaatagttactcagtacaaaatataatggaatgtgtgggctacctgagtagggaagtaac

SEQ ID NO: 2447 - DNA, 622 bp, Zea mays
cgaatcgatcttgaacttcacagatccaatggctgatgatatggcagcagcaggagtccatgctgccaaaatgttgacacctggagcagcaatgtctggctgcagaagaaggtgcagggttttttcagcctcccaactagaactggaggtttgatcaacactgtagaggtttgatcaactgtcgaactggaggtttttttttaccttcagaacagcgggggacagagaacttggaccccgagatgagaaatatgcaacttctgggcccatcagttctccaagaatcgtttttgctgagccaaactggactgttggatttctgtgtatggaaaacagaaattattggaaagttgctgacagctacagcatattgctagattgttacgactgttggaacatgtgcggcactgtttgcatacctcgtgctagtggtgtatgcgagtatagctgttccaacctggtagtctacttgaaaacagggaatatcgaatgaagacgcgatgtccttagttaagaactgggcgaagatgactccgacgccacgagctttcttgacagtctccactgccactgcagctgatctctgtgcccttgtttggaagcaaagtaccacagttccctt

SEQ ID NO: 2448 - DNA, 613 bp, Zea mays
ctctttacactagaaaaagaagatcctaagctctacgcaaataatgtcagaaaactaatagcaatggaggtaggctaaacccaaaactgagcttgtctaaaacaaccatgcaaaggtcaaacaacctcttcgtaatatatgtatccaccgagggctgggtaacaaaaaggcaaagggcaaaacagttctttttttcaaaaaataaaaatcataaaaaaggttcttagggcctttacttagtgtttttcttcttggacttcgttcaagcttggggtctttcctccaataataagctctacaatcaccgatcaccttttttaaaatataaattaatatggtcttaatcccaccatataaataacgttctctttctgcagggcaatttagttctttctaatattgggctggcagagaagcgcgtgtaccatgcagcactgactggtagtagtctacctggcgctagacatgagaaagatgattgaaagacgttgcgtcgctttttctgtaacagacagccgaggaacacttaaaaatgtaactgtgtgcgtgtttttatacctgtaatgtggcagtttatttgtttgaggaggctgttgagtacccttctcatact

SEQ ID NO: 2449 - DNA, 499 bp, Zea mays
tatagatagcattactttagttgatatagctcagtacttccatcttccaatccgagatgcatcaaagacactcaagattggggtcagcatattgaagaggaaatgccgacagtatgggatacctcgttggcctcaccggaagatcaagtcacttgactctctcattcatgaccttgaggtaaatctgatggtatttctgtttcacttcactttgtgaatttccagggaacgaccgtcacaatttgatgcagttgtaacttgatgccaacacaactcatattttgttggacagttcgtgctagcaagagaggatgaggatgatgaggaggagaagcagctgcagaaggacaggctggctgctgcgataaacgccctcacaaaacggaagagcatgctggagagcgagaaggaaaccatacagcagaaaccggccatggacctgatggctgaaaccaagctattcagggaagatgttttcaagaggagatatagggccaaa

SEQ ID NO: 2450 - DNA, 603 bp, Zea mays
ttcctcccgccggggccgaagaagaactgccaaaggaacgaaggacacgatcagccagtcgatggggcggcggctatagtacggtacgggtatggtgaccgagcaacagatgcctcgttgagagcttaataataataatataatgacctggaactcgccaggcacggagatggtatggaggatcttggtgatgaccagtttcttccggccgtcggtgttggccaggtaggtgaccgtcccggccggcgccacgaagacgtggccttgctttatggtgtatgaccgcctctcgccgttctcgatcgtcgtcaccactccctcgcctagacacgacaaaacaacagatcagctaacgtgcatgggccggcgtcgccctcgatctatgtggtctcagctcacggaccggaaccggacggacgtaccttccgccacgtagcagatgcagtgcgcgtcggtgtggctgggcaccacgaacgagcgcgggttcgcctccaggaccgccacgcggtagtcccggatgccgcggaggagcctggacacctcgtcgaagggccggagcaccctcagggacccctgctcgctccggaccacgcgacgaaagct

SEQ ID NO: 2451 - DNA, 423 bp, Zea mays
tttgctccggcacacggaactcaggtagagatactggaagagcagtagaagcttcacccttaaaacctgcagcaaacttaagctgagatacatgaatcaccggatgaatacggctggaatcagaaagttggaggcgatatgccacggcacccacacgagccaacacctgatatggtccgaaatacttgaaacccagtttctggtgagcacggggaagcactgaggattgaacatagggctgtagtttcagatatacccagtcacccaccacaaaggagcgctctgatctgttcttatcggcctgttttttcatacgatcctgggcacggatgaggtgttgacggactaaggcttgcattgctgtgcgttcctgaatccattcagacagtgtggctggaatggctatgtcaagagacaggccta

SEQ ID NO: 2452 - DNA, 773 bp, Zea mays
tttgtatgtttctgatgatactagccaataatcgtagttttggctactactagagtactagctgagtatgtgcgacatgacagattgtgttccacattagttaaagaaaaagacatagaagatgtttttgcttttcctctgctccattttggacaatgatatagtaataggcatcctttgggggaacctacaggttgcaaggattctaatgaagaccgtatctcaattgacatctggaaagcaacctgttggtacaatggcttacatgggcaatgtacaatatctgatgcaatgcaaatgtgctgttaacacaggtacttatttaggctggatcattatattttctagttctcagttatatttgatatttgttccaggcttcttgaggataatgtctgtattgactatggtatacttcatgtttggtgactcaacagccgaagattggcttaaccctgttgccatacaagaggcgtttgaagcccgggctctcaggatggcagtaaactgtgcccagaacataggccaagcagcaaaccaagaagaaggtagtatttattacaaacagtcaataccattctttttcctttttttccatattgtagttgctgaattggaattactgtactaacgatgaccgcatgccttgcaggtttctatgagcggtcccctgatttgctagaggctgcagtagctcacatccagttggtcattgtaaccaagtgagtatcaattcaatgttgtttatgaagtgtgtgctgttcctttccttc

SEQ ID NO: 2453 - DNA, 822 bp, Zea mays
  misc_feature (816)..(816): n is a, c, g, or t
aaaattttctatgggtaaccaaagcaatcaactaattgatttgttagtttcaatttttaataggtaatatccataaatatgccttctatgccgtgccattcgatttgattgtatgccagcctaaccctctttattttccccacctgtgaccaggaatctctcgacaacattaatctattttcgataattacagtcatgtcattcttcctgttggccccggtaaccttacttacagaaggtgttaaagttagtccagcagttttgcagtctgctgtgagtatcctgctgcttattttttcatgataccttataagactagcttgggcagaattctatatttatgaatattgtttcttgtgcagggtttgaacttgaaacagatatacacaaggtcattgattgctgcatgctgcttccatgcataccaacaggtggtgatccatcttgctgatattggtggatttgtttgttctttgattacgtcatcaatgttgattcagattactgtatatgcctttataagttccatttgaaacaatttatagttcacctactgatcttattattttcaatttcttgaaggtgtcatacatgatcctcgccagggtatccccagtcacacattcagtgggcaattgcgtcaagcgtgtggtggtcattgtgacctcggttctgttcttcaggacccctgtttctcccatcaactcactcggtctgcatcttttccttttgctactcttaactattttattccgtcacggttcaccctcacgaatatgaaacattaaatttgtgcaggtaccgggatcgctcttnctggag

SEQ ID NO: 2454 - DNA, 456 bp, Zea mays
atgatgttctgctgtcttccactggtaataaagctacatactcctcatatcaggtctttgaagttggtgaatgaaggtgtcatgtcaaattttctgttgatacaaaatgcagccaaggatgctaccgatgatttcgaagatgtggggcacagcagcactgcccgtgcaatgatggacgagtacttagtgggtgagattgatgcagccacgatacccaccaaggtgaagtacacgccccccaagcagccgcattacaaccaggacaagacccaggagttcgtcatcaagatcctccagtttttggtccccctcgcaatactgggtctggccgtcgctgtaaggatgtacaccaagtcggaatctgcctagtctcttgtcatcaacgctgcaaacataacatcatccacaaactgaataagttagtgttaaaatgctgcaaagatcattaattctgaa

SEQ ID NO: 2455 - DNA, 302 bp, Zea mays
aaaactggaggatcttgatgacgaactcctgggtcttgtcctggttgtaatgcggctgcttggggggcgtgtacttcaccttggtgggtatcgtggctgcatcaatctcacccactaagtactcgtccatcattgcacgggcagtgctgctgtgccccacatcttcgaaatcatcggtagcatccttggctgcattttgtatcaacagaaaatttgacatgacaccttcattcaccaacttcaaagacctgatatgaggagtatgtagctttattaccagtggaagacagcagaacatcatc

SEQ ID NO: 2456 - DNA, 726 bp, Zea mays
acatatagaacgtcagctgatttaggcttattgtatacagatacgatggtgacatgaggttatccaccatacacataataaagatctaggatagattccaacaacaacaaaaaaaactggaagacacgatgctggtttactgtgtgcacagattattgctttcagtttccatgatggaagaaatgaaacaccaaaaaagatctacagatggttattttgccttctcagtccggttcatcacatcatggtaatacaatagaacacacattggctgcccgtatatgcagaaaaaaaaccaaaagatcatattgccaacctattgaatataccacaaattagacaggttcccataaaaaacgatcctagcaagtatcaactaagaaaaatatggctcaccattgtgtcactgaatttatttttgaggtatgatgtcaatatgatgaggggaatctggtaaaaagaggaaaagaaatatggtgtcagatccaacagttttctgtttaggagacaacataaatacatggaaccatattagatgactgttgccttctggtgctcataagacctcagactatatagcaaatggaaaaagaactaataaaggaaaaaatgagtaaagaaaaacataaatgttggatattgatccacagcatctggcgttgtattatatttacctgaagcatgattcctaagaaagcccagaacttgagtatgtggcagggaaca

SEQ ID NO: 2457 - DNA, 523 bp, Zea mays
tcagttctgtactgtgacacgcgacaattaaggctacaagctaacgctaagtttttacaacagaaacaaagctaacacgacggtatgcgcctctgccacgacgctgcggcggtggagggagcggaggtgagttccatgctgctgctctcatgtcctctgaatctatcagtctagcttcacccattcaaacctgcctgggagagggcagtcatttacaggatcaaagttgtacctgaagattaagccatgcatcatacatgtttgtggttagtgcaaggcatcattaagagaagccgaatgcatcagcaaaataatttataatgaatcaagaatcgacaaaacagattatgcaaatcgtacttgtcaatgaaagcctgttgttggcgtcgctgttcagcagcgaagtactcgttcatctccgttgaacttgggagggcgtgcacaggaggagctttcaccctgcggtgggaagagtggctggatcttgttgtggatccgggagtgctgggagtgctgatcatct

SEQ ID NO: 2458 - DNA, 810 bp, Zea mays
ataggactaggggggacgaaatcggttaactaaaatgttactcacggtggggttggtaacgagaagatcatctcctacaatctgcactttctgtccaatctcatcagtgagtttggcataagtgctccagtcatcctgatcaaatgggtcttcgatcgactcgatagggtactcagaaacaaaggacttgtacaggtctttcaggctgtcgcctgaaattttgtttgagccatcgttgttctagccaagaaagtgagtacatgttaatataaaacaaatgttcatgtattaccatacccctatagaataacataaggaatagctatagctctaggtaaataaaactacaaaaacataataagaagttgtgattcttacctcctccttgaaattaagatcataagtcttgtctttctcaccgaagaactcagaagcagcaacatccattccaatgaccacctgccacacaggtaagttgaatcaactatacacacaaaggtttgtctgttcgtgagccaagtagataagagagagcatacctttccagtgtagccagccttttctatggctgccttcaatagttcaaggccttctttgttttcctgcatatattggttgacacagaaattagattgtgagataaatggatgccgatgatcaattttgtaggtaccctacggtcaacataaaacaaaagagtgttcctatagtgacaaccatagagcaataattaatctaccgctttctttggataaaaactaatctgccaacttttgaattatggcgtggtcatcttaaatatgctagata

SEQ ID NO: 2459 - DNA, 673 bp, Zea mays
  misc_feature (659)..(663): n is a, c, g, or t
aggaggtaaacccaccacccattgtagttctttgtccgcttttttgaagacttaaacgttcctatttgatctgttttgctcaattgtccaatcttctctttattatatttgttcagtggcgagacagaggacaccttcattgctgacctctcagttggcctgtctacggtacgctgtcaactggtcaagatactgtcgaatcgaacgtcttgcgtactgacctggtttccatgactccgtttcagggccaaatcaagacgggagctccttgccggtctgagcgcctggccaaatacaaccaggtaaagcgcgcgcgcaaaccttcttcgtttcccaaccaggctatgctttttacctctgaaaccaaacgttcgcggtttgcagctgctcaggatcgaggaagagctcggtgatgccgcggtctacgccggagcaaagttcagggcaccagtggagccctactaagaaaggaagaggatgaggatgttttcttgtggagctatactagctcgctgctgccttttgttacaatgtttgtacggtcgcaataaatgtatggtcgtgtttgctcgagagctactcaggtgattttgtcgtgggagcaccaaaagcagaaaagaactgtttttttcttctctctctctagattctgacgagtnnnnntctgcactcg

SEQ ID NO: 2460 - DNA, 849 bp, Zea mays
atgagatctcacatgcattgccttatgatgttcagtggtgtttccccatgcatataattactgccaagccttttttcctattcaggttcttgcatatgaagcaggtcgaaaaggcaaaatcagagtgaacaccatatcagcaggtaactttttcttcttttccttttccaagaaagtaaacaagtccactttaggaaatcttgccgagcagaatttgtatttgagaacacttatatacaaaactagaagatataagctttaaagtttatctataatacatatgggatttgcagtttgtctgatgctttaataacttagcagcacttgaattgttgtgtgtcatgctttgcatctgtctccttaggtccattgggaagccgagcagcaaaagccattggatttatcgagaagatgatagagtattcttatgttaatgcaccactgcaaaaggaattattggcaggttaaatttccttctttcatttagggctagtttgataactctatttttccaagggattcctatttgtccaatggactaatttttcttgggaaaatggaaatccctttgaaaaatgaggttcccaaactagcccttatatctagtatttttcctgcctgaaaagtggaaaaaagtagagatttcttctttactttctctgaaaacggtttgcattacatatcaacagatgaagtggggaacacggcagcattcctggtgtctcctttggcatcagcaatcactggttcaactatttacgttgacaatgggctcaacacaatgggacttgcacttgacagccccactttatccacatgagcacatttcagcagaatgcggcgcagtta

SEQ ID NO: 2461 - DNA, 846 bp, Zea mays
  misc_feature (18)..(18): n is a, c, g, or t
  misc_feature (20)..(20): n is a, c, g, or t
gcacgtgcattttgattncntaggtaagacatgaattgcattctcttcccctttgcattatgtatcttgtgggccagatatacggtgcttaataacattgtatctcctgatgaaaagatgtccgttcataagaacatcttagatctgtaacatctggatgattcaacaattttattccctgattcttctgctattagtacatgaaactctccttaatgaagggctcctgagtgctaaacacttgctgactcgtaattagcctttttactcacatgaactgatgagcgatttctcatttttgcaataaatacttcctttcttttttgctttgccttcagggctagtttggaatctcaaatcccctctgggattggaggggattgaggagatttgtgtttccaaaccagcattcaaggtcttgtgtatattctgaagacgttaagtcattataatggagcacgaagtgattaaacccttgctgactcgcatatttctaaaaaatgcagcactccatttgagttgcaggatgattcatttgtactgaaagcaatggcattatctggcgaagaaactgattgtacccaagctcctggtgcgaatggaggcgagtgctcaagtacacggaacaattattggcaccaccaccaacaaccgcagcctccagggccaagagtagttagggtaccaaactcgcctcctattccagggatactaaaagggcgtgtcaagcatgaacactaggcttcaatatgcttagtggtgtcaaatgagctatttactttattgtccccagctagttttacctgtagaaaatgcatgtaaattatgcctgtaggggcagccgca

SEQ ID NO: 2462 - DNA, 568 bp, Zea mays
  misc_feature (554)..(560): n is a, c, g, or t
gggagctcatgaagcttggcttccgtgtgcgcgctgccgtcaggaacgcacagagggccacgtcgctggtgcaggtaccagtagcgtcatgagcttggtttccgtgtgctcatgatatatgtttggcattgatttggatccatccacagaaagagaaagagcagcagctgcttgagcttgtggagtgtgacctggagaaggagccgcaggaaggcatcgtttcagccatcggcaatgcttccttggtggtgtgctccatcggtgcaagcgagaaggagatcctggatgtcaccggcccataccgcatcgactacatggccaccagcaaacttgtacaagctgcgactgctgccaagcaggtggagcacttcatcctggttacatccctggggaccaacaagatcggcttccctgcattcctcttgaagtaatttaaatgcttattgtgctccgatccgatcctgctctctaaatatatatagattttatttatttatttatttattggtaattaataatacgatgaaatgcaaagcttgttctggggagttctnnnnnnnaaagacga

SEQ ID NO: 2463 - DNA, 257 bp, Zea mays
  misc_feature (248)..(251): n is a, c, g, or t
cttcggttctgaccttcatcaaagacacagcagttggtgctgaagggtccatataaactgctcgagtttgaactccattgatgtttaagtgatacagcaaactttgaccgtagtcatcatcacctaattttcccatgaatgcaacccttccaccgatcgctgctaaagctagagcaacattggatgaagaccctcctggtgccctcacaaatttgtctggagaccaaaacatgtccttcattcgatcnnnnatctca

SEQ ID NO: 2464 - DNA, 311 bp, Zea mays
agactgctttcagcatctcgaagcctctcaactatattgtatccacgaaaaaggattgaaatttactgttattccgatgaataactgtgcaggaaccatggaaataaatttgatgcagtcaatcgcttgctcgacttaccccaagtttcttcccagtttggttcagctgatcccgaacgtaggtcctcgccttgggatcagcgcacagctctgcaaagtcgccggccttgctgttggctgctgcccattcctcgagagcctgcctctcagggacagccacggcaacgaggaacgactcgaagctgttcccg

SEQ ID NO: 2465 - DNA, 691 bp, Zea mays
aatcatttctcacttcttttaatttgcacctaactgaaggatcagtcagtgaagcagctggtcgattcgtggaacttgtcatcaccctatgtgtgcaggtgatatcggggagtggcaatccaatggcacgatgaagatcatcgacagaaagaagaacatcttcaagctgtcccagggggagtatgtggcagttgaggtcctggaaagagcatacctgcagtcaccccttgtggcatcggtacgccgacaacaccctaaaccaaaattgttttcatgctccgatttggcttacctagaggatggccgctcctacctacgtacgaatctgcaggtctgggtctacgggaacagcttcgagtcgttcctcgttgccgtggctgtccctgagaggcaggctctcgaggaatgggcagcagccaacagcaaggccggcgactttgcagagctgtgcgctgatcccaaggcgaggacctacgttcgggatcagctgaaccaaactgggaagaaacttggggtaagtcgagcaagcgattgactgcatcaaatttatttccatggttcctgcacagttattcatcggaataacagtaaatttcaatcctttttcgtggatacaatatagttgagaggcttcgagatgctgaaagcagtctacctggagccggtgcctttcagcatcgagaaggacctc

SEQ ID NO: 2466 - DNA, 737 bp, Zea mays
  misc_feature (733)..(733): n is a, c, g, or t
agggagtagggacgatacagacgcaacacacaacacatccagcagctatagcagagaagctctgactgaccatggcgatggcggcagaaagaacttctctttacgggtgggaggagatgatacaggcagaccaggatcagctgcatatgccattgccgttatgttacattacaccaccaggcaccatgtacagttgcccccagtccaggcctgcagacggaggaagacacctcatctcctaatgcagcgctgtgagcaccgtagctccttccacctgcaatgcaggaacaagagtacaggtttttcagagaaatgttctaggagttctttcttcttcttcttcttcttcagttacgcttttcagctcactggcaacatctgaattgtgtagcatccatttcaagttaacctctggatccttcctttctaaacatctcatgagaccgatgatgatgcaggcctgacgaactagtgcatgcatggaactgaattctttcttcgagaaaggaaccgatcttacctggaaggttgcgccgcagatttcctcctcgtttgcaggaacggcagtcactttgttcttgggattctcgtagcacttcaatcctccaagggcattagagtagaagcaacctgtgtacggtgcaggaagtgggtactcagtcagggacgaagacgaagacgaccctctcctttctttttttgatgattcagaaagaggaactaaaggcagcanacct

SEQ ID NO: 2467 - DNA, 737 bp, Zea mays
  misc_feature (413)..(414): n is a, c, g, or t
  misc_feature (712)..(732): n is a, c, g, or t
gcaggtggagtgctttgatggttgtattatatcaccatattatgacatttttggagctgtggtttactaatatgacattttctgattatttgtaggtacttgacaatgaccatggaatgagcatgaggccaatgcctggcattgttggtctcatatcttctagttcaaaggtagtttagccttccacaccaacacttgaagttatccattttgctgttgtctttaatgagaaacattttccattttcctgttgtcttccatcgcactgttgatctcagtcatgacgccagtctctttgacttgcactaccaattataacatctcgtgacttattggactttttgcttgccaggaaaagaagaagcaagcaccagcgaaaccatctgatgccaaaagaactcgtagggatcgcnnggagatggaaaacgttatattcaagctttttgaaaggcagcccaattgggccctaaaggcactcgtgcaagaaactgaccagccagaggtatttccttgtccctttcctgaagtgtgatgcatattattatttatgtttcctctattgttctctgactgctcgtgtggttattatttatgtttctctatgcagcaattcctgaaggagatattgaacgatctgtgtgtgtataataaacgaggtccaaaccagggaacgcatgagctcaagcctgagtacaagaaatccacaggggannnnnnnnnnnnnnnnnnnnnagaga

SEQ ID NO: 2468 - DNA, 979 bp, Zea mays
cgcagcatttcttggcgtcggtgtccgcgggttggcgactaagcaatggcgacgaggaaccaccgcgccgctgccgctccgcagccggcgaacagaggtgagcggtcggaatcttgggtctttcgctgcgcgtagttccagttcttgatctgttgttcgcctgcttgtttggaccctccaccagcaccaagaacgggtttcttttcatactatgtgctgccaggggacgcctggtttccattcacatgtcaagatttggtttctatgtatccccgtttctctggataccgatattcttgatctttccaggctccgttattagatccgtgtgccaagttttgattgctatgtagacatgtagtagtccaagcttgttcgattcgatttcttgaactatctgctcctgaatctcacgccaagcaaagtttctgttccaaacagtccgatctttgtcatttcatttgctccgatttcacacgaatttcatcccgtgcaattgctgatcgaattgccgtcccacttcggcgatggtcaggtgccgcgagggtcgccgggaaacagaaagccgccgccgccgggacacgccgagccctcggtgacattggcaacgtcgtctccgatgccctcgacaggtaagacggtagaaatcgtcgtggccgttatctttctttaatatcgtcatctgaaacttgtctgcgtcgccgttacagggcgatcaagctgccggaggggatccatcgccccatcaccaggagcttcggcgcccagctcatgaaggccgctttggcgaacaaggtaaagaggacgaatcgcgttcagttctgcgatttctcgcatcctaagcgtctgatttggtctttctgatccccccaatggttggttctacagaacgccgacgccgccgtagctcctgctcagcctgtagcggcgcgcgccgttacgaaaccagctaggaaagtgactacgaagaacgtccctc

SEQ ID NO: 2469 - DNA, 578 bp, Zea mays
  misc_feature (568)..(569): n is a, c, g, or t
gtcctggcgctgggcaggctcccaaggagaacaagaagccatcagcagagggtgccgccgccggcagcggccgctctgtgcagaagaacaggaggaagaagcccgcgtgcacgctttcgaccgtcctttctgcgcgttctaaggttcagcactcgttctcctcctgcatcattgctgatcggttcatcagcatcgtataaacctgtgttgctttgttcccgtcgacgtcaggctgcctgtggccttaccgagaagccaaaggagcccatcgaggacattgacaagttcgacggcgacaaccagcttgctttggtggactacgttgaggacatctacacattctacaagaccgcccaggtaactgcgggttcatcttcagcaagccatgttctgaagcaagcctgatcatcaccatacaccatgtttgcgtcttgtgcagcatgagagccgccccattgactacatgggcaaccagcccgagctcagccccagaatgcgctccatcctcgcggactggctcatcgagtctcaccgaagattccagctcatgccggaaacgctctacctnncaatataca

SEQ ID NO: 2470 - DNA, 396 bp, Zea mays
gaagaccagaacatacactgatggccttcggactgtgctgccctataacttgctatacgcacaaatccgttcaaaacaaaggctaagtccaatggtaggtttaagctgagacctaccgcacttgctgattctatctgaactgtcgatgaaacagagtaacaactacaatcatgccgccaatgtacaagatctactgcctaccatgtaccctctgatttgttagttaacgggcctagagcatggagactaaaggtatcctactgatccagccccaatgcaattgtgcactgcagactcattctattttgtctgtctaaggggcaggttaagagccctaactccgaggatccatccactacgtgccccaagcatctgtcatactaacgtcaacgccag

SEQ ID NO: 2471 - DNA, 435 bp, Zea mays
agaagatcacgatgccagcccatctcatgtacgacggtaaggacgacaacctgttcgagcacttcagcgcggtggcgcagaggctgggtgtctacaccgccaaagactacgccgacatcctcgagttcctggtccagaggtggaaagtcgcggagctcaccgggctgtctggagaagggagaagggcgcaggactttgtctgtaccttggcgccgaggatcaggcggctggacgatagagctcaagcgagggcgaagcaagcacctgtcattcctttcagttgggtttacgaccgcaaggtgcagctttaatcaagaacgctaggcaatgtgggcatttactacgtatatcattttcagtcctggggttctctataagaaacagtctctaggttatctagcagggtagaattcaactactcgtggatctcactcg

SEQ ID NO: 2472 - DNA, 922 bp, Zea mays
aggtgttatgccgtctatctgtactaaaatgagtcatcacattgtccttttttgcactatattatattatttatttcacgtttgttattaattattagtaccatggttccctgcctttgcttacttattttgatacttggggcattcatttatcctatctggttaatgtgtccccttctaacacgttggtgtcactgcagatcactgattcaatcatttcccacggatgtttcttggataactgcaggatagaacatagtgttgttggagttcgttctcggataggctccaatgtgcacctcaaggctagatctcttcctttgttgcctggagtatttcattacacagatatagagaaacaagtattagttgtcatagatttggtccaatgttctgtagttagcggctaatgtatcttttcatcttttttccctgcaggatactgtaatgcttggcgctgattattatgaaactgccgtggaaagaggagagctgcttgcagaaggaaaagttcctattgggattggagagaatacaacgattcagtatgaatgcatattttgcttctaccactaactcctttgacatcatcttttactattcaatcctaatatcttcccttttgctctctgcagaaagtgtatcatagacaagaatgcgaggatagggaagaaagtggtaatctccaactctgaagtaagttgatctctacccctttattcaatatatagctgtaccgtgactagcaaactatctgaaatcagtcagatcactttgcaattttcaacaaaataagatgggtacaatgtatgtgtttatcgcaagttgtaggatcttctttctctctgcccgcattgctcttttattttttttctaatgcatacctcttcatagaatgtatcatcaactctaaaccaaatct

SEQ ID NO: 2473 - DNA, 428 bp, Zea mays
cggcgggatgggctgcagcgccgggcttctgtccatcgacctcgccaaggatctgctgcaggtgcaccccaactcttacgccctggtgatcagcatggagaacatcacactgaactggtactttgggaacaaccggtccatgcttgtgtcgaattgcctgttccggatgggtggcgcggccatcctgctctcgaacaggcggtctgacaggcggaggtccaagtatgagctggtgcacacggtgcgcacgcacaagggcgccaacgacaagtgctttggctgcgtgacacaggaggaagatgatattggcaagattggcgtgtcactgtccaaggacctcatggcagtggccggagacgcacttaagaccaacatcaccacgctggggccgttggtgctcccattatcagagcaacttctcttcatgg

SEQ ID NO: 2474 - DNA, 424 bp, Zea mays
gtggtgaaccattacaagctgagggggaatattgtgagctacaacctcggcgggatgggctgcagcgccgggcttctgtccatcgacctcgccaaggatctgctgcaggtgcaccccaactcttacgccctggtgatcagcatggagaacatcacactgaattggtactttgggaacaaccggtccatgcttgtgtcgaattgcctgttccggatgggtggcgcggccatcctgctctcgaacaggcggtctgacaggcggaggtccaagtatgagctggtgcacacggtgcgcacgcacaagggcgccgacgacaagtgctttggctgcgtgacacaggaggaagatgatattggcaagattggcgtgtcactgtccaaggacctcatggcagtggccggagacgcacttaagaccaacatca

SEQ ID NO: 2475 - DNA, 524 bp, Zea mays
  misc_feature (510)..(520): n is a, c, g, or t
tgcgccacatgtaaacgatgacaataatgtagaaaagtgaaagaaaatgaagttgcaggtatagattcatactccactgagtcctgaagagctgccaagtggctctggaggtaatctattcttttctggtcattcaagttattgccaaggtcaacttcagccatccctgtaaacaaaaaaacacaacaaataaatcagcatgtgtgacaaagcttagactcgatgcaactgatttcattttcattatagaccacatgcatgcatgtgtacgttaattactggatccggccggtcttaccgttctcagtgatgtacatgggtgggtttccgtatttctccttcatgatcttaaggagatcctttaggccttgaggatacaggtagatccaattccccatctgcatgcaaatcgaagcaatggatatatattagtcctctttattattgtcaacacaaaatttgcgaacttccctttttacatatgtaaaagtttaaccatgcatgagcacnnnnnnnnnnncagt

SEQ ID NO: 2476 - DNA, 708 bp, Zea mays
cgaaaaaacggcgtttattgatcaacaggccgaagaaaggtcctgggacatcaacctaggatggttcttggagccggttgttcgtggagactatccattctccatgaggtcgttggtaagggaccgactacccttcttcactgacgaggagcgagagaagctagtgggctcatatgacatgctggggttaaactactacacctcaaggttctccaaacacatcgatatcacgcaacacaacacactaaggctcaacactgacgatgcatatgccagtcaggaaagtaagttggcgcgttgaggactaatatatatataacctcttactgctccattgaaaaataatttggcattctctcacatgcttatcgtacattgcgcttttcttcttccgtcccccagcgaaagggcctgacggcgagcccattggtcctccggtacgcaccttactagtacaaatttttgtacaatgtttttatgctgaaactgataatgtgaagtgctcatgcatggttaaacttttacatatgtaaaaagggaagttcgcaaattttgtgttgacaataataaggcggaacaaatctatagtttgttcgtgtagtatgtacatatatattggtaattaattaattagggaaaaatgatatatccattgcttcgatttgcatgcagatggggaattggatctacctgtatcctcaaggccta

SEQ ID NO: 2477 - DNA, 397 bp, Zea mays
cctagaggtggtccgcttaccagtttactatccttctgagcaagaaaaggatgatcctaagctctatgcaaacaatgtacggaaactgatggcagtggaggtatcttaaacacttgaaaatgattaattacattgaatggtattgctgtacaagtgtttggtattattgtaaccatgtggtaatcttgatttcttttcagggaaacttgattctttcagaccttgggctggcggagaagcgagtgtaccatgccgcactgaatggtaatagtctagctcgtgctttacatcagaaagatgattgaaatgccatgctatcgtgcttccataatactggcttgcttgtaactgtgtgcttgcttgtgcatcgtcatggttgagaggaatgtcgtgaata

SEQ ID NO: 2478 - DNA, 345 bp, Zea mays
  misc_feature (243)..(243): n is a, c, g, or t
ttgcgctagcgtgcttgatctggtcaaacgttccctcgagctcgatatttttatggttgggatcagcctcattgtcccggatggctaacttagccccagtcactcgggatatatgctttgtgttgataccactcttcccaatgatggcgccagcaagggatgcatcgacactgatcttggctgtggccgaagcaccgaatgtggagtgaggaaccatatctgggataggcattggaggtggcntgaagtgaccgtttggccctggacccattggaggagctcccatcgagttgtccatctgcaggggctttccaagctccctctctccatgagcaaagtggcatt

SEQ ID NO: 2479 - DNA, 412 bp, Zea mays
gtgtcgatgcatcccttgctggcgccatcattgggaagagtggtatcaacacaaagcatatatcccgagtgactggggctaagttagccatccgggacaatgaggctgatcccaaccataaaaatatcgagctcgagggaacgtttgaccagatcaagcacgctagcgcaatggtcacagagttgattgtccgcatcagtggtaaggtgcctccacaagcaaagaacaacccaggcagggggcctggttctcatgctgggggtcctgcaagcaacttcaagaccaagttgtgcgagaacttcaacaaaggctcctgcacctttggagacaggtgccactttgcccatggcgaaagtgagttgcgcaaacctgctgctgcttgatagatgtgtttagtgtggcttgcggtgat

SEQ ID NO: 2480 - DNA, 413 bp, Zea mays
  misc_feature (367)..(369): n is a, c, g, or t
  misc_feature (380)..(381): n is a, c, g, or t
  misc_feature (397)..(399): n is a, c, g, or t
  misc_feature (401)..(407): n is a, c, g, or t
tccaatgattgtgatgttggccttttcaaataccagtacataatgcttgctgtcagagttagcatcatcttctggttcacctgagagaaataaaacatataaaatacagcagatcgtgactagatcacaaggggaataaggatattttaaaactgaattccgaatagcaccttcagttgcaactggatttgggataacactacatggaaattttggtacgacactaaccggcctgagtttactttaaggtccagtgaatgcaaatggatcttttagggctagtttgggagccacaaaatcggaagggattggagaggttaaaatccactccttatttaaaaaattgaataaagagtggatttttaannnctccaatcccnnccgattttgtggctcnnnannnnnnnctaaaa

SEQ ID NO: 2481 - DNA, 593 bp, Zea mays
  misc_feature (531)..(531): n is a, c, g, or t
  misc_feature (557)..(586): n is a, c, g, or t
tcagtgagatagtcaatgcagaagccgcataacaaagaaaggctgcagaaaacaaggagacatacattacacaatgcatgtcaaaatccaacaggtttgttctggtgactcaacatgagaatgcatcagtcaatagttttaataaatagactatgaattaggtaaactatatgaaaaaacgtgaacaattttatcttcaaaacatgttctttttaggatttacaaacatataggaaaagaaatttttgatcgagatagtagggcataccaggttgtgttgccaactgccagatctgtgtcactgagcttggtgtctcttcttcaggtgcatggaggatgattatggttgacccgattatacagagcacacagcccaacacacccatccgctgcagcttctcattcagggtgaaatgggctagaacagcactgctccatagaccatagagatcatatacaggagcatgtacatgtttttttaaagaaaaggaaagaaaatacacaaaatatttaaccatatccactctccanatgaccacatgatatataacagattnnnnnnnnnnnnnnnnnnnnnnnnnnnnnnctacctg

SEQ ID NO: 2482 - DNA, 470 bp, Zea mays
  misc_feature (444)..(448): n is a, c, g, or t
  misc_feature (462)..(466): n is a, c, g, or t
aagagacaccaagctcagtgacacagatctggcagttggcaacacaacctggtatgccctactatctcgatcaaaaatttcttttcctatatgtttgtaaatcctaaaaagaacatgttttgaagataaaattgttcacgttttttcatatagtttacctaattcatagtctatttattaaaactattgactgatgcattctcatgttgagtcaccagaacaaacctgttggattttgacatgcattgtgtaatgtatgtctccttgttttctgcagcctttctttgttatgcggcttctgcattgactatctcactgatcttgatatttcactgtgcaccccgttatggccagacaaacatcgtggtgtatgtgggaatttgctcagtgataggatctttgacggtaaatgatgtccatgggcatacctttgagaccaacttnnnnntggtttttatgtgnnnnnttgc

SEQ ID NO: 2483 - DNA, 737 bp, Zea mays
agctgttttgacatcggtgcttacattgattgatgaatatgatttatatggtcaagtggcatacccaaagcttcacaagcactctgaagttcctgatatttatcgtttagcagcaagaacaaaggtataatgtttttagccaaaaaatggtggtgccgtatcccccctgaatgccaagaactgaagcacttatctctaatacctttctactttgattttcttccaacaagcattcatggtgtatctaagtgaaatacagtagccattttcttattttaagcattcaccggtacaacttttcttgtcatatgtatgccagggcgcttttgtaaatgttgcttattttgaacaatttggtgtcaccttgatagaggtcagaactattgagatcatgaattcatttatgtatctcaccattttcatgcccttactacctatctgttctttttgtgagcaggctgccatgcacgggttgcctgttattgcaacaaaaaatggggctcctgttgaaatttatcaggttcatgaatcacattgtaccattttatgaattaatagagtattgacttacgtatgtaatagattggatcctttctggtggatgttgatgcaggttctggaaaatggtctccttgttgatccccatgatcagcatgcaattgcagatgccctctataagatgctttctgaaaagcagttttggtcaagatgtcgagaaaatggattgaaaaatatac

SEQ ID NO: 2484 - DNA, 558 bp, Zea mays
tcagaagagttctgctgcaatggtacagtggtccaggacccagaacttggacaggtatggtactccggatgaactcgtgtcccctaggccatcgactttagcctttctgaattatcttgatggattcggttctgcatgctgcccgctataggtcattcagctccagggtgatcagaggaagaacgtctcgaatttcctcgtccaggtacgcaccattcggtgcaacaccttgtgcgcttagagacatgtagcaacgtatgtataaagacaacgctgattctgttcctgatgttgtcctggcaggccggcattgtgaagaaggagcacatcaagattcatggtttctgagcaaccgccgggtccatagcaaaccaaccctgcatgcagggccagcttattatatataatatctgaggtggagcatatctatctggctgtgtactacaagcaggcctagtacgccgcctgcgcgttcctcctattacacataacacatatagccccctccctgcgtgtatgcttgttgccgtcgtgtcgaatcttgtactacgaggctcc

SEQ ID NO: 2485 - DNA, 617 bp, Zea mays
atcgaaaacatcgatgccatggacgacacggtagagcccaggaagagtgaacgcgatgtgggactcgtactgccccacggtgtccttgctgcagaaacaacacagaaaacatcacatactagttttatttactactaaagcacagcgatactaatatacaaattctaccttcccgcgatttcttggaatgtgctggtgatgatgaaatcggtgtggttcatggcaataaggtcagctgtgaactggcaagagaagtggtactggctgtcgaatttgtccaagtagatgtccgagttggggtatttggttttctccaaggcatgagcgatggtacactgcaagtatgtacaaaaccattaatcatttgaaataacttaataattttaaagaaacgcaattaataattttaaagatacccaattactcatgtaaaaccaaacagacctgagtgactcccaacttgtgcgcgagcagagtggcgactaggttgccatcgctgtagttgccaatgataaggtcaggcttggcctgcatttctttcattatttcactggaaacatcctgcagcacagaatgtatggcttcagtattactcaaacatgctatgctgtgtatag

SEQ ID NO: 2486 - DNA, 444 bp, Zea mays
taggtagacggagactttggggcgagtaccgtctcctcctcctggttcctgctcccattcctatggtagcgtcctctcagctctgcgagcggcggcggctagaacttcttgttgtaccagaagacgcccttgcggttgcggttctcaggctcgacgtagatgcactccctggcctcgcgccaggtggccttggcgacaggggtcgggtcgaactggtagtactcgccgaggacgggcctgatcgccctggtggcctccacggcgtggtagtgcggcatggtggagaagaggtggtgcgcgacgtgcgtgtccgtgatgtggtggaacacgcggttgaggacgccgtagtctcggtcgacggtggcgagcgcgccgcgcagccagtcccactcgcccgagtcgtagtggggcagcgccgggtgggtgtgctgcaggtacgtgatg

SEQ ID NO: 2487 - DNA, 397 bp, Zea mays
ccgcactaccacgccgtggaggccaccagggcgatcaggcccgtcctcggcgagtactaccagttcgacccgacccctgtcgccaaggccacctggcgcgaggccagggagtgcatctacgtcgagcctgagaaccgcaaccgcaagggcgtcttctggtacaacagcaagttctagccgccgcttgctttttccctaggaatgggaggagaaatcaggatgagaagatggtaatgtctgcatctacctgtctaatggttagtcaccagtctttagacaggaagagagcatttgggcttcagaaaaggaggcttactgcactactgcagtgccatcgctagatttaaggcaaattcagtgtgtctgtgcccatggctgtgagctttgggtactctca

SEQ ID NO: 2488 - DNA, 424 bp, Zea mays
  misc_feature (419)..(420): n is a, c, g, or t
ggactgtagttgctattgacggtggcctatacgagcactacaagaagttcagtgcctgcctagaggcgacgctcacagacctgctcggcgaggaggttgcctcatcggttgttgtcaagttggccaacgacggctcaggaattggagctgcacttcttgctgcctcgcactcccagtatgctgaagctgcatagttctaggagctcgggggtcctagtgtaacctttttttttgtttcccaccatttcccccttcaatcgagaagcccccctcgtgcgattcgcatctctctattttcttccctcagcagcgggatatagctaggatggtgccattgagcttggagtacattatcactagcaacaagcattagcagcggcaggaaagaagtggaagcggaggcctgaataagccgttcnnttcc

SEQ ID NO: 2489 - DNA, 398 bp, Zea mays
gctgctggtatatatggtattctgaagaagctgggtaaagacaaattgctaggtgactttagccaacaaaggactgtagttgctattgacggtggcctatacgagcactacaagaagttcagtgcctgcctagaggcgacgctcacagacctgctcggcgaggaggttgcctcatcggttgttgtcaagttggccaacgacggctcaggaattggagctgcacttcttgctgcctcgcactcccagtatgctgaagctgcatagttctaggagctcgggggtcctagtgtaaccttttttttgtttcccaccatttcccccttcaatcgagaagcccccctcgtgcgattcgcatctctctattttcttccctcagcagcgggatatagctaggatgg

SEQ ID NO: 2490 - DNA, 384 bp, Zea mays
ttgcttgttggcagattccgagcaaacttgttcttgaaaacgtacaggaattcaccacgagttgcacaccgacacacgcggccgttgggcgttcagtactgcgagtgggcagctgcaatgagggcggctccgaggccagacccgtccttggtgagcttgacctccaccagcctggacgcctcctccccgagcagctccaccagcgtggcctccaggcgcttcctgaactcggcgtagtgctcgaacaggccgccgtcgatggcgacgaccgaccggcgctcgtcgcctggcgccgctcgaccgatcttcctgagaatcccgacgatccccgccgcggccagccgggcagacctcccggtgacgatgtcacagatgtcgaccacc

SEQ ID NO: 2491 - DNA, 904 bp, Zea mays
  misc_feature (890)..(896): n is a, c, g, or t
cccggcgaggtactctgacgcatgcgcgagcgcttctcttcttctcttttcgctgtgcttttagtctgttcgtttgatgcccagatctactaggtttgtgtgatgagccgagccgatttatgcactggatttttagtcaagtgttgtttccgcctccgctatctttagtgtctatgtctgaatttgggttcagtgattatcgagctataaattatagttgttgcgctgttctatactagatccagttaccgatctatgatattacggggttgagcgattcatgtgctggagtactagtccaagatttgcttccgtctcctcatctacctttagtatgtactctgtatataaacttaattgcagtttgcaactgattctcggccatatattacttccgttgcgttgttcattagatccatttccgatccctgatattacgtgggtggggggtacttcgactttgtttttttcggattgtttgattactggtctattcccatacatatttgtttctcattgattttatataattttgatgtaagcagcagtgtaacattttccttcagccatgggcaaggagaagactcacatcaacattgtggtcattggacatgtcgactctggcaagtcgaccaccactggccacctgatctacaagctcggcggtattgacaagcgtgtgattgagaggttcgagaaagaggccgcggagatgaacaagcggtcattcaagtatgcctgggtgcttgacaagctcaaggccgagcgtgagagaggtatcacaattgatattgctttgtggaagttcgagaccaccaagtactactgcactgtcattgatgcccctggacaccgtgacttcatcaagaatatgattactggcacttccnnnnnnngactgcgc

SEQ ID NO: 2492 - DNA, 919 bp, Zea mays
acccgtgagactgtcaatgtcttgcaagactgctatcctgagaggttggggcttgcaatcctttacaaccctcctaggatatttgaatcattctggaaggtgaccactaccgactttattctgttcactctaaaaccagcatttcttctgtttcctgccattcgcacaggtgcaccacagcaccagtatgagagtgattgctacgagagcctaccatgatgttgcaataaataggtccatactaatggcctaatgggatccagtcaactttttattgtgcttccattcttcacttagatttgtttgttaaataattaaatttggtaataccattcttaatgaatttgaactactaaattcaaatgcaatgatcttcatctgtgttccatgatgttttgtgcactctactgttacctagaccgggatccaaatcatggaaattgatctatatgaaacataaaagatgttcactgaaaatgcactgtatggattcattttgtggattaggcagcaatatccaatccttttgtccctcggcattaattataccatctcgcactgctttcatcctttttctactaacctaagttattccattgattgaaacaccaaccagtctaaccataattacaactgacagatagtgaagccgttcctagaccatgagacccgcaagaaggtgaagtttgtgtactccaacgacaaggagagccagaagataatggcagaagtctttgacatagaggagctcgactcggcattcgggggaaagaacccagcgacatttgagtacaacagctacgcagagcagatgcaggacgacgacaagaagatgggatcttcgcacggctcagccaatagcttgcttggatcagctgggaaggaggctaatggcgcagactcggacgcctcaagcgag

SEQ ID NO: 2493 - DNA, 974 bp, Zea mays
ctgagcacattctatatctagcaattattccagtcctacttcaaacttccaataaaagagtttgcatagacgtgataataaatgtcaaatggtcataatgagtttgcattggctagtgtcctgcataaatagcttacaaaaattcaacaaatctcatattaacttctaatgaatagaagataatgatgttacactaaagatgtgttgcagcgttcctgaggtcatatttcattttcagactttctagctgactggttgcaacagggctgccaaagctaacatgatgaaacgtattgccaaacacaaggatgtgcagagcgtttccgtctgatgaccatcagatgccagtattgacttaagcctagttgtataaaactacagctagagaagcacactatacacgtacttctgctgcttaagtagaaaatttctagatttgtctttaactcttaaaactctatgttgtctcaacgtagcaaacctaggagaaggattgtaatagtcttgataagctaacgttaaacctaaccattctaacaaagataaaacataaaaggttaagtttcaattctagcctacccaaacttatctgggactaaatgactttatttattgtttgttgttgctgtcttcactcttaagaaacaaaacaggattaaagtattgaacccaccttggttcttgtactgtggtcgaaatggagcagaaaggctattccagtcctcggccctctccctttgcccggggttattgccaccagcaagttcatgtttccttgcgccagcagggtggaaaggaccataaacaatgccactttgtttaccctgtccaagccgattccgtacatctaatttgcaatttatcaagacatcgccaccactctttgccagttttgctttcttctgaacttttgaatctagattacttctatgcatgtcgatgttagtgagttcagttccaaatgctcttttgtt

SEQ ID NO: 2494 - DNA, 534 bp, Zea mays
ctacaccgaaattcggctggaagaagtgcccgagatgggctatgatccactcggcgttccttcgcgtggtgaaatctgcatccggggaaaatccctcttcgctgggtactacaaaagtccagaactcacaaacgaagccatcgttgatgggtggtttcatacaggtgaatactcgatttaatgagggtttgttttttttaaaaaaaagtaggcaaggttccattccacaatacaatgctcaaacacacttattttcaggtgacattggagagatgaccccagacgggatcttgaaggtgattgacagaaaaaagaacatatttaagctgtcgcaaggggagtatgttgcggttgagtacctggagaaagtttatggcttccctccactcgttgaagatgtaagtaaactaattcagcggctatagtatatatggctgaattaagagggaatattggccagcatttaacattgtcatttttttttctagatctgggtatacggggacagtttcagatcaagtttagttgcagtag

SEQ ID NO: 2495 - DNA, 386 bp, Zea mays
cttgctgacggacgttggcgcgacagacacggcgtgtgcgaacaactggagctgcttccggttcgccgtttggtacgcctcggctgcctgtaggggaatccatactctcattgttgacattttcccccccttggaatcctgcttgcccccaagcaggagcaaaaggataacattgcctcaggttgtcttggtcttcccatgtggctaactcagtaggaaggttggaccactgcaccagaacctgtttcacaaagcgtttacctttagcaaagccacgagtctgcaaaatacggagtggtatgctgaactctggcagttcatccggtaaggaagaagtagcagagcccgagaaaccttttgccagcttcagttgggagacatgaacg

SEQ ID NO: 2496 - DNA, 364 bp, Zea mays
aaaggagctacagctcgtcggcataagtgccatgctgatagcaagcaagtacgaagagatatgggctccactggtaggctggctgattttgtttctaaaacatgctatagtccattcttcgattagcttacacaacaagcagcgatattttacaggttaaggacttgatgtgcctctgtgacaacgcatttaccagagaccaggttctgaccaaggaaaaggccatcctggacaggctccattggaacctgacggttccaacaatgtacatgttcattgttaggtacctgaaagccgcaatgtgtgacacagaggtatagttgtccaagtaatgttgttttagcaccacaccacacatttagat

SEQ ID NO: 2497 - DNA, 393 bp, Zea mays
cagtcataaaccactcaacgtcggcaacaagaagccacttattcctcaggcagcagcaagaggcctgcgaccccttgccgacgttacgaatcttatgatcaatgaccgtgctgctcctgcaaatcgtcagaagcctctagatgttgtgtttaacaggaacgggaaggcagtaaagctgaaggaatgcaaggtgaagcctgaagtcattgtgaccattccagattccgagaaggagaagaaaggcaaattccctggtcagagagtctgtaggagggtgccaacactttttgacaatttgacaaaatgcagcagggtatgaacacaagcaaaattctaaggttaaggttgtctctttctttttgattctaagaatgcccgtgtaccccttttgtg

SEQ ID NO: 2498 - DNA, 637 bp, Zea mays
ctatactactatatacacatcacaaaaaaaatgcaggaaaacgtttcacaaagctggtggctagtatcaaaaaaagaacttctaaacaatcagaggacgcgagtgaaagatatggaagatggctagggctgcttcttgatccgtctcgaggtggttttggccagagcattgcatatctccctctttctcttggcgttttcgtccatcttcccagaggcaacgttggcctgtcgttccagcgcttccctcacaaagaatttcagcctccatagagttgtctcgctctgcatcagggagcatagttaaaacggacagggaaaaaaaagtcaaaatggtaggacggaaattctcaagttaaacgcgcagggtggtggtattctttccttaattctaagccatgatgcagtataaccagttaaggctatggtcattgaaacaaacaaaaaagaaagaaagaaagaaagaaagaaagggtgaacacaagggaacacataaaccattacctgggcatccatatcaagatccacttcttctgctttagtctggaagctaggattgtcttgtgcgacaatctctagcgccttgctaagatcatctggagacaagtgacagatacctgcacccagcttcctcttct

SEQ ID NO: 2499 - DNA, 440 bp, Zea mays
  misc_feature (11)..(12): n is a, c, g, or t
cttctcgatgnncttgacgacgtccatgccctcgacgacctggccgaagacgacgtgcttgccgtcgagccaaggggtcgcgacggtgcagatgaagaactgggagccgttggtgttgggcccggcgttggccatggagagcacaccgggggcggtgtgcttgcgcacgaacttctcgtcggggaacttctcgccgtagatggactcgccgccggtgccgttgccgcgggtgaagtcgccgccctggcacatgaactcggggatgacgcggtggaaggtggagcccttgtagtggagcggcttcccggacttgcccacgcccttctcgcccgtgcacagcgcgcggaagttctccgcggtcttgggcacctcgttggcgtacagctccatcacgatccggcccgccggggcgccgccgacggtcatgtcgaagaagacgc

SEQ ID NO: 2500 - DNA, 1155 bp, Zea mays
ttttgaggaactagcctcgtaatgcaaccaacctgcttgaggaaacttcagttctctaataaatcttggagagaggaagatgttcaaacaagtacaaggttgtgaggatagaaagcatactaatggttgagaagcttgtgtggaagcaagcttcaactgcttcctaagagctgctttgtttgctgactttccatatagatcattagcactgtattgaaccttgagaaacctatccgtagacggattccaagtatctgtgtcaatgccattaagtattccaacaaatttcttggagtgcactttgagtgtatcttggagcccacgcccaccctgagcaacagagtaaattcgtcagaaacaaagcgaggagacacttcatttcacaaaggggtaaaactcaatgagattaacaatgatgacaaagcttaagacagaagacatggttctaaaatatattaatctcaaatcaaaacaccagaaccatttcaggccttatgtaagatagtgtatctgaattaggaaagtttcaagcattcaacctcttgatccaactccttacgatgcaaaaataaaacaccgacggatagtttcgggtcagttcattttatcccatttgtccagattaatttaatgaaaatgagtttcagataagcaaaatttgtatccatagcagcttctgtgtaatgatctacaatatttttttatcatgaagaaatatcaagaagaaaacaatggaatgttgcacaattggataaatactagatcttttggggaatatttattgcattgtctctttagttttcttttagatgtctttacagtttttagtaagagaaggaaaatatgggtgcgaaaatgtttctattatagaacatacaagagaaaaggccagaattttttttcttcaaaacagaagaccaaaagtcaatacattagttgcaaagttgcatccaatggagccacattggacgtagaggtcataatattacctctgagcgaacctcttgtgcatatgttggtgatacagttgtcacaatgttggaatacacaactgcaccctgaacaataagtgcataaaagtgttagtgctaccataagactgaagtctagtcccaactctcctgttacaaattttccataggtaaataccttaac

SEQ ID NO: 2501 - DNA, 529 bp, Zea mays
aatccacggtaaagcccagcaataccatcagacttgagtgtcttgcggtagacatcgacaagcccattgaactgcctttcacctcctcccttggcagccttcgcgtcattagccaaccttgttctcgcgtagtccagggagtacacaaaaaacaaagaggaagcaccagcagcaccaccagaggccaggttgccagcaaaccacttccaatagccatccctatccttcttgaagttgaacaacctcttgaagtagtccttaaatgcaaagttcaaagcctgggacaaagatttgaagacaaattaataatgtacaagttaaagtgtagtcggtaacttgtataccttgcaaagccaccaggaacattcaaccacttaggtaagaaagatcacggtgtttcaacatatttacagatgttaccgagtaaaaaatatgatggaaggtgtgggctacctgagtagggaagtaacgaataacattagcagtgttacccctccacaaggaagagaaaccttcatccttaatggta

SEQ ID NO: 2502 - DNA, 414 bp, Zea mays
tgaagtccattgatatagaatgccatgcatgcgggggaacaggtagaggcgcgagcagcccgggatagctggtcctgtccggtttggcctgttggcagatattgcatgtctggacataggcatggatatctttcttcatccctttccaataaaatagctgtttaatccttctgtaggttaccagaaatccagaatgacctccgagagcagaatcatgaagagctgctataattttgagttgtaacgttgtattgttgcctagccacacacgccccttatgtcggatgacaccctggactagagtaaacggagagttgtcgttgttggatgatatagtcagttgtgttaataattcttgggcctgagaatcatgctggtatccctgtaccacctcatcaatccaggtaggtgtac

SEQ ID NO: 2503 - DNA, 452 bp, Zea mays
ctagctcagcaccaactatctcaccaataccagtacttactaccagtgtagtttcattgtaacaagaccttgcggtttgctagaagaaacgatgtcctccaacaatcagaatactatgtgcgttccgcatcagatcttcctcacctgaatgttgtgtgttgattgtgatctccagatgggatgtttaccactttgaacaagtgcaacctccttaccgtccttaaccataccatgtttctgtgaaatgcgacatcatgttaggatatccgtcatggacccatggtgaaacaaatggtaaaaaaaaatacatgatacaggaccccaatattgctttattgtaaatccatagtctcattctgctactaatagctgcagtgttctggtcagattgccaagataaagatgtgatatgaccgcatcagatactccagcccccccccccccaaaaaaaa

SEQ ID NO: 2504 - DNA, 452 bp, Zea mays
  misc_feature (297)..(299): n is a, c, g, or t
  misc_feature (441)..(444): n is a, c, g, or t
ctcacaccagttcggaccaccaccgccccccatgggaggaggtgcttcgacccatttcataaaatgcagaaaatagaggacccccatggagtgtgggatcaccaccaccccatttccaccatttgttgctaccatgagttcaatattgctctttattctgctcaaagtttgatcacgaacctgtatatagtaatctgcgttacaaatatggcaatacattttataccagaaccatttacacggtgggaactgggaactatcactaagcatcaaaagttcataaccaaatagctaatnnntggtgacttctgactaaaatttacttgtataaggccatccaagaagagtacctcagtgttctggaaagataacctccaatcatatgcagccatgtacatggtcttttcttcatatccaatacgagctaaattggcaattaannnngcccaaaa

SEQ ID NO: 2505 - DNA, 419 bp, Zea mays
gcgtggcaaaactcgtttcaaccctgccggcagcaagacttacgtgagagagtacagccattcaccaccctcaactctcctggaaggcaggggcactcagagcggtgcacatgttgatataatggggaacttcgctttgatcgaggacatcatcaggatagctgccggggcaaccggtgaggaaattggtggcgaccaggtttattcagatatattcaaatggtcagagaaaatcaaattgaaattgtaacccatgggaagttaaaagaagtgccccaacccgttcattgcgttcctaaatgcttgcctgagcgcaactctggattttgcttaaatatcgtaatttttttcacgcctcattcgtccctctagtaaatttacattgacaggaccccggtgcgacgcggatgttgtaccgt

SEQ ID NO: 2506 - DNA, 452 bp, Zea mays
agagtgctatataccattccggattgacgcctcggctgatggcggggaggaaaacaaatgcttgaaagggggtgtttacttagctgacggtgacgaaactgttccagttcttagcgcgggctacatgtgtgcaaaagggtggcgtggcaaaactcgtttcaaccctgccggcagcaagacttacgtgagagagtacagccattcaccaccctcaactctcctggaaggcaggggcactcagagcggtgcacatgttgatataatggggaacttcgctttgatcgaggacatcatcaggatagctgccggggcaaccggtgaggaaattggtggcgaccaggtttattcagatatattcaaatggtcagagaaaatcaaattgaaattgtaacccatgggaagttaaaagaagtgccccaacccgttcattgcgttcctaaatgcttgcctga

SEQ ID NO: 2507 - DNA, 1209 bp, Zea mays
tgatcagggaactcaagctcaagttgcaggtaagatggcttaacatctcaatgtacctttggaaacttatgggtcactggattgttgtatgtttcttgatgcattcctccttccacatccttcatatgttggttgaaaattgctgtacttcaggtttgattaacttttcttatgtcgttttaattcttttctcaccaaatttcttaggtcgttatgtcatttcatgaatgtggtggcaatgttggagacaatatatccattcccctcccacattgggtaatagagattggaaggagcaatccagatatctactttactgacagggcaggaagacgtaatacagagtgcttatcatggggagttgataaagaaagggttttgcaaggcagaacagcagtggaggtacagtcatttatttatttattttctcttgaacacatgagaactgtgtattattttaaataagatagggtaaataatcccgattacacccacccacacccataggttcacaaaattaagtacgcctttttcttacatgacctagaatgacctagtcactaggaacattgcctgatagggggatctcttgcgctccagccattgcccaaagctgagcctcctcagcaagtagcaagccagcttaaccatattggcagcaaagtcgccgaagacacattgattcctatgtttccgaagtgtccaagcgcctatgataattaggaaatttatgcctcactgcaattgtccatcgaccatatcattggctctgttccaccagtcctagaaagaagcatcattcagcataggtgctagagtttgcagccaaagcgatacaggagccatttcacattttcaccacatccacacagcttatcatcttattgatttccacttttgtccttgagcaagttctgttactactgctttggacaataactggaacctgagaggctgagggtggctttacatgaaacagatatgttatgtataccttgtcatgtccagtactttgatgtgtgtgtatgacgagactattttgttatgctacaacaatgcatgttctctatgttcaaacatttttattcatctttgttggaggttggaaggtcaattgtgtttaattgtttcattcctatatatcaatgtaggtatattttgatatcatgagaagcttccgagtagaattcgatgagtatttgaggatgg

SEQ ID NO: 2508 - DNA, 261 bp, Zea mays
  misc_feature (254)..(257): n is a, c, g, or t
aggtaaaaagctccggacgccgccacctcacttgctggcagcagccttaccggcggcggtcggggcgggggcatcatccttgtgcttggccgccgcgccgtcgtcaccggtgccttccttggcgaaggcggagacggggtaggtcctgccgagcccggtgggcgtcttgaaggtgatcttggaggggtcgtccctgtcgacgaacatgtcggagagggtgacccagatgaggagctccttggtcttgaccccgnnnntgcg

SEQ ID NO: 2509 - DNA, 386 bp, Zea mays
acgaattgaccgacaagatacataaagaggtaaaaccttgcatgggtgcgtgtgccacaaatacagaaactacccggccagcgacatatactatctttcccgccccgccccctatagtctaagcagattccatgaacaaagggcatctatatctatctgcacttgctgtatctatcaagctaccatactcatgaagcagaagtattaaaaaaaacacttctggtagcgacgactttgagcaccatgaaaagcactgttccctgtataaaaaaacagcactgtgtgtgggaaaagaactgggtctgcataactataaccatcaggaccctgccacaccatttccgttttcagtggatggggcgtttgaagtagcatcatccgtgtca

SEQ ID NO: 2510 - DNA, 1055 bp, Zea mays
  misc_feature (998)..(1003): n is a, c, g, or t
tgctgcgatcggggtgcgcgctctcacgggtgatgctcttcgtcttcgggttctactggatccgcgagacccgcagaaggtccactaatgctaaggttagttccggtgtcatgcctgtactgaataatgccagcgttttgcttcagaagtactgtatttggtcctagagcaccaaggttgatgttttgtaggaagtggagtgatagcgacactaagttcagtgttactcactacgtatgtataatataatataatggtttgttttgcttgttcagatagattgaagttaagtttgattgatgttatgtggcttgtattagtcacgaatctaaaatctggatggtacatatattctcacttttggacaatgtatagggataccctgtgtgcccctgccctttcaacttccagaaaaatatcttagcgctcaattcagtttgcgatatctagcaatagagacgtttggtcccttacaacactcaacggatttggattgtacttcagtaatggcagtgatttattttgcacataatgcatcatattactttcaaagattactgtggttctgcccatgcgactgaactataaattttgtatcctggtttccttgtcatctcggtttacattttatcagggtttaaatcaggaccaatttgaagaatcccaaaggccaggggcaattgtatctaatcatgtctcttatgtggatattctttatcacatgtcagcatcctttccaagttttgttgctaaggtacttatttgttgttcctaataacttgttcacactttacaaatcaatatattctagttttgtatgtgccctatcaatgcttaaacacatcctttttacaggagtcagtgtccaggttgccacttattggtctcataaggtacctttttcttgctcattagtattttcctaattttcggtagtgtcttattcatatatgtattctgctagaagatgaacaactagtttcatttgtatcttcctnnnnnnaaatgtacaatatattgaaaccaactttacttttcttttctggtgtaatgca

SEQ ID NO: 2511 - DNA, 393 bp, Zea mays
gcggtggcggctgccgtgggcaaggatgccggcaagcttccctcagctgcagacgagcacgtcctcgtcaacattgccaagctcaaccccgccctcccggagaggacctccgggacgatgatgcacccagtcacccagatggcggccgttcctgccaggagctgcgctgctgaagcaaccgcgccggcgatgctgcccaacagggacgtggtcgacgtcttcgtcagccgacacagccccgctgtccacgtggtctagcctctccatcatcgcaagcaagcatgaatcgagtcgagtccgaacgcataattaagcacccaatctattggatatataaatacgcgcgccccaacatgtgcgccatatagcagtttgttccaacccttagctttg

SEQ ID NO: 2512 - DNA, 1021 bp, Zea mays
  misc_feature (447)..(454): n is a, c, g, or t
  misc_feature (468)..(470): n is a, c, g, or t
tatgcacacatttaaatagtttcactctgtcggtgccactgttttggctgtgcttgctcaagaagtaccttgtatatttttggtcaactatgtatttgacagaagattccttttaattgctgcaggtcccggatatatccttgatgttgctccagagaagattgaaaaaatgttcttcgatccatgtaagtgtttcttactttttctcttgaaaactgttaaaagagactgcaatgggtatcattttactatggttgcatcaatttgcacttccaactcatatcatgctttcttttctatgttatataagcttgtttactgctgaagtaggcattcatcataaccaaatcaatgaacattggatgacgggaaacatcataacttcctttgaactaacttcttctgtatgtattacaatttagtggattttggcattcctcgctgcannnnnnnngatctgaaaggagnnnatccagcgtttaatgcaaaagttctccaggatgttcttgctggtcaaaggggggcgattgcagatgcccttgtaagttagccctagctacctctttctggtttctgcgcattgtatatttcttgcatatatcctgatgaattcacaatgttctgtacccaagatcttgttaatcagctgtgctaactaaaattcagtgtattgattaccattatttcggtacaaaactgttttcatgaattacttgcttaaaataggaaaactgattaaaaattgtagaaatggactgcacttgtaatgatcaattgccatttagtacctataagctttaggctaattcctaattattacacaggttctaaatgctgcggcgtccctacttgtcagtggtaaagtgaaaaatttacatgacggtgttgctttagcacaggagacacagcggtccgggaaagccattaatacacttgagtcttggataaaaaaatcaaatgtaagcacataatagcttctaatggggtcttctatgtttcatgagctaaacattgaacatga

SEQ ID NO: 2513 - DNA, 301 bp, Zea mays
  misc_feature (97)..(106): n is a, c, g, or t
  misc_feature (144)..(147): n is a, c, g, or t
  misc_feature (169)..(169): n is a, c, g, or t
  misc_feature (293)..(296): n is a, c, g, or t
tggagaagaatgcaaaggttaactcgtgctaccagttatcctaaaccctacgccataagctacctatatatatatcattgtttttttttctcggttnnnnnnnnnngcaccgtcgtcactcgtctcgtctgagcctctctgctnnnngtcgaatctttatcgctggctncgtcacgccggaagagggcaaaagactcgagccgccgacttcacacggccacgtcgggaacgaagctcagagcagcgcgacggcggcgagggcggcgacggctaggaggagctgtgacgcacgnnnngcggc

SEQ ID NO: 2514 - DNA, 302 bp, Zea mays
  misc_feature (72)..(74): n is a, c, g, or t
  misc_feature (76)..(77): n is a, c, g, or t
  misc_feature (80)..(80): n is a, c, g, or t
  misc_feature (88)..(88): n is a, c, g, or t
  misc_feature (97)..(106): n is a, c, g, or t
  misc_feature (144)..(147): n is a, c, g, or t
  misc_feature (169)..(169): n is a, c, g, or t
  misc_feature (294)..(297): n is a, c, g, or t
tggagaagaatgcaaaggttaactcgtgctaccagttatcctaaaccctacgccataagctacctatatatnnntnnttntttttttntctcggttnnnnnnnnnngcaccgtcgtcactcgtctcgtctgagcctctctgctnnnngtcgaatctttatcgctggctncgtcacgccggaagagggcaaaagactcgagccgccgacttcacacacgccacgtcgggaacgaagctcagagcagcgcgacggcggcgagggcggcgacggctaggaggagctgtgacgcacgnnnngcggc

SEQ ID NO: 2515 - DNA, 666 bp, Zea mays
tattcttcttctatgaattgttcccaaccattgtttcgtcagagtctcatgatgccctaccatttgttggaacaattattcgagcgatgcaggtatgcattttttcaattttcctacgactgtctacatttccaagtttcttctaagacagatttttgcaggttatatatgttgacagattctcaccagcttctcggaaggctgctgtaaatgaaataaaggtaaaaaccgttcctcttaatatgtgttgtgatcacttggttgcctttaaaaatgttgcattgtattttgtcacatgttagccaccccgttgatttatgtaagttttaagttattgaatatcactgctctacattgacttaatatatggaaaaaagtaacaaacagaaggatatctacaagctacttcttgcagttgcctgctttacagatccttttaatttcgtttgcagctgacatcataattgattctaaaatcgactccagccaacttgtcctagaataacatgattgtcttttagttatttgttcatatggtacatactctctaggatgtcctttcagagaaaggcagcttgcaatagcttcccgcgggtcctgttattccctgaaggtaccacaacaaatgggagattcctgatttcgttccaacatggtgcattcata

SEQ ID NO: 2516 - DNA, 512 bp, Zea mays
gatgcaaaagttatccaggctgggttgtttaacacaacttccacaggtgagtttgagtgatctaattcctatttatttaatttttgtctactacacgactggaactcgcatgacattttcacgttcatttcccactacagcacaggacagacgagcattgctgcaggagatccttaggagggggacaagctcgctgggaacagatatccccagtgagcgcgagataaatcgtttggctgcacgaactgatgaagaattctggttgtttgagaagatggatgaagaaaggaggcttagagaaaactacaaatctagacttatggatgggaatgaggttccagattgggtattcgccaacaatgatttacccaagagaaccgtggcagatgagttccagaatataatggtcggtgcgaagcgacgtagaaaggaggttgtctattcagactctttcggtgatcagtggatgaaatccgatgagggatttgaagacattccaaaggcgactcaga

SEQ ID NO: 2517 - DNA, 233 bp, Zea mays
  misc_feature (229)..(229): n is a, c, g, or t
aggcgtatgagatatctcacagaatagtacactacagacatagtaacaaggttcctaccagcctgcctggatacataaatcgctattccatctattaacttaaaccaaagaagcatacaatgatgtaccacaatataatatatgatgggcaaagtacacgcaccaatgttagcaaagtacaccgagcacaagagccgctgctaacacatccaggcaaccacagctaatntttt

SEQ ID NO: 2518 - DNA, 239 bp, Zea mays
agttcctggccgggaagggctccgtgctgcaggccattgggaagaaggtgctggcgctggcgctggggcagcgggacccgaccgccgtggacaagctgctgtccgcgcagcgcgactcgacgatactttcgtgcgtatcgtgcgctgaggagctggcggagaaggccgaggaggagaggaagcgacgggaggaggaagggggagggaaagggaaaggaccgggagaacgtgagaaggaa

SEQ ID NO: 2519 - DNA, 155 bp, Zea mays
gtcttccagttttttttgttgttgttggaatctatcctagatctttatcatgtgtatggtggataacctcatgtcaccatcgtatctgtatacaataagcctaaatcagctgacgttatatatgtaaattagtaaatgtaatgactaattggtgc

SEQ ID NO: 2520 - DNA, 321 bp, Zea mays
gagggcgcttggaacggttgcttgggcatggctgctgctcctgcagcagctcgccggggcctctcatgtcgtctacgagaaccttgaggtggaggcgacgacagccgccgtgcggccctccattgtcgaccccctgctgaggaccgggtaccatttccagcctcgcaagaactggatcaatggtaactaaaacctactcgcttgctgacttggcccacatccaaaattttgagctgtctcccactttctagcagtgccatggtagcctttgttaactgagggagtcgtcaagttgagaacatgtcatgtccagttaccagt

SEQ ID NO: 2521 - DNA, 358 bp, Zea mays
tgtaccacaggagaatcagatgagagcgtcgcagctgtatctgtttgctgatttggatgtaggggtacccaagaagccattggatgcgaaggacgggatcgcggcagaagtggaggttgcgccgctgtatgaggcaccacaggaggggccgtcgaggctaccaaacaccttgccacccatgttcccgaaggagctaaagccgccgccgggatggaagcctggtgatccgatcacgctaccacttgatgagatactacctggtatcaagggtgaagagcgggaggcacaggcccctgtgccgcaggcacctgtttcagtgcgaccagtggcaccaatgggaccagagacaatacaggtc

SEQ ID NO: 2522 - DNA, 456 bp, Zea mays
tgctttcatctctacatgaggccgctcttcggctcttgcgatagtggtagcttgggcgaggtaccgcccttcagacgatcacacacgatgtctctaaccgatctggtgttttgatctttacatgaacaactccttggatagtagttgctggacgaggtactgcccttctggttcctccaggtagatcttgtcgttcaggtaattctgtagattgttgacagcctcagtctgcatcttgttgccttgttccttcaaagctggtaaaaagcaccgtgatattacatccaggattttcatgaactgtgacccatatttcttgtgaagtgcaaaaccagccatctgaaagagcacaggaaccccaattaactacatggcacacaatcaggaggtcttgaagcagatgcctaccttgaggaaagcgtgaagggcacaagcagtggctgtagtagctggaag

SEQ ID NO: 2523 - DNA, 386 bp, Zea mays
cggcgcgtcgtcttcgcgcagaggcagctggcggcggcacgtcgtcgtacctggctcggggagagggagaacgggcgaagaggcgtgagtcggggggtcgacgcaaacggcttgagagttgagagttgagagtggagagttactagggctggcagctggctattgcctctttggggctttctttatcgagattgggtgctcaaaatctgactatttaagcctattttaggctaaaatggacgccaggcaggccccaggtgaggtccggggaaccgagcagcgcctctcgtcaaggaaattgggtgggaggaggccttgccggcgacgagaaaggacacgacctggcagcggcgatcggatggcgcgcaacaagaagaggacgaaag

SEQ ID NO: 2524 - DNA, 736 bp, Zea mays
  misc_feature (694)..(698): n is a, c, g, or t
  misc_feature (715)..(728): n is a, c, g, or t
acctacctctttatgccactgtcgccagaatgtgctaaaaaaaagaaaagtacatacctattatgttaatgttcccatatggcgattagaatctagaagcttcattcccccttttctaatgttctgtgcattggtgccccagtcctggttggtttgactttgatcgatagcaaagaacaacatgaatccatgcgcaattattagatatatatcgctacaaatgcagaactgctctctggatttatttctttgcatatcagtactgcatggatatatacctgtttaaaacttggtcacatctgtcaaatgcttgctcattacacaggagcttgaagatggaagtgttctccttcggtttgctcatctatatgaggttttgcactgctacccttactctcacttgttccaggtgaggtaaatcctaattttcttttctatgtcttgccctgtgctgtcgtgcacataggccggggaggacaaggatctttcgtctttagcgagtatcgacctcaagagagtgttcccggagaagaaggttccctccgtcactctgttgttttacttacgcttattctagtcttcagcattcctaactcagattcttgatccctcgctctagattggcaaggtcatcgagacaagcttatcggcaaaccaagaacgcgcagccatggagaagaagcgtttgaaatgnnnnncgcaaggttctgcggcnnnnnnnnnnnnnnttcggggt

SEQ ID NO: 2525 - DNA, 378 bp, Zea mays
aggaatgggactccgactgttactcatccaactccgacgatgaaggactggccgccttggccttcgacaaatcttcgttcttccccaacgaacgccatacatgccttatggctaagaaaaagaaggtatgtattcgggacactcccaaatatacttcttctagtgtgaagaatcatctgatgatgaagtagactacactaatttgtttaagggattagatagaactaaggtagacaaaataaatgaattaattgatgctcttaatgaaaaggatagattgctagaaaagcaagaagatattttctatgaggaacatgataaattcattagtgttcaaaaatctcttgctctagaaattaagagaaatgaaatgctatg

SEQ ID NO: 2526 - DNA, 350 bp, Zea mays
ctggtcctggttgctgtttttgcttgggagaacatgggtcagttcctagtgaagaccaaagaccgccacataaaaataattcaaattttgtggttgtgaacaactgggattctttaagagatgtggggaacaatgccctgcgattgatggtttccctgtagccattactgttaatcagcataagctgttcagtcatcgtcctcgagaagtacagtgtagcttcggtgtacggcatccttgtactttggaaaacagttagatatgaaggaaacctctgactactaatttcttctggatataactagtgaaggaaactaaaaattattattcctcactcgtgtaatcttgca

SEQ ID NO: 2527 - DNA, 498 bp, Zea mays
caggagcctgaggcggcggtggccatggctcagcacctactggtagctgctgacaggtaaggtttcttttaatcttattttttttcactcacagaagaacaggcgcatatggaagcaacaatatatatatgacgacaattactgtgtgtatagtgtatactagtagattgtaattagctcctaacaattttgacaggtatgggctgaacagactgaagctcatgtgcgaatgcaagctctctggcggcatcgacatcggcacagcggccgcgacgttggctctcgccgagcagcacaactgctcgctgctcaaagccaagtgccttgagttcgtcaccaggtcgcctgagactctcgatgctatcctggcgactgacggctacgagcatctggtggcaagctgcccctcggtgctggctgaactgctgagggctgcgcgtggaaggaagatctgagctggacgatgatttcatattatggtttgcctaagatgtgtgt

SEQ ID NO: 2528 - DNA, 372 bp, Zea mays
caaggaggagtacgacgctgaggtggaggacgacgatgcagacaacgtcgaggagtctgacggcgacgacttcgaccaggagaccggttgacccaggtggctcccccgtgcttcgtcggcgtccttgagcgtcgtcatccccgctgtccagtctgtatttcgcaatccctgagttgttccttctatctagatacgctgttaccctattctgctgctgtctgttctcaggatctgagcatgtccttgtcgtgtggaccttgtgtatgaaacaggtacatgattaatcggtccaatttaaatgctatattagtttcctctatctgtgccagatactgctacttcttaccattttgttgtttgtgtcatgaccag

SEQ ID NO: 2529 - DNA, 336 bp, Zea mays
tggtggcgtctggtttgatctgtggcgatgggctctgggcgctgccgtcttcgctgctggccatcttcaaggtggagccgcctatgtgcatgaagttcctgtccaactaccagactgagcagatgcggaagcacctcatcctagcagcagctgcacgccgaagaacaagttaattgttgtacccttacttgtttgagaacgaggaatgagaatggattgtttagtagctagccagtagccacacacccctccttgttttccaagataaaataggcttgatagctcgatctagaatctagatagataaaacagcacacacgtctcttgcttcttgca

SEQ ID NO: 2530 - DNA, 424 bp, Zea mays
tgcaagcccagtgcttttatatagcgctcaccactctgcggtgtttattctcacgggtaaaatctttcatcgttggagaacaaagaattctgatggttgaattgatcatcgcatcattctcccttgtccttgtttggcatagacctccagatcccagccaaaatgctaccgtagaccgagtggcagatgctcgaaacagcacacggaacagccgtgagagggttgcccaagtgcttgtttgcaaggacaaggcccaacactgagttctgcaatgcaaagaaaggaaattaagagctgctcaaatagaatgagatgggataatgatacgatatttctacaccagttacctgcataccaacctcaatagagattgttctcgcggaggaggtatcgatgccaagtactcttgaaagaacgtagccga

SEQ ID NO: 2531 - DNA, 424 bp, Zea mays
  misc_feature (88)..(88): n is a, c, g, or t
  misc_feature (90)..(98): n is a, c, g, or t
  misc_feature (101)..(101): n is a, c, g, or t
  misc_feature (103)..(110): n is a, c, g, or t
tgcaagcccagtgcttttatatagcgctcaccactctgcggtgtttattctcacgggtaaaatctttcatcgttggagaacaaagaantnnnnnnnnngantnnnnnnnngcatcattctcccttgtccttgtttgggatagacctccagatcccagccaaaatgctaccgtagaccgagtggcagatgctcgaaacagcacacggaacagccgtgagagggttgcccaagtgcttgtttgcaaggacaaggcccaacactgagttctgcaatgcaaagaaaggaaattaagagctgctcaaatagaatgagatgggataatgatacgatatttctacaccagttacctgcataccaacctcaatagagattgttctcgcggaggaggtatcgatgccaagtactcttgaaagaacgtagccga

SEQ ID NO: 2532 - DNA, 736 bp, Zea mays
aggcctagggaggtcgtcgcgggagaaggcggcgacgacgagggggagcgtgggatggacgaaccggacagcgcggcacgcagcgccgacaagctgacattggatgatgaggacggccccactgtccctgaagcggtgagcttttcgtatgaatgtatgatgtttaattgtgcctgctgcgcttcgattgtgtttcagcactctgagacgattctgagagatgaaattttggttccactgtctattttatgcttttcctgcgaaaaggcgttaccttgtagtttacttccgatcatttcacttccaaatgacttcggtttaatctttgcctgcttgttctataaaaacaggtccaggtgggtagttcaccgaagtatagagtcgacaggaagcttgggaaaggtggttttggccaagtatatgttggccaccgcatgtcagctactggtccaggtgccgtcgaggtaatagaggaatttctttagtactacacaacttggaaacctggaattttggttttgtatcagcaccggagagtaagccgtcttcctttctatcttaggtggcactgaagtttgagcataggaccagtaaaggatgtcactatggccctccttatgaatggacagcttacaagtaaggcatgatcgtttatggatgagaaagtgtaagtctttcggagaccattcaactcatgggtagctgattggttttcatgtttattgcatgtttagcg

SEQ ID NO: 2533 - DNA, 379 bp, Zea mays
catcttgccccctccaccgccacgaagaagaacctgttgcgagagagacgactgaactggtactgggctctcacctctctgtgtctgggtgtgtgggtggcgcgccctggtatatatggggcgcaaagcagtttttgataggagagggacagggagagaggagatgcagatggaagagggaggactggggggagacgagcgcggttggcccagagaggcgaagagaacggcgtgcgtgagagataaagaagctggaactggaaggatggatccgttggttgccgagttgcagagctatcgtcttcccccactcactctcaaggtgtgcgtgagagttggcggcgggaggatcgtggctcggctgtcgtagctcaaggtg

SEQ ID NO: 2534 - DNA, 560 bp, Zea mays
gcacgacatcggcgaacgtccatctagcattcctaatgtgcttcagcagagggttccctctctgtcgaacaagaatgaataaaaaagacacgaaatttgctttagaacaaggggacaggaacctcaaaacaagaggtcaaaagtgtcatagtgccacaaaccacaccccagtacctgcctatgactgacgagaatggagttcttgctttggagagtcggcgctgaggggctagcttgagtcggcctgcgccagcaaacctggcacgtcagagtcgaggccggcgtcgcaggtactgagaagagggagagagggaggacagtataggtacctcggggtggtggtgggctggggaggcggcggcggcggaggtgagtagaactcggaggacttgaggaaagaaaaagcctgcgagaatgatcccgaggacgacgaggaggatgaagcggcggcggcggcggaggtggctacaggagggttgtaggatggcggcttcgaggaagaggaggaggcgccggtgccgaagacctcctgataggacgggatcttgatgaggttctta

SEQ ID NO: 2535 - DNA, 431 bp, Zea mays
aaatgtctgccttcatgagcttccagcaaagcgtgcaagctgcaggggtgccaggcagccagcccaaccagacgacggagctggaccttttccaagacctgcagttgcctcaggtggagtactacctcccatccgcaaggccatttattcaccctccataatttctaattttgacaacgtattaacatgaatgaaaatgtctaattttgagcaggccggggcgcagagcacaaacccattctccgatgagagcgttcagggatacccacagtacatgaacgggcccaacggcgacaacgcacagccaggccaggacttccaacagcagtctctgaagctaccggcggcgagcccgtacgacaatttcctcagggctgctggctgttaggagtccagttacatggacgacaaccacctcacctcaagatagt

SEQ ID NO: 2536 - DNA, 410 bp, Zea mays
tctcatcacagactggaccttgtctgacatcttctggtaaagccatctctgggcggcctcgtccagcccatccggtgtaatggtcggccaccccttccgttcagaggatgagtcatggggtaccgttgatgcttcttgcttcaagcttggcaagtcaaactctattggctctccaacaatgatatctatcttcttactgcagagtggcactggtgttcgccgtccaaagaacgagttttctggcatgacctggaagtagatggcagcgtgctaataatatattcatatttctccataccacatactacaaatgtcttcactaacaagatgccatatcagttccatgtaccttttcgaaaccagagtgaacaattggcaaaactattggagttataggtgctcggacaata

SEQ ID NO: 2537 - DNA, 640 bp, Zea mays
ccctgatgacatctttgaagctgtcttcggggcacattatggttttacttggtctcaaatatcgtgggaagggtttcacttcagggacaaatcgttcagatttagatggagcggccgtgaatcacgcagagagaaaattccatgtgacagcgaagatgaagaaagcgcggatgagagcagagaaacagccagcgttggttcacatgctcacagggtcatccttggattacaaccatgtggtccactaactctagaagatgttaaaactgcgtaagttgtcctttgctgaaatccctgtttgtcttactgttatcacgtttatttttgtatggatgcgtaagttgtgccccccacccccattctaggactcacctgaattacttacggcctgtggatgtggcatgcagtttccgggcatctgcgctgcggtggcaccctgacaggcacccggggtcatcacaggtgtgtatccaaacaaattcaggtcctggaacttaccgcagaaactgatgccgtcattactcattatgcgtcttcattgtccattcgcaaataaatacaaaaaggcacagataataacaaggacataccacatgttctacttgcgtgcgcaggccatggctgaggagaagtttaagct

SEQ ID NO: 2538 - DNA, 432 bp, Zea mays
tatacgtgcgcattatgagattactgtgccttattacatgataatgttgacgggatgtaggaggtgctgcttccaggtggccatggcctcatggttcgtgggtatcgtccggttataaatactctcgcaaaaggcttagatatacgcctcaaccataagtacgcatatctatccttttcttgttaatttggtaatcactagttgtggtttcacttccaccagccattcctagatcactgatcctgttctttgttcttcagggttgtggaaattgttcgccataggaacagggtagaggttaccgtaagcagcggccaaacgtttgttgcggatgctgctgtggtcactgttccgttgggtgtcctgaaagcgaaaaccattaaattcgagccgaggctgccagagtggaaagaggaagcgatcagagaactt

SEQ ID NO: 2539 - DNA, 512 bp, Zea mays
ctggttaaggttgctgtccacgatggagtccagctccccttctctctgtagcttctttacctgtatttagttacaggtgcatcgcaggaatcagattacatcaagaatggagccagtttaaaaaaattcgtaaccaaataggcaaagggcaaagctatccaatatttggaagtgaaaaaaaagacttacatgatcaagcaatagcacatcatcttcgtcttccagccgtgagaagtcaatagcccgttgaccagtcacaagttcaagaagcatgatcccatatccaaaaacatctgtcctctcggaagacttccctgtggacaggtactcgggtgctatgtgacccatggttccgcggacttgtgttgtcacagacgtcttctgcacatctactagctttgctaggccaaaatcgccgacaacaggctcgaaatcctcgtcaagcaatacatttgcagctttaacatcacggtgtatgatcttggggttgcagtgttcatgcagatactcca

SEQ ID NO: 2540 - DNA, 1542 bp, Zea mays
taagaagctccccatcctcaagtctgtgcgggagttcgaggatgaggagccaggggtcgcgccgctttcttctgcgagggctggggtgctgctgcggcactcaggaactgagctccccgcgtctggggcgaacaagacgacagagggcgaggtattttgcagcttcagtttgagcttcagcaatgttaaatgatggaccttattacctcatagtgtttgtttctgtgttgaagtgacatgaattgagctttcttctgtgcttgaatcctcatttcaccaactaagctttcacaatgtgcgtcatgtgtctgtactgtttgttgtagttgttgtcttagtgaccataggcccataatgaaaatgtgaaatgaaactatgaaagggacctgattagactgcaggttgtaatatcatgtaatcactccaatcctaatgatgttcggacatgccaattaaagtttactagcatatcgataacatgcagcgtgactaaatttacgtggataatgtaacaaagtatctcttagggcctgtttggatcctatgagttgaaaccaatatgtagaaagtgcttcccatttcattattagattactttccagctcctctcaattcttgggaaccaaccatggccttatgttaaaattagctagaagtaaggcttttctggtggaatgatacaggctgtatccttaatagcttgttacacacatttctttatgaacctatcaataccactcacctttaggtccaaagagtcgcttagtgaagttgttgctgtttttaaagtgaagttgttgctgttcatactttcatttgtgtacaccacatttataaaaggtcaaacctttatcaattaatctattttgaactcattgtctggttctcttaactggaatttggatacacatgggttgttattttttggacaatagttcagatattgtacactaatttgttggtgcgcatttccaacaaaattattttttatctccgtctaattgaaacaatagtgatgttttattgtgccctttttcttaaatgtcttgtccttggaagaattcaaaatcgttactttgctaggtttatctgattgtatatatttctgatcagtttaaattatgtatgggctattccgctgttacaagaaaacatagtctgatgtgggcttctctaactccctcacctaaaccaatatgtccatggtacatctagtggactgctactatttgtttcaaaggatgctggaaaaaggaattatatcactctactctgcagggaagtcaagcacccagtaagaaaaatgcccaagaaatacctacaccgcagtttgatgctgtggacacatatgaaagggactatactcgcacctttgcacaaccgacatcttatatacgtggaagaggaggtttctttcttgttacttccctggggatgcattcttttcttgttaaacttacactgttatgtttattactaagagtgctcaatatctgcagccagagctgagatcggtgaatttgtcgagtatgacctggacaa

SEQ ID NO: 2541 - DNA, 417 bp, Zea mays
ttgacagcagttgctgtttgaacttcgatttgctgttctcccagtaggattagaaaggaaccacacattctcattggagcataattcagtctgtcagttaaacatgataaggagacacggcaggcagtgaagatctgtagtagctccaaatttgcctcctggcgaaacacctttccttgaaacggctatcaagcgtgctcttcttcacgcacaacgcaacctgttcctgacaccatctatgcaacctgacaaacattcgtaacggaataacaaataaataaataaaacagaataacaaataaacaaataaataaataaataaatcgaacagcagtacctggctggctcaggctctccaccgtcccgcgcaccaaccatgcgttggttgatcagtgatcactatcatatattccggtg

SEQ ID NO: 2542 - DNA, 489 bp, Zea mays
tggagcagttactcgctggtgtgatgtccggccgagtcccgccatcgccgccatgaatgcatgtacgggtgcatgcagtgccagaggccacagccagacggtttgagggcgagcgaggccataatataaagctacgaacagatgtgtatgtgagacatgccattattacccaggatgaagacgcaggcccaggagatgccgcgatccctcttgggcgtccggcgacgtccggcgccgccgtgcgactccacggcctccatctccatggttccagcagcagcagcagctgtggctcaggagacaccgaaaatcttcgacaggtgacgaccaatacgactctctctctctctcaatgactctgaccacggcgaattccgtgaccatggaaccattttgcaggaagcagatttcagaaacagaatcgtcagaggtgagaagacaagcgaatcgatgaaatattgtgtttcggtcgtgtactgcaaactattg

SEQ ID NO: 2543 - DNA, 331 bp, Zea mays
ctggacacagctgcctccacatcatcctttgtcactgtaacctcctcttgttcatgcccccattgtgtcacccctttgactccaacctccaccccagttttcagcacgtccaccaccagcctctcgttcacaaactgctctgcaaagtgtggccatgtgatcatgggcacgcctgcacagactccctctaatgtcgagttccacccacagtgtgtcatgaaacctccaacagatctatgccacaggatcataacctgcggcgcccagccccttatgatcaagcctctgtccttcacccgttcttcaaacccatccgcgagccattcctcaa

SEQ ID NO: 2544 - DNA, 363 bp, Zea mays
gttgattctgcagcgattcatcgaatcatcgtgttatccggcccttgatcaaaacttgattcatcgtttatcgcgccgaccctgcagcagcgaggataaggacagctgagccgatagcccgatatacggatcactcgccgtcctccgagatagcgcttagcctcttcacgacggcacgatggcgagaaccgcgggctctgtagctagctcccttcctcgtcttccccgctgcgcgtccaccgtcttgacccgcaggacgcgcggcgtcgtacccacggtgcacgtcgttcttccgagcagcaccatcggcaggcggaggcgggctgctctccttgctcacggcgaccagaagaggagccactc

SEQ ID NO: 2545 - DNA, 423 bp, Zea mays
gtgcgagtactactcagtctcactcacatatcatggctggtttaatttggtgaccagtgaatcaattctctaaccaaatcagccctcaccgagcaagtatacctgggcaacattttaacaagggactttacagcagtatttacagagcaggaatgttttgcagagtgaggccaatacagacatacagtggccttggctaaaccaattctgctgtgtgctgatcgtacccttcacacgagccttatgcaagagtagtagtaataatcaagagtgtcggaaaaaaagaagaaaaaaagcaagcggaggagtaaaaggtaaacaaaaggcacatacattctttgttgaacagtcactgcgatcatctcttccagctccggcagcgcaggaccgcgtcatcaccgccgacgatccaagtctccatag

SEQ ID NO: 2546 - DNA, 422 bp, Zea mays
  misc_feature (411)..(417): n is a, c, g, or t
gttctcccatccccaccataacagcgccctcgccgcacatgcattgccggtcgaccgaaggtagtgaagcccgtggtcgagtgcgttgctgacgtctgcggtctctgccatctgcttgaaggtcaactcaaggtacccatagcgggttgtggcgtcaatacgcccgtggaggagacggccgccgtggatggatcgtcgtcgtcttcttcgtcttggtcgcaatgagcacaaccggaaatctccgacctgagacagccttatgctggacaaacaaaatgcagcaaatttacatgccataaatcgaagaaggcaaaatttgaacttcatacataccatttgacacaagggaacgaaatcagctgtgcaccaaaacgaaacaatcgacgaagcaagaatgggagcacaactgtnnnnnnnaacgt

SEQ ID NO: 2547 - DNA, 347 bp, Zea mays
  misc_feature (337)..(341): n is a, c, g, or t
tgcgctgcttgggcgtgcgggagctccgggtcaacgcgccctcgctcgagtcgttcgccttccacggcgacaacgtctactcgacgagcgacgacgacgacgacgacttgtcttctgccgtcgacctgggatccacgccggctctgcgggacgcgtacctttctcacatcggcttcgacgacgccaagaacgcgtacgatgagcgcgagtacgcctactccaacttcttgagctgcgtcgctcatgcccgggttttgacgctctgttccgtcggcttgctggtatgtcgcagaaagaacccgtcatttgaatcagggaaaatgccatccgtgaaatnnnnnaaccac

SEQ ID NO: 2548 - DNA, 1012 bp, Zea mays
cttctctaaagtctgtggagtcttcctagcaaaatactgggcagtaggtcctggacgaagccccttaatcatggcctcattgacaatttcattgggcactgtaggcgcttgtgctatcaggcgcaagaaccttcggacatacgcttgaagatactactcatgatcttgtgtgcattgaaagagagcttgagttgtgactggcttcgtctgaaagccctggaaacttgtcatcaggttaatatgtacataaaagtctcaggaccaaaagtgatggagcctcatacctgtatataaatgagagtagtatgttagtatagacaacactaaagagttcaatgtaatatcaggattataaaagaaataacattctttgaaaggatagaaacagtaacatacaatatgtttattttctctttccctctgatcacagcaagcaggtactaagtcagttaaagtgtttgtcgaataaggtatatgagtaggctaatagtctaacacattgttatgacgatatataaggaaaaaaggagcaatgtagaagcaagtgtactaagaacgctgacaactgcatcttggtaatgtttgaataaaaggtttaaatcatctaaatacaaatcaagaaagacaggttaacatttaagaaataaattgttggagtgaggaagcaatgaagttcaagagtctgcagttaagacctgctgtttcatgcctttgatctccttcactaagtgagttaaacatttgggtaaatttttttgaataacagagacattcagtctatgcgcaaagtaaaatagtggcatctttgaacttcattgcttgcccagctaaaagtatggtggacaagaatttgtttcattggtaatttcatgcccagctaaaagtatggtttctttatttttatctcctttttccatgttcaggtgaatattagcgttctaacttggtaaatcaataactgcaggtagagtctgtctcctaccactgcagggtagacggaggtcttaaaacc

SEQ ID NO: 2549 - DNA, 379 bp, Zea mays
cgccgccgccgcgtgagttgagagggaaagaacgagagccaagaagccagggagggacttgagcttcacttgggaagggctagtactgctcccgcccccgccacggccgtctggctgtctgttgcgcgactgcgccagcctggcggctctgccccgggctgctggcgccgccattgctttcccttggagccgctggcagctaaactggtgccctcggccgcctttgtgcgttcctcgccactgcgcccggggtagctgaggtctgaagacggaggtgtcgcccgcctttacacggccacggctcccgcaccacggtttttctttctcgcatcgccagagcaacaactgccccccgccgttggtcagtcctgcgagctct

SEQ ID NO: 2550 - DNA, 269 bp, Zea mays
caacatgtgtgtatataggattaatgggacagtatcagtatgcatgcaatggtccatgctgcaagtgcaagtgcatatatgcaagtggtgtgtgaaagcaagaatcagattagatgcatgcatatgcatatgcatatgcatgtgttaatttagtagtaataattgtagtatgggatgagtcctatgctagccagtcacgcgcgatcgaccgaccgacccatcgatctccaatgcttctgttccctctccctcctacttgtccacttgtg

SEQ ID NO: 2551 - DNA, 321 bp, Zea mays
cctgctgcggttgtgaggggccggacgaggggagaagatttctcgcatgctcatctcttggttgttgctcctacgggagttagtttggatccaatatgtgttgtgcatatggcagttaattagtttgcaggtgaggccaagccattgttatagtcagtggtgtttagtttagcctgttggcttgaagaacaaggatccctagagtctgcttttattcagtttatggagttgttcatgttcgcttttttttcctttttaaaggtcccacgagtgaactagttattgctcatgtagtaatgccctgtctccgttctcgaatat

SEQ ID NO: 2552 - DNA, 321 bp, Zea mays; identical to SEQ ID NO: 2551

SEQ ID NO: 2553 - DNA, 351 bp, Zea mays
tcggtcgtctggttctagggaagagatgaggactgtggccagttttctgaagagaaaacaaggcctctctcatggttgctgtgccttgtgcctgtaaaataattttgttttgtttcatcccatgctggaggactggactgcactgctaatcctttgttttctgttctgaaaagtgggcaatcgagtgcttagctgttggggagacgtgcaaagatgccaacttttccgtgcgcccgccgagtctgtctgtctgttgcccacttgtgtcacctggaaaagtgcggtgtgcgggtgatcattttatatgtaaatgtgttttgttattaataatattatagcagcgcgtggggg

SEQ ID NO: 2554 - DNA, 522 bp, Zea mays
ctgaacttagcactgttccactgttgtttggttgctagtctcgattaatgcttcttcacaggcagctatttggccatacaatctcttgcaacgatatattcagatacatgactgccatgtgacagaaccaatgctcaagtgttttgtttcttctgcaggtggagcaagaattcacggttcggttcaaatctactctgctggaaagccccaaaacaacccatgtaacggaggtacattactctgtattttcacatcacttggtccgtcggaatagccatgtgaattcagcgtcttggctcgctcggttgctgtttgctagtgttcatattacatgttgaccccagttctgccaggagcccagagcactttcacaccagcaagctgctttcttacaagcgtaactgcgtcactgcgacaaccagcaccagcattgttgccggggaaaagtgaaccatggtagcagaacattggcatgctgaaaaacagtgtcaaatcattcagtttttgctaggacatttacca

SEQ ID NO: 2555 - DNA, 411 bp, Zea mays
  misc_feature (403)..(407): n is a, c, g, or t
ttctgcgtgatcctccccatgacgatgttcgtccccgaagccgagctccccgcgtgggtggtgtgctacatcccggcgacgatgtccatcctcaacatcctcccgtccccgaaatcgttcccgttcatcgtcccgtacctgctgttcgagaacaccatgtcggtgaccaagttcaacgccatggtctccggcctgttccagctgggcagcgcctacgagtgggtcgtcaccaagaagtcggggcggtcctccgagggcgacctcgtggccctcgtggagaagcactccaagcagcagagggtaggctcggcgcccaacctcgacgcgctgaccaaggagtcgtcgaagggcaccgaggaggagaagaataagaagaagaggaagaagaagcacaacaggatcnnnnngaag

SEQ ID NO: 2556 - DNA, 379 bp, Zea mays
ttgaggagcacaacattacccttaaaccacagggaagcaaaaatgaagaagcaggtgaacctgagtctgcaactgagaagggcagtgcagtttctgaatcaatcaagcttactgatgctcagaaaactcgtttggaaagccttattaactccagcccggtgatggtattcatcaaaggtacacctgaggaaccaaagtgtgggttcagtgggaagctggttcacatacttaagcaagagaacattcctttctctagttttgacatcctttcagatgatgaagttagacaggggctgaaggtcttctcaaactggcctagttaccctcaactgtacataaaaggtgaactggttggcggttcagacatagtgatggagat

SEQ ID NO: 2557 - DNA, 487 bp, Zea mays
tttcatccaagttgtagagctactgacgaagccatgcctgccgcctacattatcacatacgtacaggtatgggctaactaaacgactcctctgctcaacaaatttcagtcctttgtcccgagctcgggttcgcacgagctccagcacttcgttactgacatcacagcgacacgctcgtgtgctgcagcgggggagcgccgtctatgagtttactccatcatcagctctaggaggaaggagagctgctcagtggctgctgtctgctgacctgtctgtcattggcatggcacatcgtcaagaactcgccgcaagcccgcctcttcctgcgttggagcagaacgcgagacatttcaaacaccaatttttttcccctttcgtagtctcggtaaaactctggatccagctctcgcgatgcagtgttacctgagcttgtttaactgggtagttagatcactgatctccaggaaggatagcttgcttgagtgaa

SEQ ID NO: 2558 - DNA, 507 bp, Zea mays
gctgacaccggcgtcgttggctcggcagaagcggcgttccgatccgagatggggggccagcagaacgcgctccaccagctcgtgtccttcatcctcggggcgtccgccgccgccgtcctgctcttcttcctcacgacggcgacgagcggagcgcggttcacggggatctcgagctgggccaacggaaccacgggctttgacgacgatgctcccgtccaggcggctcctgctacccgggcaaatcacgccgacgcaaaggtcaattcttgagcatcatgtcccggtcccaagctgcagtcttttctttgctcggtttcagtttcttgacaccgtcgtctgtggatcctgtccggctcgatcacgcgtggtgaagcagggcgcggcggcggagcaggaggacgagctgcagcggctgctgcgcgcggtggcggacgaggaccggacggtgatcatgacgtcggtgaacgaggcgtgggcggcgcaggactcgctgctggacctgttcct

SEQ ID NO: 2559 - DNA, 351 bp, Zea mays
cagcaatccagtctcaatcagagtgcaagggacgctccgaggcttggagatgagtcactgttcccccctttgactgggtctagtaacaagatgaagcagcctgtttttacgcctaagcgtcctcgaacttttcctgctgccgaggatatccatgctgcaaagatgcgctatgctctgggaatgaacgaggacatgtactctgcgttcaaagagatcgctggtgaataccgtcgaggtaccatagatgcttttgagtatctttcatatgtcgagcagttcggactgtcgcaccttgttcctgagatggctaggctattgcctgattctcgaaaacagagggaacttgctgat

SEQ ID NO: 2560 - DNA, 430 bp, Zea mays
ggcacaggtaattgcccaggtagtctagtttgagtacgattacatgccggacaactgtggtaggagttagttcagataatgtctgaaaactgcaacgcagcaaccagcaaagcggaaatcactcgtcgacgacttggatcagcgttggctcatagtgatcgggtgcctgaaacccatgaaggttcatgaccgtcgccgcaacattggcgaggccggcacttgcgaggtctgtacggaacctgacgccaggcgcaagcccggggcctcctatcgcgattgggacctgcagtttccaggcttccgatcaagagtgcgattcgccgagagacaatgcgtctatggactgaatgaacttaccggattcagcgtgtgcgaagtcagggtctgcaccttgccgtccttgtcccggagtggttctccagacttgtct

SEQ ID NO: 2561 - DNA, 320 bp, Zea mays
  misc_feature (86)..(141): n is a, c, g, or t
  misc_feature (148)..(170): n is a, c, g, or t
  misc_feature (173)..(182): n is a, c, g, or t
  misc_feature (184)..(201): n is a, c, g, or t
  misc_feature (208)..(239): n is a, c, g, or t
  misc_feature (243)..(254): n is a, c, g, or t
  misc_feature (256)..(262): n is a, c, g, or t
  misc_feature (264)..(264): n is a, c, g, or t
  misc_feature (271)..(292): n is a, c, g, or t
  misc_feature (313)..(316): n is a, c, g, or t
aactactacctcgttaccacagatcgatcgacctgctggccctgaatcctgattatatatatatatatatatatatatatatgttnnnnnnnnnnnnnnnnnnnnnnnnnnnnnnnnnnnnnnnnnnnnnnnnnnnnnnnnctctcannnnnnnnnnnnnnnnnnnnnnnttnnnnnnnnnncnnnnnnnnnnnnnnnnnnacctttnnnnnnnnnnnnnnnnnnnnnnnnnnnnnnnntccnnnnnnnnnnnncnnnnnnncnagggtgnnnnnnnnnnnnnnnnnnnnnnatatatttgagagggcacaannnntctc

SEQ ID NO: 2562 - DNA, 480 bp, Zea mays
atgatcgatgaagcggaaggcctggaaaagatcgagaacctacagagccacgataacaatgaaatctatgaaaaggctgtgaagcttcttgagacatactggatggaggaggaagatgacgcaatggctactgccggggaagctgctcctgctgtttttgactttaaccaaggtggcaaccctcctggtgctggtggtctgaacttcaactgatacaggttctcccagccataccatgctcatcatagaatgttttacggttcattgattcttctaaggatttacggtcctggtattcctcttttgcagtctttgatcagaatggtgttaattccttcagtgatgggcttggcattggcttgtcgtgacaaatgtagtctggtcgactccacgtgggatataatggtttgtggtgagtccaataaactcaagatttcgaagggagatgggctgagcattaatgcattattcccaagtgaa

SEQ ID NO: 2563 - DNA, 353 bp, Zea mays
  misc_feature (335)..(344): n is a, c, g, or t
gggaatacaaagttctgtgctctagaaccataagtaggaagagaaacctcacaagttggatgccatgcgaaaccgctactgagatgacaaagctttcgcttatttaaagtacaatgtgccatagcatgattagaatctgctaaactttcctttgaaaagtaacatacagatctttgatgatcaacctcacaatcaaattgtccttgcccaattgtgctagtgaatgaaggggacaaaataggcacatgagtgtgccgtagaatgtcattcctcctcctgatgatagcccttgaggccatccttgagcacttactccctttctcaaggaaactccnnnnnnnnnntgcacaggg

SEQ ID NO: 2564 - DNA, 510 bp, Zea mays
  misc_feature (369)..(372): n is a, c, g, or t
  misc_feature (420)..(427): n is a, c, g, or t
  misc_feature (437)..(446): n is a, c, g, or t
  misc_feature (449)..(461): n is a, c, g, or t
  misc_feature (467)..(478): n is a, c, g, or t
  misc_feature (490)..(490): n is a, c, g, or t
  misc_feature (503)..(503): n is a, c, g, or t
ttcccacagctccggatcttctgacacatatccatccacttggtcctcaaaatcagaagggttagagttgtcttcaacatctgaagggggatgatcaaggtcccaaccaggacatttgttctctagatcttcttcacacacaattgaagtcttctcgagactcttgcacacttccttcaaatggccagcaagctttccaaccttacccccttcaacttctgggatgctacaacacaacctattcatgttttgtaaaagtgaagattgcctcctcatctcttgaatggcatatcgcagtgagttcttgatgctaacatgatacttcaagtcaacatgttcctgtacaaattaaactacttgttggtccannnnatgactaatttaccatgcttgtgaagaactaaccctaatttgaatgannnnnnnncctgtacccnnnnnnnnnnaannnnnnnnnnnnnaaatcnnnnnnnnnnnnttccaccgtggngtcatcttcaacnaatcttc

SEQ ID NO: 2565 - DNA, 363 bp, Zea mays
ctccacctaagtgcaagattttcatttggctagctgtccgaaatcgctgttggactgcagaccgattgccttggagaggactggcacacctagttcattacgttctttgcgacctggaagaggagaatattaatcacattttgttttcctgtgttttctcgagggttctggtttagagttttctcccggctagggtatatttattgaccatgtgttggggtcccaggagcaatcgtttgcagattggtggtgaaaggcttgcaaatatctcccaaaagaaagaaaaaaaggaagggcatggattcaatgattatgttgcgaatatgtggagtgttctgcatgctctcgaagatgaacaacatc

SEQ ID NO: 2566 - DNA, 368 bp, Zea mays
gggtcgtccgtcgtcgtcactgcctctcctgctggttccactcgagtatcgccgaacgaagggccctgttcggcacgagaaggctgcgctcgaggtcgagattcgtcatgggtgatgtgctatgcccgctgtcaagccagcccctaatagcttcaccctcataagtgaatccatccgcggcaacgtaaggatctctcatgatctcctggacaccatcaaattacagccatgagtttacccatttcaatgtatttaggtgttgtttggttcacatatttgtaacattaacgtaactcatgacgtttaaccatgtttgtttaagtccaaccgtaatcaatcagataccacactaggaactaataccggcc

SEQ ID NO: 2567 - DNA, 376 bp, Zea mays
  misc_feature (329)..(331): n is a, c, g, or t
  misc_feature (333)..(333): n is a, c, g, or t
  misc_feature (335)..(338): n is a, c, g, or t
  misc_feature (341)..(341): n is a, c, g, or t
  misc_feature (347)..(352): n is a, c, g, or t
  misc_feature (356)..(360): n is a, c, g, or t
  misc_feature (362)..(365): n is a, c, g, or t
  misc_feature (367)..(371): n is a, c, g, or t
agaatgcttgtaacagtagtgtatgctcacagtaaaatttgtatcctcgtgttccttggctcaaagtttgttcctctcaacctgcactgctgttccacataaggtgcctattcccagctgtagaaacgtcgtatcccctcaatccgttgaacaacttctgccattgctggtctcattgtggggttcttgtcacagcaatgaattgcaagtttgagaaactgaaccagctcctctaccacagttttgtttgtaaggagtttcttatcgaatgcttgtgttgcccagtgctcatggggtattgataaaacccaatcgaccaaatctggacnnntntnnnntgngaggtnnnnnnagtnnnnnannnntnnnnnacctg

SEQ ID NO: 2568 - DNA, 420 bp, Zea mays
gctgcacctgctccccctggagctggaagatcctccggccttcgaggtagctgctgccgaacgcggcgcgggagatgacgtcccctgtcaggttctgcatctcaggccacacgtccacctcgcacggctgcccatctgcgaccaggccttcccacctctgcaccagctccgtgcagcacgcggcgaaagcgggtaacatcccctggcaacacaagacagaagatgatcagcgcgctctactctactacatgcatcctgcaaaataacagaaggtagaggaagaccttgagtttctcgagatggaacgcggggttgatgatcctgcggtgctttgcccacttctcgccctcgaggctgcccaggccgttgtgcagcatcctctggagcctgccgaacttgagcttctcgtagtggccgaac

SEQ ID NO: 2569 - DNA, 406 bp, Zea mays
  misc_feature (66)..(68): n is a, c, g, or t
ctctgtgttcaccctctaggaacttataaggatagaactattcaagtcgcatctgctttaaccatnnnattgaatgcctttttataatctatatcatatcgctgtttaaaatcctttgccaccgacctggctttattatatatgtagtgtttcatctgcatttcagttaaccatgttctttgcctcatcagcacgagctgaagtcttattatttagcagacctaacccgggcctgctgtcgtccctaaccttacgtaacccagaaattttattttataggaacatcattttatttttgctatattttttatttatataaatattatcctgaacatcagaatatacgttaactaactgatacgttaattaacaggcacagcacggagaaatgaaccgctggattaac

SEQ ID NO: 2570 - DNA, 565 bp, Zea mays
gcttgcgctgctcgccggggctgctttgtccactcaggccatcgatctccagttccatgtatgctccaattttgttcttgtttttttttaaaacaaactcagttccagtacctgagcatgagtcacagcttggtttaggcgtgtggtggcgtttgctgggcagatcagttattactcctccactccacaccactgcaccggccggcaccgctggtaacgcacgcaggtaggcggccaaggccatgccaatgtcatgcagcgggattgatccatgcgtcgtccattggcgccctgccctcggctagctgcggctgtgctggaaagagatctggtggccgaggaggaggagaaggcgaggacgaggacgagggacagaaaagcagcaaaaggctcttgtggttggcatgcctacaaccaacgtcccaaccaggagcctgaaaaataatccccgggcataaagccatgtgacaggcgacagcgatgccatctgatccgttccgttcggttccccccagcaaaccgtggtgaaaatcacgcggcccccgctctgccatctacccctgca

SEQ ID NO: 2571 - DNA, 405 bp, Zea mays
ttcttctcggaggatcacgcctccagcctcaacttcagctggtgcgcgagtggcgcccaggactgggagtgagcgaggtttttggtctctgcacggttactgtaaaaccaatgttacggctgcattgtatttgtacattgggctcgtttccacaacaaggcgcctgcactagctagtagctagtggacaacgcggcaaagcgagcggacatccatcgcacggcgggaaaagaggattagttatgtccaaacgggctacaagggatggctaagcagagcctcatcagacacgtcggtcttgcagtaccgcgccaatgtgatcaggttgagattcagccacgacaccacggagttgtcgagcccgacacactatgtcctctaaacaactttttttctaaacagcctt

SEQ ID NO: 2572 - DNA, 983 bp, Zea mays
aattgccaagataacaaagtcacaacaatgtaagttcagcccattcatctcaactttctacactttgaactgaattactgccaaaaaggtagaaaattcacattatgccattatggtcattgaacagaaggaaatcttcaattctaacagttgagttgactatgtccaaagtgattaaaccccaccatttgtaaaggagaagagatttcgtttgaattgaatagtttcatgctctattttttcctagtttgcctactattataagcttgtgatgctgtgtacttgactacttgtgttcacaaaactatttgcttagtttctcattatgagtttgcagaattttgagctcgtcagggttaacaggatccttatcacccagcattgcaaagctaacaactttacagcagctgtaagttccccatgtattcttttgagtgcccaacatttggtgcccctgaaaatatgtccaatagtacaaaacattatgtccccatactagatgaataaatttgctgcttgctacataactatggtttcaggatactggataacaacaacattactggagggattcctccggagtttggaaacctatcaggtttgacaattctaaaccttggaagaaataatttaaatgggtcaataccggactcccttggacaactttctaaactccaaaatctgtaagtcagccattactcatattatcatgactgataaaataaatctgagtgggtgatgactgataacttgtacagggatctaagccataattatttgaccggaaatatcccaagctctttctcaaatcttctgtcattgagtgatatgtaagttttttaccccatggcgacaagatgtaaaattaaaacctgtcaaattttaccgatgtcatacttgctagtgccattatatttagttcattcaagggagtgaatagtcgttcaacaatcatgtagcataactcaatttattttgcagta

SEQ ID NO: 2573 - DNA, 801 bp, Zea mays
gctgctcataagtgacgctgctattgttgtctgaactagtatcatcaacagacagcttactccacctcttccaagaaatccttgatctctgctgggcttaaaactctgtattttgtatggaaaaactgttagttctcagcaaaccatttgaatgtagcaaggactttgtaatatcgcatagctccaggtttgcaaaaacaacaaataaacacaaacatttcccctacagctagagaggcacaagttgttagcaaaccctaaagaaacagattcttcgtatagtcagggagcaatgagcgatgcagtaattttgaaccatataaatatggcagtaagattgagtctctgtaacttacttgaactcacgatcagctcgaataattccgatttcaatgttgttggaggaaatttgcccctcatatctgcaagtccaagatccggaaccaattattaactatttaggatatttctaaactaagcaagtacaacagggatgcgagcgatacccttctttcaaagtcaaaattgcagtgtggatggcatcatcaagctccatatcttctgtgtatctacaatgaaaccatacaaatataacatgtgaaatcagagggaaaggatgaacaattatagcacacatgctgcttacattaatcactgatgaggtagataaaatcaactggaatttatttacaatcggatgaaagaatattatcagcagtactgtgtcacaactcaaaacagtgtctagatcaagtgcacaacattaatacattgaggctgtacctcttttcaagaaacgtc

SEQ ID NO: 2574 - DNA, 348 bp, Zea mays
acgtctgtatcttaaaatgtaaaatacaggtgccccctctgttctggttctttttttttagatcaatacctgtgagacaagaaagcatttgtgttcgagttttggcatagattaactctactgataccaataagtaatttatatgtgggcatttagtggcaaagtttgagtgaaaaccccaaaaggattccaaagtgaatctagtctgcatatttttcacactggaggaatgatatgtaagaaaatattgaatacagtgatattaaagtcttaaccaaactatcaatgtgttcgacatgtcatagtcatactcatgatttgttttactttttaatatgaccatggatg

SEQ ID NO: 2575 - DNA, 360 bp, Zea mays
ccccgccccgctcctgctgccgctgctgctgctgctacacggagatcacatgcatacatatatacacgtcccgtctcagttgatattaattacctttgcattgttgttgttcgttattgatgttgttattagctgttgctcccaagaaagaagacgctggcagggcagccaacacactgtatgtatgtagtgtgttgcgctggccacggtttcagtacgtgtactctcgatcaagtgtagaccgacctcggtcgtacgtgtcgcctcattcgttttggatcaattctttgtgattcttataagtcagcaatacaatacacgcagtataatgaatgagtgtaatgtaccaacaatgctgcg

SEQ ID NO: 2576 - DNA, 360 bp, Zea mays
  misc_feature (352)..(352): n is a, c, g, or t
tgaccgtattgtaccaagacatattgaatagagtaaataataacatcagttagccaaatcaaaaaaatattatacggagggcggagacaattaataaaaaatattaaaatctttttgtaggataatttatatagatattgttgtaagccgtcgtaacgcacgggcaaccgactagtatatatatatcgacgagtgtttgttaccgtgtaatcctagtaaatattcttcactagctaggcgatatcgacccaagcagagagcgtcacggcgtggccgtggcctcttcagtcctcggtgtttcaaactaacgatgacaaataaaaaaaagaacggaaagattacatgcacatangatgggca

SEQ ID NO: 2577 - DNA, 327 bp, Zea mays
tagcatctgtcgtcattgctttcctggtggttctgtcaaactggggccttgacattggtggtgccatcaccagagtattagttggtacaaggcctcttctatttctcattataaccaacatcaccattgtcttcacattgttgatggagaacaaagaccccaatgtgaaaagcagacccgttggcgtcaatctgggttctactgatagcttagggcagatgctagagatcgggttgctgctacagaaagccctaggtgctctgctgattgactgcagcgtttgcgctgttattatgatatgttttcttggattctgagggagcctag

SEQ ID NO: 2578 - DNA, 587 bp, Zea mays
ccatctcctccctgcatgaacctctggtatctgctggactcagagaagggcctctgggtcaggcagtacagcattcaggttgaagaatgggactgcagcctctcgtgcttcactccattgatcgtgctagacgatgggaggatcgtcatacatgtcgaagggtcggagatgttggagatctatgaccccaaaaccaacaagttgtccagcgtcgccgacacgggtctcagcagcgcagttagtgtgtacacaggaaccttgctcagcttagagtggtgaggctagtatctatctagctagctagcttgtgggaactgtcatttagggggtgtttggttttgtggactaaagtttagcccgggtcacatcaagcgtttgactttcaagtaggagtatgaaatataaacccaaccaactgtactaaattcgtctcactttttaatcttcggctgagaaattagttttataatccgactacatttaataccccgaacggaggttcaaacattcgatgtgataggggctaaattttagcaggggcaaaccaaacaccccccttaatttacctgttccgtctggtttatgtg

SEQ ID NO: 2579 - DNA, 318 bp, Zea mays
  misc_feature (289)..(292): n is a, c, g, or t
ggcagaaaatctgaaagagcagttaaagattgacgagtaaacatgattgacgaaacttacatctatttaaaaatagggacatccacatgactcaactccaagcataggaacctccacccttgctttagaaccatcaactaagcaaaaaagattttgaaatatgccaattgatatgacagtaatgacatttcagaaccatcaactaaacaaacatggtaaaatataaaaaagcttaatccatgatactgcacacgaagacaaaaaaacttaatcacgaagaatagacacnnnnactgaagttcaaacagtaataattta

SEQ ID NO: 2580 - DNA, 385 bp, Zea mays
tttgaaagacttctatcctctttatttcgatcacctcttggggcgcattccaatcttcttccagcgatagactggattttttcatctttttctcgtcttgtagttgtagcagttgcagttatagtaaaaaaataacaagattgcacaaccatcttgtcattggaaattgttcgttcataagaacaaccctcctctaacgaataagaaagaacccttttctatcgagttcaccacctgataacttaaaagttacacttacttgttcgacactggatttctatcccggaacatcagctctcacaatcccgtatccgtctaacaaaacaaaaccaaaagtttgagggtaggcacatgcattcccttctaaatctctcaagataggatg

SEQ ID NO: 2581 - DNA, 399 bp, Zea mays
  misc_feature (390)..(390): n is a, c, g, or t
gctgccgcagcttgaagggcagcaagccagaggcaaccacaatatgcacttactccttgaactgtccaagcatcgtaagtttgatcaggaaatccatcattttcaatcataccatcaccatcatgatcgaattgttccatgtattccatagcagtacagactgcaggccagacatccttgccaaatgacttgtcacctgttgcagcaaaatccctgtaaatctgaagcacgaacttgggattaagatctttccatctacttgtgtcatgtatgttgtaagcattcaattcatgccaaggatcatgtgctccaagatcatgggcgacagcaccgattactttacgaataccccaggtaccatcagcaagaaatctgactcttctgttatcntcccgcaaa

SEQ ID NO: 2582 - DNA, 361 bp, Zea mays
  misc_feature (13)..(16): n is a, c, g, or t
  misc_feature (326)..(331): n is a, c, g, or t
tgagcatagggcnnnngttttaagtatacccattccccaactgcaaaggaacgctcagaatgatgttgatatgcttgtttcttcattttagcctgagccctcaaaaggtgttggtgcaccagctcctgcatcacagagcgttcctgcaaccaatcagctagctgggacggcattgtgtggttgacagagagaccaaaggtacggggttggcggccataaagaacctcaaatggtgcacgccccagtgcagagtggaggctggtgttgtaccagtactcgcccacaggcaaccactctttccatttcgttgggcagacatttgcgannnnnngcagatatgtttccaagcattgattgactt

SEQ ID NO: 2583 - DNA, 359 bp, Zea mays
ctgatgagctagccaacacacagcagcgcgagttggagttcgttcttccggtgctgctggtctaggccgttgttctttgtcttcttctccagtggcttgcattttgcaaaagatttctcgacctcccccacacggccacacccacacccccaccttcttttctctgtttcattcacttgaatcatcactgtgcgcgtgcgtgagtactggtttaatcgtcgttgctattttatttagctttcatcaacccattggcagcaggcagagtttatgttagttttgcttggtttgttatgctcctcccgaggtacgacatgatgcaaacttgcaagaacagtttgagattccctaccaatgca

SEQ ID NO: 2584 - DNA, 359 bp, Zea mays
  misc_feature (134)..(135): n is a, c, g, or t
  misc_feature (144)..(148): n is a, c, g, or t
  misc_feature (222)..(223): n is a, c, g, or t
  misc_feature (226)..(227): n is a, c, g, or t
  misc_feature (232)..(232): n is a, c, g, or t
  misc_feature (296)..(298): n is a, c, g, or t
ctgatgagctagccaacacacagcagcgcgagttggagttcgttcttccggtgctgctggtctaggccgttgttctttgtcttcttctccagtggcttgcattttgcaaaagatttctcgacctcccccacacnnccacacccnnnnncccaccttcttttctctgtttcattcacttgaatcatcactgtgcgcgtgcgtgagtactggtttaatcgtcgnngcnnttttntttagctttcatcaacccattggcagcaggcagagtttatgttagttttgcttggtttgttatnnncctcccgaggtacgacatgatgcaaacttgcaagaacagtttgagattccctaccaatgca

SEQ ID NO: 2585 - DNA, 372 bp, Zea mays
gcctgctgtatgattttgcacatactgttgaaattcttgattttcttgatactctgcacactgtactgtaagtacattactttcatgtgaggcttgctcctttatcaatttgatggttgggcaatcggcctttaagaacatggacccatccttgaaagttcaggattcaaacatttggcttcaataatataactgagcattgtacattgttggaatatatttctctctcccaatttatgcctgtttatccatgtaaatggccaccttcgatttaacttctaaaataaactatggttgtctagtactttgtgaatacccgccagccgaaaattttagtacttcatgaaaagtattgcggtcttgcggagttat

SEQ ID NO: 2586 - DNA, 226 bp, Zea mays
ggcttgttgaagttcttgtacccctgggcaacaatggcgcacgccatggatgagaagcaagcatcaagcagcagcgagcagcaatagacggatggtgatggagatggagactcgggacacggaccacgccggagacgtcaaggatggtggtgctctggtcgacgtgcttcttggcggagatggagcaggcggggaacttgacggcgaaggcgcgctcgaactccct

SEQ ID NO: 2587 - DNA, 173 bp, Zea mays
cgtcgatctggagactggttgcttttgggtcagcggttgtattctttcgtacgtgtgggggggtgagacggtgaggacgcctgaactctgttccttggtgactggagccagagcctaccatgaacgtccttgaccttgggaaactctgaattacatcgaatcatgcatgcctc

SEQ ID NO: 2588 - DNA, 423 bp, Zea mays
cgagagcaatgtgccatttcaaacgagcggcttgggtatggcagcctccttgtgcccagcacaccaagggttgccgagatccctctctcgagggcaagctggatttgattttcatgcacgtcgctgggagcaagagacgtcacaagtacatcatgtgaaagaaggtaagcgccgaagctggcaaccccacagccaacatcaagcacattcctgatgttccctccattgttgagcgtaccatttggaaaattcagcatctaccacgacaggtgaaaaacgttggtcacgtcagcctacgatagcaaccatgaaccatgtgcaagagattagcctcgggggtatctcaaacctgcgcaaggtgcacaatatacttgccagcgccagtgtggaagtgggtgccaccgccagggaagttgatcttat

SEQ ID NO: 2589 - DNA, 374 bp, Zea mays
cgtgagcatggagagcacgattccgacaagaatgcttcccccgacgaccttcctccttccatcagatgaagctgacggcacacttccctgccctgggtcatggccacagggaggcagagggatgccgcagaggccagaattgttggcataccgggactgcggaaacgtggtgagctgcccagtcgaaggaatcggaccagacaggttgttgctggatacgtccaagtcagcaaggaaagtgagaccaccgaggcccggggggatgccaccggtgagatggttgtttgagaggtcaagcgcgccgactagcttgagccctgagaactcatacggtatcgtgccgttgaggtcgttgtgccccaggttgaggactt

SEQ ID NO: 2590 - DNA, 376 bp, Zea mays
  misc_feature (286)..(289): n is a, c, g, or t
  misc_feature (296)..(315): n is a, c, g, or t
  misc_feature (327)..(352): n is a, c, g, or t
  misc_feature (365)..(368): n is a, c, g, or t
tattgcacaacatgatagtagaagacgaaggtccattgtctttgaacacaacctttgaaaacatcggagtgctggcagacacaactcaaggttcaatggaagagcgcaacgacttcgtcaatcaaaggtacaaccaactgaaagaccgcaacaaatatactcagcttcaggtagatctgatacaccatcactgggcgcgacatggatccggagttgcataggaagcaatgaaacaagttgtgtcatggctgttcttatctactgtcgaactgtctttgtttacttnnnnttgttcnnnnnnnnnnnnnnnnnnnntgtctgttcttnnnnnnnnnnnnnnnnnnnnnnnnnngtgtctaagtgtnnnngtgtctca

SEQ ID NO: 2591 - DNA, 354 bp, Zea mays
atcattgggtgtggtggttatggtctagtctacaaggctgaactacctgatggctgcaagcttgctatcaagaagctcaatgatgaaatgtgcttgatggaaagggagttcactgcagaggttgaagcactgtccatggcacagcacgaccatcttgtgccactgtgggggtactgcatccaggggaactcgaggttcctcatatactcctacatggagaatggcagcctggatgattggcttcacaacagggatgatgatgccagcacatttcttgactggccgacgaggctaaggattgcgcaaggagcaagccgtggcctttcttatatccataatgactgcaaacctcac

SEQ ID NO: 2592 - DNA, 356 bp, Zea mays
ttgatgcatttacaacaacgtgataaatatgttcattgcctatctgaactcttcatatgctagtaccctattaagcaattaatgtcaagtgtctgcctaatgggccttgaaaggcttgtatttcagttcatggaataaaatgtgaaaacaatatgcccagatgttcccaggagcttatctgtactatcaacattataaaaccaagtgaaagatctagactctccatattatgcttatttttcgtttcacttcatagtgtatacaaaatcaaataaagaacatgcttagtaggctagccgcacctcactcaacaattctgcatcaagcatccacacaggtcagctaaaggcaatttc

SEQ ID NO: 2593 - DNA, 701 bp, Zea mays
  misc_feature (662)..(664): n is a, c, g, or t
gctgacacttaaaaaaagagtaagatggaaaggaaatgtatcaattgagagcagattgtattttattaagtatattatgtcactataacctatttcaacttgttgagagcctagcagcaattcttgtggtcggtttatatttttgccacactactaggcttcctgattagtccccccttcaaccaatatatgtcactggatgtagttaagcaaaatgtcacgcagagcatctattatctgaatggcataagtcagctgctgaaatgtattgtagcattgaattcaattgtgtgatcctacgtgtgtagagtgtagactgctttcaaaacacaacccttggtcgaacaagtataactgccccttcaacattttgggtcaactgcagtgctgatctgtttatcctgcaggtcattcctttgcggaggatcaactgggtttttcgtgtacggctactgcctgtactactactatgcgcgatccgacatgtctggcttcatgcagacatctttcttctttggctacatggcctgcatctgctatgcattcttcttgatgctcgggatggtgggcttccgcgccgccctgttctttgtccgccacatatacaaatcaatcaagtgtgaatgagctgttgctggggagacgaagagcagcagagttgnnnccgtttttggtgccccaccgagaggtcccagatatag

SEQ ID NO: 2594 - DNA, 364 bp, Zea mays
tgttctgtgatgcgagcaatcaaactttttagtaatgtctgtgttcaaatatctatttgtaacataaaattgatgatgtagatttatcagggaccacatcttcatggtattattagacatgggttttataaactttattataatagaaattagtggtcaaagtggcattgtggagacagttgacgacttgacgtcgtgatgatgttcttttgtgagcactgagcagatggcatgtcacgtcaaaaatagtgtggagaccactacaaaggctttatgtgttggtagctggtgtctttgggataatgggttggggaatttggaagcaacattcttatacacattactggatccttgtcagttgtgg

SEQ ID NO: 2595 - DNA, 260 bp, Zea mays
cacctctcctttcctatggccgctgccgccgttcgccgcctactgcgtggggcctcgtccacctccgtatccaacaccagccgtctcctctcctccaccacctcgccgccaacccaccagagccccaacaccaactcaccggttgccttcgactagtccaacgacgacgttgacggctcctcacatctacccccgtccactgaaaagaaggatgagctacctcccccctactacgaccccttcagcaagaagcccgccat

SEQ ID NO: 2596 - DNA, 279 bp, Zea mays
  misc_feature (86)..(89): n is a, c, g, or t
  misc_feature (181)..(181): n is a, c, g, or t
  misc_feature (243)..(251): n is a, c, g, or t
ttcttacccaccaggggatactcaggccgagaacaatccacctcaaggattcgaccggccatacaactgggcttctcaatcacgtnnnnagagcccaggtgcggcgactccacttcgccaagaatctgaccacagtattcaggacaagcagcaattgatggctaatgcaccttttatgttnccgccgattcctcctcaccagggaaactttatgatgcctatgaatatgaatcagcctttgannnnnnnnncaccattcaattatcctctccagcaaga

SEQ ID NO: 2597 - DNA, 351 bp, Zea mays
ttgctctcgcgggccaggcgggacccaaggcaacaaatttggccagcttcatgtgtgaatctaaagctttttactgtaaagggacaagctacaatgaataccttagtgattgggtgcaaggttgggtatgctcctgtggcgtcctcagttgatgccaattcaggaagtcttaaaagtttcacaggcttccataaaaagaaaagccatgggcattcatcttaccaactacgagtggtccatgctgtagatactcatgacagtcgcactgttcagctgttcatctacaggtagcaagtagtctagatgtgtttatagctgcttttattcagccaattggcctcttacataagc

SEQ ID NO: 2598 - DNA, 408 bp, Zea mays
tctaggcatgggcatatgaactgtgggttggttattctttctatgcaacatcaacggttgtggaactttctatctcttgttctctctggctctgccacccttttagctacaccttgtcgggtagtggtattgccatgatatagatttgttgcagttgctagtagattaatgggatgcttgttgcttggttgacgaatgggttagtacatcatatttccactcctaacttttttgtttgatttgtggaatggaatggattgatccaccaccacatcattccttataagctattagtataaccgcatgccactaaaattcatgggatgaacacatgatggaccacctcgcctgtgtccggtgtccccctccccccgactttagtgtccataggaatttgtggcatccctt

SEQ ID NO: 2599 - DNA, 220 bp, Zea mays
acgacctgacagctcttccctggtacgacaatagggtttggagattttttgccgtgagatactaagatgggctatatcactccattggatctcataggacacaatcacacaacaatgtattaggctaggtgggtatgggaagtagcaaggagagctggagatattttggtctaagttaacagaaattccttcacttatttgatttgtttcttatttccta

SEQ ID NO: 2600 - DNA, 324 bp, Zea mays
  misc_feature (313)..(314): n is a, c, g, or t
tctgactgttcagggaatggtcaagaaaggtctgaattcactgatctctttgggggcctggatgatctggaaccaccgtaacagatgcgtttttgatggacaaactccctgtctcccctctatccttcggcaggctgatgatgagagaagactgtgggcattagctggggccaagggcctctcttttttggcagcttccttaacaaatggctgattcctgctgtttctattttagtagtagttttttgagtctggctttattggactctttcacttataggaggtgctggcctccgcaaggagcttattgttnntaacctggtc

SEQ ID NO: 2601 - DNA, 350 bp, Zea mays
cttcttcgttggcagcggtttttgcttgtgccgccgccgattctgcctccacgttgcctttggtaggctttgagccgatgttttcttgggccccatcagccccggcggtggcaaggacacacaagccattgtttcctccggcagcagcgagtgtgatcttgcgcttgtgcttcttcccagacaggtgagaccgcatgacgatctcagatggtgcctttgcattgcagctcaggcagacgaggaagccatccacccgccgcagagggtgcaacacactgtctacttccatggccagtgagtcagaatcacagacattgttgacctgagccccagcagaagttgcactgcct

SEQ ID NO: 2602 - DNA, 355 bp, Zea mays
cctagtctaccacttcgactgggagctagcggaaggggaggatagcaatagcaatattgatatgactgaggtgttcggattgacagcgcgtcgaaagcacaagctccttctcgtcccaagatcagcatcaagtgcacctgtcgctgtagaccagagcacagggagaggagctcatatgtaaacctagctagctagccccttcgctgcaaacttgtatgacagctgtgtcagtagccgccggaattaagcttattttcggcggctaaactctggccgccgaaaataatcttggccgccgaaaatgatgtacaatgttgttgtgcgtgtctccaatctccacgagtttcctctctct

SEQ ID NO: 2603 - DNA, 362 bp, Zea mays
  misc_feature (353)..(357): n is a, c, g, or t
tatgcatcgctcattgatgggtacgttgctgttggcagggttggggatgggtgtaggttgttgaacgagttggttgatgctggctaccgtgctgacctggggatatataacacacttattattgggctgtgtggcataggtagggaggataaggctcataagttatttcagattgttcttcaggaggaccttatgccaagttctgatactgtttcaccgttgctagcttgttatgccgaaaagggtgaaatggttacattttttgggttggttaacaaactggcagagatgggcttgtctgttgttgaaatgttagtagattttatgaagctctttgcaggaaaggatggtannnnnttgaa

SEQ ID NO: 2604 - DNA, 403 bp, Zea mays
aatttacatgtaattactgtaaaggctagctttttctttcctttttattgaacacagaccaaacaaataggagaattgtttggtcctttccatgaaaatttgcacagatctcaaagaaacaaaattttaattaataattgtattaattatatttctcttgtgtctcatctaggctggcatgcctgcgtccagcccatgcccgtagctagctgaagttcctgatccactttcatgaacttagcggctgctagacgaaaaaattgatcaaattagctaaataggctctgtaattgatcgaattaacctattagtttatctaggcaagcaaacaattcaaccatgtttgattcatgtgaacgataaaagtgacagctgcaaaggataccaacaaggttccaaaaaa

SEQ ID NO: 2605 - DNA, 339 bp, Zea mays
ccaccagcgcggacgtggagcatcccgtcgctgccgttggatgtcagcatcgtcagcaggttctgcgagcactcaacgtcgattgatgagctcatggccgtggcgacgccaggatggctggggaatagggttggcacgggctggtcggcgctcatcagctgtgggagctgcatggaagggtcgaaagaagggaagtcatattgcatgaggtgagggttgttcttgtggtctgttgttggcagggagctagtgccagcagggacgacaggaaccgtgaaaggctggagctcttcgtcgtccagtgccaccatctcagccacgtcatggcctctctgctca

SEQ ID NO: 2606 - DNA, 373 bp, Zea mays
ctgtccaagaccccagttttgttgcggcgatgttgccgcgcagggggcggagtcgtgcacggcatcttctcctgccaaactgcacgcatccgtcctaatcctaattcgaagcagcctcaacctcgaaattccatggccatcaagcatggccaaaggtccaagcctcgttggcttccgctgctcctctcttcatctcatccctcgccgccgttgtcttcttcgacgagttaaggctgtccttcgtgacatgtgcttcttatctatttagtgtggtgtcgtttgtaatatgtcctgttgaacagccttttgttttatggactggccaatagcctttgttgttgaattattgtgcttccggtgttcttcactttgc

SEQ ID NO: 2607 - DNA, 300 bp, Zea mays
gggagctacggggtcgtctgttcggctattgaccaacatacgggcgagaaggtagccatcaagaagatacagaacatcttcgagcacctgtcggacgctgccaggatcctccgcgagatcaagcttctccggctgctgaggcaccccgatatcgtcgagatcaaacacgttatgctgcctccgtcgaggagggactatagagatatttacgttgtgtttgagctgatggataccgatcttcaccaagttattaaggctaacgatgacttgacgaaggaacaccaccagttctttctctat

SEQ ID NO: 2608 - DNA, 385 bp, Zea mays
cgatggcgttggtgacaatctctcccccttttatatgttcagatggtttgtctttcgcacccgaaaatagatctaagccaggagaaatgtcagactgtgaagcagagatggtcacatgctcaaacaatttttttggtaatgccgagcaatctgctaaacttgccagcagtgatgacaggccagaggctttcacaatgactgagagcactacaaactgtgggggtgaacaattgacagatgccaaagaacctgtggccagtacagcaaaagaacagttatcgaaagacatcgagactatgccagataaaaagaagggtgagggggctctattctatgaacctcctcgattccctggtttggatgtcccgtttatcagttgcgatct

SEQ ID NO: 2609 - DNA, 360 bp, Zea mays
gtggcatctcaagctgatagctttaatttatggctctcttttctttatgcacattccatatgctagaggttctgacctaaacaccgataagcaggcccttcttgcatttgctgcatcactgcctcatggcagaaaggtcaactggacctccacaacccaagtctgcacgtcctgggttggcattacatgcacaccggacatgaagcgtgtgcgtgaagtcaggttacctgcaatagggctctttggtcctatcccatcaggcacacttagcaagctcgatgccttggaggtgttgagccttaggtcaaaccgtcttactattaatctccctcctgatgtaccatctattccctcacttcg

SEQ ID NO: 2610 - DNA, 352 bp, Zea mays
gcttacgacgctacctctcttcgatgataaggttttgtggagaataattgatggtaggcttggtttcttgcagcagttggactgaatcagttgtgctggcacttagctcaaatcagatttgttcatttgcagaaactaacctggcatactaccaaagatgttttggattgtcaaatatcagttgtagttattcatgagtgggcgactcaattcaggtccagaaaccaccttttagatctactccatgtccaatgctcagttgggttgatctgatcgaggaccagcaactgcctttagatcaactccatgttactcagtaggttatagtacaaaagcttactacaatcacctc

SEQ ID NO: 2611 - DNA, 371 bp, Zea mays
actagctgtatctctgcgacgtgccggtgctcgcacgcaactacggactagcatgtattattcggtcgtcgtcgtcggtgttaagacgcagacgcagggagctgtacgtacatacagctgtctgtcatgtcatgtgctgttcaaggcaaatcctgctagtaccagtagttggttaacatgtacaactctcattttcacgtagccggacttacttagtatttgttttctcgttttctttaaatgcaaattcgtacataaaatttgcagcaattgctcattgagattgattgcaggccgggcacgcggtcgtgcccaagttcggctcgtgggacgccgagaacatcggctacaccgtcttcttcgagaaggtg

SEQ ID NO: 2612 - DNA, 396 bp, Zea mays
ggcttcttcaccgacgcctacgacctcttctgcatctccaccgtgtccaagctgctcggccgcatctactacccggacgacaacctgtacatagacaagcccaagcccggcactctgcccgtgtccgtcaacaacatggtgacaggcgtcgcgctcgtcggcacgctcatgggccagctcgtcttcggctacttcggcgacaagctcgggcggaagcgcgtgtacggcatcacgctcgtgctcatggcagcctgcgccatcggctcgggcctctcgttcggcagctcggcgcacgccgtcatcggcacgctctgcttcttccgcttctggctcggcttcggcatcggcggggactacccgctgtccgcgaccatcatgtccgagtactccaacaaa

SEQ ID NO: 2613 - DNA, 360 bp, Zea mays
agcatccggtacgtcttgtgttgctgctgtgtttggaagtgggattgcacacgctgaggatgaagttccaagcggaggtgattcacaagagccgtttgccgaatacgatggtaccagcaatgaatgtgatgtacatcattggcagaaattctagcttggctgcatcagcatggtaaatagggttttgaggattcgggggtttgatgtcctgtacgcagcagcagccttaaaagtttctgtgcccagccagcatctctatttggtttgcaaatgtaattactagtttgtactgtcttgtttttggcaaacttgctgcgagcctcgtgcttagtttggtttatttatttatgaactttaggc

SEQ ID NO: 2614 - DNA, 334 bp, Zea mays
gcagacccaggccgcagaacagttcaaggcccctgacttgagccagatcacgagtccagagacttctggcccgggccaggaagacaatgacgaggaggtcgacgaaactggtgttgaggccaaggacatcgagctggtgatgacccaggcatctgtttcgaggcccaaggctgtcagggccctcaaggcttctaatggggacattgtcactgccattatggatctgacaacttaaaaccattttttctctctccctttggagtgccatgctatgcagcttgagtgttatctgtggaccatatggttagagatgttagcatgatggcttcttctg

SEQ ID NO: 2615 - DNA, 787 bp, Zea mays
ttagctagacttgaccggaaacacatgtacggcgcagctgattggctgtccttgtccttgcttaataatacaagtactagctagctggctagtgagtactactagtgaagatcagaaactgagcaagactgctggaacttttggcgcgtgcatcaggttctggagatccgtccgagcatcatgtgggacaagggcaaggccttggagtttctgctcgaatcgctcggtacgtgcgttacgacaaaacaaagcccaccccccgccccgccccgcccttgtctatttcggccgtgtcgtccacagttgctgctctcgtttcgcctgcagtttttattcagtacctacctgcgcgcgtatcacacctcctgtccaaacaaaatcgctgctggctgatgctgatgacacgcacacgccgcctatttatttatttttttcccgctgctgtcgccctccaggattcgccagctgcagcgacgccctcccggtgtacatcggtgacgaccgcaccgacgaggacgccttcaaggtgctgaggaagaggggccaaggcgtcgggatcctcgtgtccaagtgccccaaggagacgaacgcctcctactcgctgcaggaccccggcgaggtcatggacttcttgctccgcctggtggagtggaagcggaaatcctcgacgacgacgacgactcggccgccggtgtagctcttgttcttggtcgactagtcaatcgatggaccgatcgatcgatcgaatgggcgtccaatcatgcgcgaaaacataccccaccactgc

SEQ ID NO: 2616 - DNA, 590 bp, Zea mays
ggtccgctatagatgaagcacattacatgaataaggtatgtagttggattttctgttccatttcttttccaaactgtaagatattgggttttgagcacggttatgcttttcatttctaggttggagctttgtcaaaggtaaaccataagaatcttttgaaccttgtgggttattgtgaagacgaaaaaccattcattcggatgatggtgttcgagtatgcttcaaatggatcactatttgagcgcttgcatggtgagttttaattgtgggttgcctttcttttcaggggtatgttgtggggtactgcaaagctgcaaaagccttgttatctgttattagcagtcttcacacaagggctcatgatgttagcagttgtgacaggaaaattcatataagcaggtttacaaattctaattatcatcaaaaacattgttgttgcagttaaagaagcggagcatctgaattggcagtcacgcctacggatagctatgggagtactgtactgcctgcagtatatgcaccagcagaacactcctgtaaccctaaagaatctaaacagttcatacatatacttgactgaggacgatgcc

SEQ ID NO: 2617 - DNA, 1230 bp, Zea mays
cttcttttgttcctttccttgtacaagtggaagagaattcatagaggtacatgttccgcgtattttttatatccattcagttatttactttttaaaaatacaagtttagttttcagcttaagtaaacatgatttggcagtaatatacaagttacaatgtccctgggcgtgctatgctcttgcaaaatattactgctgctaaattgtttcatagtaccaaattcatatgataaatgattagtattttttatcagatttgatgtagtaacatatagcactattttagaattgtattctttctagaacggatggggtacagtttgaacatcctttgatgtagcctctgtttgacaaagtacaaaattgatggaacttctaattcaattatttgttctttttgtctgttaggaagcgcttattcagcattatgattgatattccttatttctttagagcattcgcggacaggaaacatgaaagaaataggtctgggtactgctaacatgttttatggaccaagatgctggcatgcactcttttggtcattccggaggtactgctaacatatttacatgacactgcctaccagtatatttgaactatcggctacatgttgtagttttgtataaatgtttgtcctttaactaaaactcagaagtaaagatcgatgcatctagctgtgttctgcattctcgaatgactttggagctaaacgcagaaggaagatactgaactacagagtattccccctttgatagcttcttgttctcgcttgagacagccctaccagctctacacacataactttgtggctgttattatattgaacatgctccttacacaatcgagtttagaggagcggatggttaggaagaaatagataactgatatcattttggactactttatgtagtcactccagggcgcccaaaaggcgtcggatgttgtagtcattgcataatatttgttttagctatccataatatttgtttctcgttatcattggtctatgttagttattttggttgtgttgatgagcttctgagagttggtacataaagtaatattttgcatgctctgaaatcttaatcagtgctacaaaaatttaattcttgagaactgtactctatcagtgtggaagaatgatctaggagataaatcttttgtcctatataattcaaatgtttatatatgtgtgttgatacaggctaatgtacatattctaaatatt

SEQ ID NO: 2618 - DNA, 356 bp, Zea mays
atcgccctcgaactacatcgagccaacaagttcatggagcgcggttccatggcaacggacctctctaaaccgggtatcataccatcttcgacgtcggcgttcgggcgcacacagatcggaaatcacttcgccgacgggcctgacggcaaccgctttgctgacaaccaccgggatcctgggtttgggagggattctccccaaccccatggcccggtcaagggtaagctacctgagctccagccccatgatttggatactagtgaggatgtcgtacgggatacggaaggaatgggggctcgtgaggagcatcatggtggttggggcaatttgccacgcctgaattttccatcgtttga

SEQ ID NO: 2619 - DNA, 359 bp, Zea mays
ttggacacactgacagctgtcaatcatttcatggctttactgtttaagtgagcactgagcagtattgccaaattcttggatacttggaaagtagcttaactgtttaagtgtaaaatagtcgttgctctggtttagggtttggtgagtttcatatactgcatatatccccatcggggaccatttagtacatggtttttaaagcggtaaggcggtccaaggcgttggagcaccgcctggacgcctaggcaaggtaggcgggcaaggcgcctaggcgttagaccaccgcccggacgcctaggcgacgccttaagaacagagtttagtacacataattatccatcctcctctcatctttattt

SEQ ID NO: 2620 - DNA, 696 bp, Zea mays
  misc_feature (447)..(449): n is a, c, g, or t
  misc_feature (528)..(528): n is a, c, g, or t
  misc_feature (536)..(538): n is a, c, g, or t
  misc_feature (551)..(551): n is a, c, g, or t
  misc_feature (592)..(602): n is a, c, g, or t
  misc_feature (622)..(627): n is a, c, g, or t
  misc_feature (632)..(634): n is a, c, g, or t
  misc_feature (650)..(650): n is a, c, g, or t
  misc_feature (652)..(660): n is a, c, g, or t
  misc_feature (669)..(683): n is a, c, g, or t
  misc_feature (690)..(693): n is a, c, g, or t
ctaatgacaagatccacgataaattgcgggcatctcatccaaaatgcgacatgattacaatgatttacatcactacaaatagaattggcagcaatgtggctactaggtgagtcagccagcacgactgggattttgaagcaaaactgtccgggcttacaggcccggatgctgttccaccgttgctgccgttggcgccagcgctacaaacaggagcagattacaaagtcattacaatgcacaaaataagactagaacctgtatcacggaatggtacactggaattaccttccactgaaaatgcatgaaccatggcctgcaagaaatccacgaaaatttagatcagtctcactttattaacatggtaaaaaaaaagatcttatgtactgaatacccttaattttcagagattaatttaacaacaaaaactgagtttataacaataaactnnnaaagcacaagcataaccacaagacgctgatagctgttgtgaccatagattgtttctcttgtattgtgatttggacagtnatttatgnnngatgtaacagctngagcaatgatcctattttgactaactccggcttatatagtnnnnnnnnnnnatcacgatcaaaatatttcnnnnnnattcnnntgagctcttaattaantnnnnnnnnnaaataaatnnnnnnnnnnnnnnntctgaannnngat

SEQ ID NO: 2621 - DNA, 413 bp, Zea mays
gaccttgttagagcactggtgcatgttcgctgttctgacgtggcaatggaaggagaggaagattctgctgaagaaaagagacagaaggcattggtttccttgttggtaacctgcccatttgaatctctagatgttctgacaaaattgctatattcatctagtgtggatattggtcagcgcattttgattattgatgctatgactgaggcggcacaggagcttgctgaaactaaaactgtgaagatagaacagcgacgtggtaacttgataactgacacttctccttcttggctggttccgagtaatataggacctcctggggcaggcccttggagagaggtatctgaaccaggcacgcttctaagttggtcacaccgttatgaaagagaggttccatctaaatcgggtcaatt

SEQ ID NO: 2622 - DNA, 673 bp, Zea mays
  misc_feature (608)..(610): n is a, c, g, or t
  misc_feature (641)..(643): n is a, c, g, or t
  misc_feature (653)..(653): n is a, c, g, or t
  misc_feature (655)..(658): n is a, c, g, or t
acgtccttccttttgtttcgcccggggcttcggaattatctggatccgctactgcccccagcgttcggactcccgggtcgcaggcagccatgtctcgtcctggctctgggctcgccgcgctatcgtctcggccattcgctccgacgtccgtcttcaatagatttgccctactcgtgaccacgagaatccggcgaggagggagaccgctcgtgcggagtctataatggctgacgggcagcatattcaggttggtgtctggttcccccagctgtgaacctcgtgtttttgataacctcctgattgttctcctagtaaatatgtttaatcatagttgaggttagggtttgagtctttaatcacattttttggggattcaatttaatgagggatttgacctatgttaatttgtttgttttgttattgttgcaagtacatatgcttttatgtttaatcatagttgtggcatgagctatttgtatgcataactataacacttacctcaatgaaattcaaggttcttttctgtctatctaagttaacttgcaatttttttttgtgtttagtcaatttgtaggagagaggacgccatacatcaaagatgactaaannngaggaagatgaagaatacctcgaagaggaannngatgcccttncnnnngcaggggggaacaca

SEQ ID NO: 2623 - DNA, 221 bp, Zea mays
ggcgcgcgctctatttcctcgcgcggcttcctgctcgcctggccgctcgtccaagagctctccatcgcggcgcgcgcttcttccccgctcgctcctctctgcggctcgccctctcttcctccagctcatcctgctcgccatggccaccgcgccttgtttctctttcccctgcgctcagctcaccgagctctccctctccctggttccatgcaagtgcgtcc

SEQ ID NO: 2624 - DNA, 795 bp, Zea mays
gatgccggactccatgggctccactccactgcatgatgcggcagaggaaggtgctgttccaccctttccgcgggggcataaagttattcatctgtccacaaatttcctatgctctgtaggagtaagagccctttgtatgtttagatgatcggagtttgtgctaacattttgcctttctgcggccagggcattgtgcggctgtgaggatgctgctgtccaagggtgtcgatgtggatccacacggctgtcgtgggacgccgctgcacttggcctgctccaatgaccgggatcaggttgttaggatcctgctggaacatggcgcagatgtaagttcttattagtttcactctttctgagtcacaccatcatttatgaatcgaactggcatccatggcccatgggccagggggaacattgtttcatttgattgagcagttgtctattcagtaggttccccaggatttgtggcgctacttgttaaattcatttttccactatgatgattagtcatcaagagttcaaaactgatgtattttactctacagcccaacaaagttgtcggtcatgtcctcccaccactcatgatggcatactgtggcggttctttgagatgcatgaagctactgattgaggtctatttatttcttgacttaacttgatgtgctcataccaactcaattaccctgtttctatttaatatgctgtcatgatcacaagtgacaattctctaggctggtgcggatgtgaacttgattgctccttctggagtaattttggctcaggcagtttgtgatg

SEQ ID NO: 2625 - DNA, 300 bp, Zea mays
tttggtttgtgctgctcaggcttgtgggtggagctggtgacctgaagctgacgaaggatgggaacaccctcttgaaggaaatggtatgacttcatctttcacagaaacattctattgacatcctgatgatttatgtacttggtggtgtttttttttaatttgcagcaaattcagaacccaactgcaatcatgattgcgaggacggctgtggcacaggatgacacaagtggtgatggcacaacctccactgtgctatttatcggggagctaatgaagcagtctgagtggtgcatcgataaa

SEQ ID NO: 2626 - DNA, 381 bp, Zea mays
agactctggctgggtaccttcccaaccgcggaggatgcagctagggcctatgatgaggcagccagagcgatgtatggagacttggcacggactaacttccccggacaggatgcaacaacctctgcccaagctgctctatcatcgacctctgcccaggctgctccaacagctgttgaagctcttcagactggcacgtcatgcgagtcgacaacgacatcaaatcactcggacatcgcatccacctcacacaagcctgagcctgaagcctctgacatctcgagctccctaaaggaaaaatgtccagctggatcatgtggtatccaagagggtacacccagtgtagctgacaaggaggtctttgggccgttggagcctatcaca

SEQ ID NO: 2627 - DNA, 328 bp, Zea mays
tttccgattccttcacgtccacccatcccaagctgcccgcacgtcgtcaccttgctataaaacaagagctgagcccgcttcctccaatcttggactcagctaaacccgacacctttcctcgaggaccttgacgaaaacagccgccttttccttgccgtttcccgtttatataagtcgctgcgccgggttgaattccattgcattgcatcctcctccacttcctgccttgccttgccttgcctgcctgcctgcgtagctcgcacaccacaaccgccgcgttcttcttctctcgtccctaagcaaaagcgccgccgctcctcggttcttt

SEQ ID NO: 2628 - DNA, 346 bp, Zea mays
ccttccgtatccctgcctcgtctcgtccggagatctggtagtaggtagtctttgtctgtaacgctgtgtcggcacctcgaggacgaagatccaggggagcggggtgtttgtgtttcttctccgtccagccatatggtatggatcctagtgggcggcggtgcttcttcttctcttctgtcgtagccaaaactaatcatctgaggccagtgaggaagaagggtttcctcgcaggcaattgagttctgtcgtcgtgtacgtggagtctgattagcagcagtccagtatgcttggttggcgagtcaaactaactttttttaggggggagggcgcaaattatgtagtgacc

SEQ ID NO: 2629 - DNA, 226 bp, Zea mays
ttattattcaaagctaacacacgtaaataagaaaacacagcaaagcgaggggcaaggcatgatgctcgcgaacatgatactccccacgagtccacgacgatcacgcgttggcagtctatccctttttctgggagagcagcacctcgtggatgaccctctcgaggttagtctccgcaggcccacccggcagcgtcaccttcacggccttctccttccactcctctgc

SEQ ID NO: 2630 - DNA, 449 bp, Zea mays
cctggatatagctgctcggcgctacagagttccatggtgagttttgtgacgatggagcatcatccatttgctcattatactttgtattgaacgatatcttgcttgtcagggcgcagactgccattgacatccttgcgaagcgcgcatactcccacgagacgaagatcagcagtggttgctcggctaaggtggtcagtcggcagatccgttggtgtctgtctgatccccgcttctcccccttggcaggcgggcggtagcatgatgatctggttgggttcaacaaggacggcgctcgcctgatccatccattgcctatgcctggcctgggactcccatggtccatggatttcggtgcgtgtgatgaatgcggacgacgccagggtttcttctttgggcttcggcgagcgacacgggcgtgggagctgctgtttttgtgcttggatttccgt

SEQ ID NO: 2631 - DNA, 266 bp, Zea mays
ctcctcccccttctctctcaactcctgctagctctctctcacacacactagccggcggcgctcctcaattttcacacttcctaaccacatcaggcgcacacctacgcggccataccctcctccaccgatcacttctcggcagccggcttctcgtcctgcatcccaggagagatcgagagaatggagctgttcccagcgcacccggacttgcagctgcatatcagccctcccccagccacgaaaccaacggagctagggttctggaa

SEQ ID NO: 2632 - DNA, 480 bp, Zea mays
ctgggctatttgcgaaccttcttgctgagaacttgggttttggtcctgtggctccatttgatgcggccgcatgctttctggcgattggcatggctatcataatgtcctcatggagtgaaaactacggagatccatctgaaagcaaggacctgatggcccagttcaaggttgcagctaaggcaattgcgtcaggtatgcttaacccatctcatcagactgcgcataaccaaatatgcatatgaaacctgtgtttgccttgtaacgctgtccatttgatcttcagatgaaaagattgcattactgggagccatacagtcattgtttgagggctccatgtacacatttgtcttcctatggactccagcattgagtccaaatgaagaagacattcctcatggttttatttttgctacattcatggtgtcatccatgctgggtagctccatcgcgtcacgtctattagcccgaaatctcaaggtt

SEQ ID NO: 2633 - DNA, 382 bp, Zea mays
cgccctgacacctacattggctcggtggagaagcatacccagacgctctgggtctacgaggacggcgccatggtgaaccgctccgtcacctacgtccctggactctacaagatcttcgacgagatcctcgtcaacgccgccgacaacaagcagcgggatcccaagatggacgcgctccgcgtcgagatcgacgtcgacggctgctccatctccgtatacaacaacggcgacgggatacccgtcgaggtccaccaggaggagggcgtctacgtgccagagatgattttcggccacctcctcaccagtagcaactacaacgacaacgagaagaagacaaccggcgggaggaacggatacggcgccaaactcactaacatcttct

SEQ ID NO: 2634 - DNA, 480 bp, Zea mays
  misc_feature (30)..(32): n is a, c, g, or t
  misc_feature (344)..(350): n is a, c, g, or t
  misc_feature (353)..(475): n is a, c, g, or t
ttgagttcaaaactgcacgctcatcaattnnnagtaattctgaaaccaaacacgttgctgcctccatagtaataacgtcctgatactcctgctgaaccaccaactccaagtccatagccacatcattagacttcgtatgatcacattgcttagaagtatcctccatgactgtgtcttctgctgcctcctccgtcggggccaaatcaaaatcatgcttctcggaataatctttgttctcaccttcagtcttatcatccccatcttgatttcccgtaatatcattatcaatccacctcccatctttgagaaacttatcaactttgaaaaaaaatctcataaagccnnnnnnnaannnnnnnnnnnnnnnnnnnnnnnnnnnnnnnnnnnnnnnnnnnnnnnnnnnnnnnnnnnnnnnnnnnnnnnnnnnnnnnnnnnnnnnnnnnnnnnnnnnnnnnnnnnnnnnnnnnnnnnnnnngatct

SEQ ID NO: 2635 - DNA, 348 bp, Zea mays
ggtgcgcgtcgtcgtatgatgacggctcctcgtccgggatgaaggtgaaggcgtacgcggggacggccgaaacgaccgtggacgtcgatttccgcgacgccggcggttccaagcgcgggaagatcgagttcagggccaccgccagccccaccagggtggtgttcgttagcttgggctaccacaccaagtccgacaacagcggcacgctctgcggtcccgtcgtagacgacgtctcgcttgtccccataccgcagccgtatgctcgccgcctgcttctataaggcctaactcatgctgcgtctgttttttctttttattttttgtagaagtacccatgttgcttgggta

SEQ ID NO: 2636 - DNA, 458 bp, Zea mays
cggcggcaatcaagcagcagcgggatgatggagggaccgttccgattcttgccggccgaagtgaaagagatggaggagcgcctgttcccggtcaccaatcgcaggctggatcacatcctcatggatgagctcgctctgaaatttagctgcttccggcgccgtgctggcatggttcccgtcaagccaaagcaggtatgtgcatcgacgatgttccgttccacatatcaatttcaaattccctctcccatgaacctgcggtttcattccgatctggacatgcatgcatccaggtgctcaactggttttataacaaccgtaacaagacttctgccaaggtagcagccagggaagcacatgctccatgggagttttgggccaaccatcagcaagctagagctagaggaggctcatccatcagcaagctgaagccaaagaaggcgactacgcacgcaggatct

SEQ ID NO: 2637 - DNA, 353 bp, Zea mays
tcacccaaggatgtttttgttgttatatccgagaaagaatgaggtttatcagatcacagttgacacaaaagcaagctcctgaccagtgaccacacctaatgaagaacaggcagctgcgccgcagcacacacacacacaccgaccagcgcagagagctatttgattcagatgcgcatttggctgattcagatgcgcatttggcagaaggcaatcgctgagcgcgaaggagtaaaagcatgatcagatattcagatcttggatcagtctagactgacaccttaggtcgccctttacaaatatgacttaaaaaggatgtgaacagagtagtacagcacatgctttggaagtttgga

SEQ ID NO: 2638 - DNA, 440 bp, Zea mays
gtggtaggcattgcctacagtagtttgacaggtttgcaggaagctgctataagggcattggcaggccttgcctgcatggatgctgatcttgtctggcttctccttgcggatgtgtactactcactaaaccaaagggaatctttacttcccaaccaagatctagccctggtatcagatcttttgccccctccagtgtcttcgagagaatacctctttgtacagtatggaggtgagggtgtcaggtgtgatgtagatccctcatctgttcattatgtgttcagaaggatgcagggtgtgtgatcttgtgtgacctgaaaatcaggtagaatccacaactttccatctatatcgacaggtttctctttcacatttcattacttaagaattctacttttttttcaggttcctgatactgtgtatttgtaatcttgctgagtttc

SEQ ID NO: 2639 - DNA, 680 bp, Zea mays
ccggtgctgtcaggtactagaacctgctgatcccacgtctgttagagaaagctagctgttttcgtgcccatgctctatgctcagagccgttgatgcttgccgcaggcgtggcgatcggtgccgggtggcagtccttggtcgcgttcgtcaacgtcgggagctactacctcgttggcctgcccctcgcggccgtgtttggcttcaagctgaagctcgatgcaacggtaagacaagcctggaagatgtgatatgctaatgctgctcatttgatgcccttccttcctcgaaggcaatctgctgatcttgtatgggctgcaggggatttgggtgggcgtgttgatcggaacggtattacagactgtgattctgttcgtaatactcagcagaaccaagtggcagaaagaggtacagtacactctgtctcatcttcttcattttttttgtgtgcgcgctctcgttcttatactctgaaacgatttttatgctactattttcatattattttttctgctcttgttcccgtgttctggaacattctgtgcaggctatgctagcagaagagaggatacgggagtggggaggaaacgtcgagctgccacagactcaagaaacggggccaagtgaaagcactgccacgacagacgcaagaaaggggggccaagtgaaaaacatcgcggcac

SEQ ID NO: 2640 - DNA, 945 bp, Zea mays
  misc_feature (931)..(937): n is a, c, g, or t
gccgaggtggatcggtagcaaaaaccgatactggtacgttgccatggaggcagtttgatttggtggacctaacggccttccggatctcttgggagccagagcgatggcgcgcggcgctcgctttctccttgttctcgcgttgctcgccgcgctactcgccgtcgtcctccagctctaccgccacaggaagccggtctgtcctctgcttctcgctgccttgatgcttctcgaagtttatgagctagatctcgcttattttatctagtctgcggaagcagacaaggcgtttgcaatcagtggcaaccagtcgtcgcttaggcgtgttcatcgactaatagcttatgtggtcatatggagcaaacacataggaatatcgtgtcacattctgcaacttacataagtgagctcccagtgatttgatgcgatgtcttgtgaacagtaaaaatgaactagtagcggttcgtctgatttgtgggctgtggctctagcatgtgactaacattgtgccatttttgacctctgcaactgcaagttcccaataccgtaacacttatgtgttctctactactcgctccgtctcaaattataagacgttttgacatttctaggttcataacttttgctacgcacttagatatatattatgcctagatacatagtaaaagttacttaccaagtcttatttgtgatgcacagaggttgtggatggtggaagagctatctgtgtacaatggaaccaacgaggagttgcccatattactcgcgattttggggtacttatgcatttccttgccttcatatgccaacattttcttcccctctgacttgttttaatagtatgatacttaattaccgtgagaaaagggaagcttgatatgataaataagttaaaactcaaacgcatagcacacctttttaatacagttgatgnnnnnnntaaattcc

SEQ ID NO: 2641 - DNA, 633 bp, Zea mays
gaaacagtgtgcttccgggtagggttggacaaaaaaactcgcagctcgttaactcgctcgactcgactcgatagtggttcgactcgactcgtttataatttgtaacgagttgagcttgtatttcaactcgttatgataacgagccagctcgagctgactcacgagctgactcgcgagccaaacgagttgaattaattagtcaaatcacaataatctcggatccaaaatagttaatcttgtactctactatagttaatcttgttatttgttgagtgtggaatcttaagttgcaaactctattctttttttctaaatatatctctttcttttcttttgctacatatttttatatccgttcgtagacactagacatgatattatcgagctggctcgcgagctaaacgagccagctcaagttggcaaacgagtcgagccaagttggatctttagctcgttaacataacgagtcgagctgagccagctcgttattttaacgagccagctcgtcgagccgagtcgagccagctcgatatccacccctgctttcggggtacgtagttcagtcaacggctttgaaatgacaccgaaattcctcacatattttcggtaataacccggccaatccaagaaagc

SEQ ID NO: 2642 - DNA, 578 bp, Zea mays
agaatggatccacaggcagaaccagtttcaaaaggtattaatcacccccctagagtttatttggaacgcagttgttaatgctaactactcttttgcagttttttttgtgtgtggctgatagcagaaatgttaaaaattaattttgccttttgatttcatctagatgggctatcgggacggaataacacaagggcagaaggactctgcccaggaaggcttcaatgctgggttcaggcaatctgtaaacgctggctacaagtggggccttgttcgcggggttgccaggtgtatatccttccaagaactgatctcttgtattgccattctcctctagtcttgccctccgattttgatttcctttcctatctgtcgtcattccaactccaagtagtgcgctagccagtcttcctggcagtttgaaagaggaactggtgccggacgtccagtgcagagggaaactacaggatctgcacagctccgtgcgagaaatatcagcagatgacgctctccagatgttccacgagagtatccgccagagtaaccctccgtcagaggggtcaggatcatatgtagtagca

SEQ ID NO: 2643 - DNA, 904 bp, Zea mays
cttcatctacttgaactgcagtagaagtcctagtatcattcaggtgacatgaatttcttttcttttttccatgtcagctacactaatttatggaaaaagaaaagggcatgataattccactgcttgagcacaatatactaccagaagatctgcatttgattgcaaaatccagtctgaactcacagaaactcgttggcgagtccattgcgaacgcatgcctggtacctaatggaactaacatttaggtcgcactatcaagaaccaggaaccaaaaactacgttttaagaaaaccatctgtagtttctttttagtcaaagtacagaagctgtccattttttgttttttttaaaccaatcaagcaagagagctgccgattatattaaaaataagaaacccagtgtgagtaatacaacgagacaacaaaacctagggtctagcaacaacacaaccaaggccaccaaaatacccttgcatcacaaatgaaaaacaaaggattcacgagtcctgattctgcttctaaatttatggcagatatggttgagggagaagcagcagaaagtaggaaggctatccgcaggaagcaagataacgagcttgttcactgcaaacgacatggttttctgtggtacagaaactgggttaattaaggtcagtaacaaccaaactaatcttgagaactgactgacaactatgcttccctgagggtaatgtgaaacaaaaaaatttcttgcaaatgtacctacactacaggcatggataccgttgtgaagtgtagaagcaagaaggagcaggtggaaggcttaatcttgtaaatgtaaaggaaagctagagtgtacaggaaacatgaaaaagaggagcataccattgtacaagccctcaggacacaacacagcagccagcgcg

SEQ ID NO: 2644 - DNA, 332 bp, Zea mays
attttagtatcagatccatgttcatctggaactggatgtgtctcatgggctagggtttgtgatttcttttcttctgcaggaacaagctgatcctcattgattggaacctctagtgcccccatcccgtcatttagaacgccctttggagtatgagcctcattattgttctcttgaacaatctcggcgttctgtcctgacacgttttgtgtctggtcaaccttctgctcagaaggaatcttcagatcttcatacacctttacgacatcttccttctttaagctaaaaggaaatttcttgtccctaaattgaagatctatataaccaagttgatg

SEQ ID NO: 2645 - DNA, 324 bp, Zea mays
tgaaactgaaaattcgtatgatggtagatccttgagtactacctttacagttgttttagaagttttcatattatgttttaggaacaaaatgatagtatttgtcatgatagctagtgtgtgatctgctcatctgcattatgtctcatggaaatgtacatcacaaattatagcttattgataaaaattggaaggctggatggatgatacctatgacctaggaaaatattgttttcatctgccacttctcttcaaaaagcaaacgtcggtttactgcttttacttttcaacacagaaacacacatcgctatctgggatagcaacagt

SEQ ID NO: 2646 - DNA, 336 bp, Zea mays
gctgggaaacctgacgttcctggacctatccgagaacaacctcaccggagagatccctccggccgtcggcaatttgttggctctccacagtttaaatttgagcggcaatgccctttttggccgcattccaacgaccattggcaacctccagaacctgcgagttcttgatctctccgggcagaagaacctctctggcaatgtcccggcggagcttttcggcctaccgcagctgcagtacgtgtcgttctcggacaactccttctctggcgatgttcctgaaggtttcagcagtctctggagtctgcgcagtctcaatctctccggcaattctttcac

SEQ ID NO: 2647 - DNA, 983 bp, Zea mays
ggtatctcattttgcatgatagcatttccagattggacttcgaataacgatgccatttatttaagttagtgttttattattcgatattcagaattgagtgtcagcaagcattttaatcaattatagacatcagctcagagattcagtatggcatatgctttaacaatgaaaatgtcaatctggttttccctagttttcacctgggcactagtatcctactactgcaaagaaatataatgtgaattgctaccatgatctttgagggttgtgaatcaagtccattgctatgttacatttataagcttggaaaaatagtacatgcaatgtctcatcaatggaaccctctgtcattctaattattgatcacgtacattactaaattcgcatatgcttagtgtggcactgcatttatttaactgtgaacacagtttccaacaagccatcttaatgcacatatgtaattgatgtgtaatttgggtttccaaaggaagtaaatcactctgctcatgaagatagtgcacggtcctgttctgtgatcagggactatgaaaaactatcaacctgtttgatggacaaagtttacaaacttgaattggagaaggtatattaaaattcttttttccttaaaccgctcaagttctaagcaggtcatctttttttttcaatgttactttgatttgagtgcagaaactattggaggaacagtcccaagaccaacaaaatgagatttataagctgaaggccaatctggaaagctgtgagaaggccatagatgttcgtcactggttaagttcttttcagtcatttaattcttagtttctatcacctaatatataacttcattatctgtgcactaaaatattttacttatactcaggactgtactcttcaacatgaactggagaaggatgccattcttttagagctcctaaacctccagaaggaagtatctatcttgtcatcatcttctttgatgaaagaaa

SEQ ID NO: 2648 - DNA, 368 bp, Zea mays
ggctcggagacgagtacgatgcccatgaggccgcgaccgtggcggcgcttgcgctgcggtgcgtcagcgagggctccgggatgcgcccctccatgacggaggtggttcgcgtgctccaggagaagacgaccgcgctgatctcagccgcggggtgcaggccagccggcaagatggattcttgagctgtattgttacttgttagacgaagactgtaaatactagctttgtttagagagagtataaggtgaagataatggctcttttcttttttactcaaagtggattagtagttgttgaattggattacgttgaaaaattgatgtcagagttcgttgtagatggtctgtagtgtctcgttaatccaatcg

SEQ ID NO: 2649 - DNA, 370 bp, Zea mays
gggctcgcacgcgtacccgactacgcgcgccaggttcttgtgcctcaggcggctcagagtcgcaagctcggtgaggaagcacttgtcggacttggccgggaactgtgccaggttgagccgcttcacggcgaccaccttgccgtcgggctcgacgagcacgcccttgtagaccgtgctcaggttgctgctaccgatgacgttgccttcgtcgaatgaaccggtggcggcatccagctcgctgcaagtgaacttcctcagctccggcacgacgaagtcctccgcgaaactgtttgcaccggtagagcctcccttcttcttcttgtacctccggtatccgagaaagaggatcgtcacaagcaccagtagtaaa

SEQ ID NO: 2650 - DNA, 328 bp, Zea mays
  misc_feature (320)..(320): n is a, c, g, or t
catatagcagtatagaaggcgtgtgtctgcctgtcaatttgttgatctcgctagcgcgtgtggctttggcgcatgcaagcagcaggttagctgattgctatcatccgcatcggatccatgtcgggagctgctggtagggagttcaccggcggcggcggcggcggcagtagcagcagcttctcttctgtgagcaacgcatcacctacggaggtggaggaagagttcctgcggtaccacaccaatccgctcctcggtggccccacgacggagatgcgagacgacggcggcccctcggatcagccgccgctgactgtgaagangaagagaa

SEQ ID NO: 2651 - DNA, 390 bp, Zea mays
cctgcctcgcttgcaggaccagccagccacgtttaagctcgacacagagtgaaatattgttcagtgtacaaagttaacacacaagggcgccgctgcctttacgcccatgaatgccagagccaccgttgagtcactggcgttgggcagatggagattgctgcacctgcgcaggcggaaagaaccccatgcccgatgactgaaagaatccagttgatgttggtgattgctgtgccgcctgaggagactgctgctgctgctggggctggctctgagctggtggaagtggaggtggaggaggtggcccacttggtcgcggaaaacctgccggcagaatgttggacaatggaggcggaggtggcatagatccagccatcatcccgaaaggtcctc

SEQ ID NO: 2652 - DNA, 390 bp, Zea mays
  misc_feature (8)..(8): n is a, c, g, or t
  misc_feature (12)..(16): n is a, c, g, or t
  misc_feature (18)..(22): n is a, c, g, or t
  misc_feature (26)..(29): n is a, c, g, or t
  misc_feature (54)..(54): n is a, c, g, or t
cctgcctngctnnnnngnnnnnccannnncgtttaagctcgacacagagtgaantattgttcagtgtacaaagttaacacacaagggcgccgctgcctttacgcccatgaatgccagagccaccgttgagtcactggcgttgggcagatggagattgctgcacctgcgcaggcggaaagaaccccatgcccgatgactgaaagaatccagttgatgttggtgattgctgtgccgcctgaggagactgctgctgctgctggggctggctctgagctggtggaagtggaggtggaggaggtggcccacttggtcgcggaaaacctgccggcagaatgttggacaatggaggcggaggtggcatagatccagccatcatcccgaaaggtcctc

SEQ ID NO: 2653 - DNA, 362 bp, Zea mays
ctcgtaagggattctaccggacaccatctcccacaagagcagtccgaagctgtagacgtcgacctttcggttgtacgccttctgcttgatcatctcgggcgccatccacctgtaagtgccttcgtcctccacgagcacatcgcataaggcctcctggcaggcaatgccgaaatcagcgatcttcacgcagaggttctcgtcgaagagaatgttctcgggcttgatgtcacggtgaacgatcccctgagaatgtatgtactccaagccacgggcgacatcgagagcgatggatatggttctctctagagggatggggtggttctctggattgtttaggtatgaccttattgagcctccaggaa

SEQ ID NO: 2654 - DNA, 341 bp, Zea mays
cactatgaacaggaagcatgcatgccacggccacggttcgtcgatcgggcactgtaagaactccgcccaaaaccacgagacagcacgtcggcaattaatatacgtactaggataggaagacgatgaacagacagaaccagagtccatcagaaagcttatggaaggaggatcatcagtagtaaaactgctggttggtggagtaggtctgcccgaactgccaccacgccggcgccacgttgaggaactgtatgtactgcccgccggtgctggtgacggcgaagctgagcgcctgattagtgagccccgagagagcctgccagttagcgccccagttcctggac

SEQ ID NO: 2655 - DNA, 355 bp, Zea mays
aaagacaacccagttgaacttgaagttggtcagtcacttcgctttgctgcatctaccagaacctatatcctgcgaaagaacgcagctgctctattcccaactcctagccttccatcggatgttagtttgccatctcctccggaccccaatgatgaagatgctgttgtggcatacaatacagtacttaaccgatatggtataagtaaatctgacatattatccagttccaaagattcttcaggaggcgcctctagtgcaaatgatggtaaacatgcagttgaaaggctcttaaagagaggtaaaaagcgcagagtgtcatttagagatcaggttggtggagaacttatccaagtgg

SEQ ID NO: 2656 - DNA, 427 bp, Zea mays
acgacttcgttcacatcagattatgtcacagtgatccttcgagaggagcagaacatcacgaggacaccaagtctggcgtctccgcttcaacagaaagcgagatcgtatcgcccttcccaatccatgtatccaaccggtcatgcaaggatttcacttggtctatgcccaacacgggcaacacccttggtttaacccgtgaaacatggacaactccatcaacctgatcaattatgccttctattagaccagcctgaagaagggggaaaaaacagtaacgtcaaaagaccatgatgatactgccacaagaacaaagagagctaaacacggttttggacggtaggtcttacagagaggctcttcattaaaagatactccacatcttcaatagggagcttggtctgttctgctatatcccgcattgggatcg

SEQ ID NO: 2657 - DNA, 452 bp, Zea mays
gtcttccttgctgtctggaacccactctgctttgtgctaaccatattctgttcctccttcttcctcggcgagaatgttcacctcggcaggtaagtatgtagtggactttgcgatagcataatgtagctgacttgggtgatgaggtttactgaacagtgaattcactcgttggcagcattgtgggtggaatcctcttggtctgtggcctttatagcgtgttatggggtaaaaccttggaggttcatcagactgtggaatctggtgataatacggtcggtgaagtgcaaaatggacaagaagagaagaatcatcaacagaaggtgctggagaagggacgccaagaggaagcatcaatgacagcacccggtgtagtgtgatcgattgcttgattccataaagctagcaatctatggttcatttatgtcatgtctgtggttcttgtacaaattgcc

SEQ ID NO: 2658 - DNA, 375 bp, Zea mays
cgtttggcttttgttcgtcattgaggctggtgcacttctataatgggttcacgatcaaagaacgaagatgacaaggctcttgtcttgtgccaggaaagaaaacgatttgttagagaagctcttgacgggagatgtgcttttgcagctactcatttcgcttatattcagtcactgaggcacactggatttgctctgagaaaattcgtagagcctgaagtgccgacagattcgtcactgttcacatcaacatctgccactccagagcctcctacaatcatgcagaaaccgatgaccatatctccatccctttcacatcatgctagtgactctttctccccagttccctcaccattatcttcaggacgtttccatgtc

SEQ ID NO: 2659 - DNA, 404 bp, Zea mays
tgctcaaatgtaacttcatattctcttctcaaacttaatcatcatcatgtaactaattaattcttcatattttgctaggcattgaagctagaggattcatctttgggccagccattgcgctagccataggagcaaagttcataccactacgtaaacctaagaagcttccaggtgatgtgggtggagaagtaaatacaaacaaaacatctataaattagaccccacataattttggtctcgacagtgctgaggaagtgcaggggcttctgtatcttgaatgtcgtatttgccgcccgtaaactttttaactccgaaaatgaacatgacaacaaatgctacagactgtagatcgaccatactatcatgccatatatagctaccacattggcgaaagcaattacaaa

SEQ ID NO: 2660 - DNA, 344 bp, Zea mays
gccgcgttccgttcggccgcttgatccaacacgcttacacgccagcagctgctgccgcgtaaaacaccgggaaatacctggcttcctttctggtgtaagcaagtttcaactcccgaagtttgctgctttgggtaaatcttttctgacctttcaggtctcagcatcaccaggccccttttactaccaatctttctgtccgatcactgcaattttaagcttcagtcccctttttcggaaaatccagtctctgacaaagctgttcggcggctcatgcaccagtagcttcagctaagatctccccatgccacagactcctcctcctccaggaccgtcagccatggtat

SEQ ID NO: 2661 - DNA, 336 bp, Zea mays
ttgagatctggcaagcaaaggccaatggtccatggagacggagcagcaaaaggccaccgaatccgcacattgctggttccatatgtctctcttttgcctagcagcacatcactagaacccaaagagagagaaaaacacaagtgccagaatcagcaacctctgctgggatttaggtcccattattaggcctggactgtccctaattttgtttctaaacgctatataatccaacgatgtgtaaaacaagaacagatgaacagctccattcacgtggtttcctgatctttttcagattgtttgccgtcgagagagagagagagagaaaaggtcataatg

SEQ ID NO: 2662 - DNA, 336 bp, Zea mays
  misc_feature (195)..(195): n is a, c, g, or t
  misc_feature (316)..(316): n is a, c, g, or t
  misc_feature (318)..(319): n is a, c, g, or t
  misc_feature (321)..(324): n is a, c, g, or t
  misc_feature (327)..(327): n is a, c, g, or t
ttgagatctggcaagcaaaggccaatggtccatggagacggagcagcaaaaggccaccgaatccgcacattgctggttccatatgtctctcttttgcctagcagcacatcactagaacccaaagagagagaaaaacacaagtgccagaatcagcaacctctgctgggatttaggtcccattattaggcctggacngtccctaattttgtttctaaacgctatataatccaacgatgtgtaaaacaagaacagatgaacagctccattcacgtggtttcctgatctttttcagattgtttgccgtcgagagagagananngnnnnaangtcataatg

SEQ ID NO: 2663 - DNA, 378 bp, Zea mays
ctgcgatgtttctctctcatcttttccttgtttttttttccacctttttatttgccttttcccattctctttaatctcgcctttgtatccatgtgcttggttctttgttgcactgcactgcagttgttgcaccataagaatccaaagtcctccacgctcataccccctctgatatatatgaatgcttgctatccatctcttcaatctcccatacatactacatgttcttgcttcgtagtagttgtcagttaccttaacaatcatcattcaggtttgcagtggtatcatctaacgatgagcaatatgtgtccatcaccaggggctagggctagggaagcccatggaggagatgctcatggctggaaacgcaaatctaaa

SEQ ID NO: 2664 - DNA, 489 bp, Zea mays
tacgagcaggagcaggatatggaggtggaggcactgcaggccatcctcatggacgacatcaagggttttacttctccctcaaagccttttgttttggggactcatgctgtggattccaatttcttgtccaattttgatcgttgttatgttgtgtgttggtgctgatgcagagatcgacccgagtgagagtgggatcgccaccaccgcccggtgcttccagatcctactctctcctcaggtaactcctaaccgagtgcagcatgagtgtgtgatatggcagcactttgttagaactccatgtgttccagtgacgaatgtggcaaggttgagagctgcacatttgcgctttagggagttcggagagagttgaattaggctcttttggtgtttactttcaaaatatgctactgatttcctcgcaaaaaagaaggaaaccactgatttcctgtttactactattggcaggatgatgattttgatgagtcagct

SEQ ID NO: 2665 - DNA, 431 bp, Zea mays
tgaaagtggtggtagtctagttggttagctagcccctgtacaaaggcttgaatgaagatggcaataaaactcagctctcccctctgcttgcttggcactgcactccttgtgccttactgaaaacaagagcaaaaacagactcatgaagattaacaaatttcacggtgtattccttcctttccttgtgccttactgcaccacaatcaatccaactcaaaagtaataggtgacggtagctactttattacatcctgccttggtctgtcggcaattatgtgaaaactgaaaagaaaaaagcaaacctcaagagatttagtcgctggttaattcaccccatagacccacttctccgcattgctggtataagagaccagctccttgggttcaaaccacaaggcgatctcatcctttgctgtctccgggctcaagca

SEQ ID NO: 2666 - DNA, 616 bp, Zea mays
ctctgttcttctttgtctagcagagtgctatattatatgtatgagagtttctccaagaccagattattattctagactctagagttcacgtctagtgcactaatatggtagtatgtgttatgtgtatgagattttcttcctgggcatatttgtacccacaattcacgtcagttgcaccttttggttcaggtactggtggtgactacacacaagggagctcctgaggagttccatggagcaaaggtcattggctcgtggaggtaatctgcaacccaacatagacaatcttcaccctctctaggaataccaataacgtatagcaacaacaaccttactgagagcacagttttgggttcacattgaaataggttagtgcttccttgttgaagcaaaagagaggacaaggtgtaaatgaactttgggtctgtttggttggactgtggctgtgaaaaaagccgctgtgtgctgtgaaaaaaattgttatgggctgagctgttaaaaatcctaaaaaccgtttggtagaacccactaaaaatcgtttgaatttcttccatatgaattttcacagttccatccgaaagctgctaaaagcaagtccagatatgtttttagtttt

SEQ ID NO: 2667 - DNA, 351 bp, Zea mays
gtgacttcgtggagtcaaggctgctacacagaggcgaaggccacatcagattacgatgggacccaggatctgccccgtcaccatcagggcctacttgtaagcccccttgcggggtagatttcgtagtatgtctaaattattgtacttcaccccactgtaatgatcccgtgtaggggaatattccggtaatgtagtaggtaaccaggggtacaacagtacttggggacacaccgcccctcccagttacctataaatacccttacactgtacacggatgggacacggataacgagacgctacagttccctacctactgtctcgttgtgcacctgagctctcttgtctcccgag

SEQ ID NO: 2668 - DNA, 325 bp, Zea mays
gcaaattttttatgtggctggttgtgcatgatagatgttggacagctgacaggttggcaaaaaggggaatggatcatcccgtctgctgtccgctttgtgaccaggcggatgaaactattaatcacttattggtcgagtgcagctttgcgaagcagttttggttccttttccttcggtctggggacttccaggtgctctgtccctctacaggggatggctgctttgactcttggtgggagaagagtgccgaggtggtgggcaagcctttgtcggatggtttcaactcgctggtcatattgggtgcgtggtcgatctggaaacacag

SEQ ID NO: 2669 - DNA, 256 bp, Zea mays
  misc_feature (107)..(108): n is a, c, g, or t
  misc_feature (213)..(214): n is a, c, g, or t
tgaggccacagcagtaaaagcagtcacgagatgtgaaacagacgagaacaagtagaacatcagcaacagactgcatgagcttgcaaggggaatcattagagcctgtnnacgatccaatgtaatggaagcctctgaaaaatccaagtttctctccatctctttgccatagtccagagctcgtgatgctgatgcataggccacagaaatggctgnngcaatgagggcaattgatgccgggtcgagcaagtaggtcagc

SEQ ID NO: 2670 - DNA, 323 bp, Zea mays
tcctcaaataatatgccgaggtaaaaggatatcagataatccgcgagccccagccctacaccaaagatgagactcagccatgacccaatttatgaccttgctagccctaggctgctctccgttgaagacacattgattgcgatgaatccaaatggcccaagctcctaaaatgataagggagttcagccccttgcgcagcttcttatcggaggggctaataagggtcatgcttacattctcccaccaatcatcaaaagaagaagaatcgagactgggagagaggtgctgcaaaccgaccgttttcaggatattaaaccagactt

SEQ ID NO: 2671 - DNA, 603 bp, Zea mays
tctcctgtgtattgttctcatagcataggagatgattcacaacaatcacatggcgaggcacaagtggatatgttttggcagcagaacgtgccattgtcccccaatggatcaacatttccttcatctccttcaaccaattcagataattatcctgtttcttggttttgtttctctcctaagacgcatggaaccggcacatacattcccaatgtggtacggactctcatcacatgatcttgtttgtttgtttccttatttgcgctttttcagtaaatgatccagctttttgcatgatttcttgcgcgccaattgtaaatgggcagggtcagagaaaaaaaaattgcagataaaaggttttggtaggctacacagtggcgtagttttttttgtgtataaccagaaagcatgtgtctatgtttcttggtaaagctttcttcaagtggttactcattcaatccctgttcatgttttcatttccagagttatcaaacatacagggagcgtatcatgcttgaaagagataccatacgagcaagaaaacaaagacagaggttacctggtcgccggtattactcagccgagcaaggattttccggttcacaa

SEQ ID NO: 2672 - DNA, 394 bp, Zea mays
gatgggtcaggacatagctggcgcttgtggccagttggtggttagcctcccagatgaaagatcagctggtggagcaactcttttgtcagacatcgaagaccttcggatctgacctctctcccaattgttaattctaccattttctcaagatcagatcctcttactaattagcctcacatgatatggtaactggtgctatagtttcaagtcaagctttaaaacatggagatgtttagtttgaccattgttgtgttccccttttgttctgggatacacaattttgctgtacacaatggtgaagacccctgcagttctgctcttgtggataggtggccactgaaacggttggtaacttggtattgtaaatgggacaaccggacaatgttatctcaac

SEQ ID NO: 2673 - DNA, 370 bp, Zea mays
ccgagtgacaaagcaggccaacacatgagggtaaaattgcacaaataaaaaaagtagaactgcagaaaaaagaactcaatgtgatcgattgaagcgaacagaccgctgaaatttctgtcagttcgtactgagtaaaaatcaagaataaattatttttaaaaaaacttgaatgctagctgaaagtgtttccaaaacattaacggtgaaatggctaaaatatcagcacagcaagaacctggatcattgtaaatgaattggtatagcaagaaaaaaaaattaacctaacagatccaactgtaacaggtattaactccgaatgcaaggacatcataaagctgaataaggatacgtaaaaggatacggctgaatg

SEQ ID NO: 2674 - DNA, 918 bp, Zea mays
  misc_feature (913)..(915): n is a, c, g, or t
ggtagcactgcattttgattttaactgctctcctgtagtccattctatattattattacttgtaatcatttggatatattatttaggcagcttaatttataacaccccccttgcagtctactagtcttgggccatcatcatgttgaccagggctgctatgactctagttttaattcacttgccacacttgataatctctacctaattgctttttaaaatggttctgctgcaagtagttcaacatgggacacttcactggttcgtagttgaggaaaattattctgcttgctttgaaataaaattcaagaagccagtcttggttttcagtttttgtgaatggtgctgcttgaactgaggctgctgcctctctcatatattcatgtcataagtacatgaggccattcaagaattctagcaaataacagggtcaaactgcccatacctacctgctactgttctttgaacaggcagagatgaaaagagcagtacctgttcctatactcctatgtcaaaagaaagatgagtggagagcatctgattatgtaacataaccttgcattctaaggaaaaataaagacaattttgctacctcttttgtgtaatgctcagcgaatctcatggttaaattgtgacatgttttgcaggccctaaatccacagatcgtgagcaacagccctgttccgatctcttcacagcagcagcatatctctcagcaacaagctgcaacacagatgtaccctcaaatgcatgtgcaacattttccaaattttatgccatatcgccaactctattcaccagtttatcccatgcctatgccaaactattcgccaaatgtcccttatccatcaaatggaaatagttatcttcaaatgcccagtggaggttcgcatttaactgcaggaagcgtaaaatnnngag

SEQ ID NO: 2675 - DNA, 709 bp, Zea mays
cttctccggtgagtcaaagtcgatgctctcgtcagaatcagagtcttcgaatgggtcaaatgctgctcctgcttctctcatcgcaagaatgtagtcgtaggtcctcatgccctgtagtgaatgaaaagtaggcactgaccattttatttctttgaagaaaatcgctcgatttgaaagcaaaagatacttctaagcatgaatcacaatactgaactattattcacatggatatgatcttatgaatactcgcctttctaatgagaaccatgtggaaaaagaagagctggcccagtgctgcagtgctgtaaattgtgaagatgacaaaaaccacctgtgacaaaagtttgcagataaaatttgagtcaagaactaaataaatacaggagtcatgtttaattccatgtgctccatttgggagccttatgtacttactgatagtgctgcatgagctccttttgggagcctcaggtgcagcctgtgctccatttccattttcacccctttgctgtcgacaaaacagcggatgaagatcgcaattgctgttcctccctcaatgacaagctggttaagttgtgtgtcatcataagctaattagtactagtcagattcaagaaatgagaaactaaaatgatggcaaaaacgttagcgctcaccatcagcaagacaaagaacataagcagaataaacgttgcatagttccttcttccaa

SEQ ID NO: 2676 - DNA, 387 bp, Zea mays
cacgatcagcagtacacactggcagcctcacttcgatgcaaccttgcttaaccgcaatccttcgcataaatttgacagatatgaagaggggtgatctagaacttgatcagatttggtgtcaaaatttgatgtccctaataatgggggatatatgcttctaaattctacattcgatccgcctgtgaaatctggtaggatcccagatcacttctcttcaattttgctaaagcttgcaaggctgcccataaaaaagaccaacaagggggttccacaggtgcgcatgaacttgattctggcattttacctgctgaccgtgtatccagggattctccagggtgttcatgcgcatgcagtcactatatagtagtgaagggaacatgaccattc

SEQ ID NO: 2677 - DNA, 466 bp, Zea mays
tggcgccccaggaatccttggtgaccctcaggaccagcctagtcctgtatctgtgctagatggaccgtttattatacgtgataacagcaggaatgtactgtactcatctccatccccacgtaaggctgagagcccatctcatcaatcttgagcagtctagactctagagcgagacggtctcatctcaaatgcctttttgttttttttacatacatgtgcagaggctttgtcgaggtctcccttgatcggatcgtttccacggtccctgccagtgtcgtgggaggaccccccgccggaagccacgtcgtcgccgaattccctgagactctcgaggcttttctccaaggccgacgaggatctagactcgctgacgttcatccagaagctggtccgctcctgtggcatggaccgagcaagctgcgtgttggctggccctctggacccggacctgctcgagaaggtttca

SEQ ID NO: 2678 - DNA, 402 bp, Zea mays
tttttggtgatgttagccttgtttataattttaaaaaatcatttatagtggtagttttattaataaaactgctattattgtaaacctagtgtctgagaatgtaaatatttatagtggcggtttttaaccaatgtctggccttgcacacgtacgggcggttaaagaaaccatcaataagggctagtttgagaactccattttctcatggaatttctatttttccattgtaaaatgaactaatttttcttggaaaaatgaaaatccattgggaaaattaggtttccaaactagccctaaagatcagttttctaccgtaggtaaaagtcttttgtgtagtgttctgataatttcttaaacattcaattacacaaatagaagaactaagagcgttgcctaggcctt

SEQ ID NO: 2679 - DNA, 470 bp, Zea mays
  misc_feature (460)..(460): n is a, c, g, or t
  misc_feature (463)..(467): n is a, c, g, or t
caggaatggagtcaccagatttggggaaaccaatcaaatcttctgggaaaccaagcagagtagggggagcggggagggcggagaatgtagaacgcgatgcgatcgtcgtgctgcggaggaggacgcggggcagacagagagcagacaggtggagccgtggaggtggagtaggccaacagcggttcctcctccggccgtggcatagtatgtcgcctccgaagttggttcggaacttgaagacgaagatgcagtcggggtccttcacctcgtagatcttcgccagcctctctttgagctccgcctgcgcgaataatgaaataccgtcaagaccgcgacggccatcacggagggcagggaaccgagaaactaggagaggacgagacccacaaccttggagacgttggggcggccggggtggatgacctcgagcacgaactgcttgcgggagagaagacggttntcnnnnnact

SEQ ID NO: 2680 - DNA, 464 bp, Zea mays
ctgcgatgggtgcgagcggcacagcgtgggccaacaactccgtcatggactcccctgtcctcaaacaaatcgcccacgctcgcggcaaaaccgtcgcccaggtaaccaaactgtaataattcaagactgaaatatactgctagtagatatgtatatgtatgaccctgcgctgcacaagaatcatcacgctgagatgcaggtgtgcattaggtgggtttacgagcagggtgactgcgtgatcgtcaagagctttaaccagagcaggatgcgagagaacctccacatcttcgactgggagctcaccgacgatgaccaccgcaagattagcgagctccctgagtccaggggcaactacgatttcttgatccatgaatctgggccgtacaaaacagcacaagagttatgggacggtgagatcacagccggccaatctaaccaaacgccgctcgtctccgacgactgat

SEQ ID NO: 2681 - DNA, 457 bp, Zea mays
ttattaagtaattatataagttctgtaacaataattttaaatatacattttattggtgtagtgtgtcttaccatgtcatcaaatgggtcgactaatttcatttctaaaaatgtcttttgctcaatcttgttctgcatctcgttcattgtctgaatatgaagcttttggattgattggtattgttcaccgatactataaatatgaaagcattgtaattagtcttgatcagtttattaaatgaattgcaaatttacattgtactatattcaagcttaacagtgattgaatgttgtataattagatttcatcttcgtgttaaaccttagtatgtacaactcaacttccccatggcattatatcaaacacttttgttgctgctgctatatttattctataaataaatctcaaactaactcattgtagggttgtattttaaatactttgtaaggaaatgcaa

SEQ ID NO: 2682 - DNA, 457 bp, Zea mays
  misc_feature (12)..(12): n is a, c, g, or t
  misc_feature (23)..(23): n is a, c, g, or t
  misc_feature (55)..(56): n is a, c, g, or t
  misc_feature (63)..(63): n is a, c, g, or t
  misc_feature (113)..(113): n is a, c, g, or t
  misc_feature (130)..(130): n is a, c, g, or t
  misc_feature (173)..(173): n is a, c, g, or t
  misc_feature (187)..(188): n is a, c, g, or t
  misc_feature (227)..(228): n is a, c, g, or t
  misc_feature (313)..(313): n is a, c, g, or t
  misc_feature (336)..(336): n is a, c, g, or t
  misc_feature (347)..(347): n is a, c, g, or t
ttattaagtaantatataagttntgtaacaataattttaaatatacattttattnntgtagtntgtcttaccatgtcatcaaatgggtcgactaatttcatttctaaaaatgncttttgctcaatcttgntctgcatctcgttcattgtctgaatatgaagcttttggattgnttggtattgttcanngatactataaatatgaaagcattgtaattagtcttgatnngtttattaaatgaattgcaaatttacattgtactatattcaagcttaacagtgattgaatgttgtataattagatttcatcttcntgttaaaccttagtatgtacaantcaacttcccnatggcattatatcaaacacttttgttgctgctgctatatttattctataaataaatctcaaactaactcattgtagggttgtattttaaatactttgtaaggaaatgcaa

SEQ ID NO: 2683 - DNA, 729 bp, Zea mays
catgttccctggcatcgctgacaggatgagcaaggagattactgccctcgcgccgagcagcatgaagatcaaggtcgtggcgcctcctgagagaaaatacagtgtttggattggtggctcgatccttgcgtcgctcagtacgttccagcaggtacttattaacatgaccctatcgtcttgctgtaacacttatggtcttaccatggagattatatgctttcttgggtgccttattgcttttatcatgtcttccttttttaagtgaaaccatcaatcaatcaaatcgacatgtgcacatgaacacataacaatcgataaaattgtaaatggaggtgctttcttgttttaccaagtcttcccaagtggaaacaacaatcaatcaaatccacaagtgcacgtggacacatctaaatcgttaaattgtgaatggcgatgttccagtgatctgggttgtcgccataggtcgtggatatgaactgatcactttaatgtttactgtttcttcacggtataggcttcttactccaataattttgctgttgcagatgtggatatccaaggatgagtacgatgagtctggccctgctatcgtccaccgaaaatgcttctgagctagctatctgccacgcctttcatagcgtgtcaagctgttgagatctgcgttgttgagttgagtgtctctatggagtatcacatactttctgcatgaggggggaagagtatacccaa

SEQ ID NO: 2684 - DNA, 464 bp, Zea mays
gctactttgcactgaaaatgcgatccgtttgttttccttgggccacgcaattcaggtatttgtatccctaattatatgccacctttttctttaacatgagttgctgttgttcttatgattctatactccattcagggcacaaagaagataatcaataagaagaaattgagcagctgttgttgtttcgcctctcttattcatagttcttctaatgacattggacttatactcgtcttctccaatgggaaacttgaaataaggtgaggcaacaatttacttaaagacttctcgatgtgtctgtgcctctgtggatactaaagtgacgtcaatgtgcattgaaactgcagatccctgccagacttgtccttgttgaaggatgcctttttacgaggttttgtgtactcaagaaacttgaattcaagtagttccataacatgttcatctgatggagaagccatcttgat

SEQ ID NO: 2685 - DNA, 481 bp, Zea mays
  misc_feature (343)..(348): n is a, c, g, or t
  misc_feature (353)..(369): n is a, c, g, or t
  misc_feature (377)..(386): n is a, c, g, or t
  misc_feature (391)..(399): n is a, c, g, or t
  misc_feature (410)..(456): n is a, c, g, or t
  misc_feature (470)..(476): n is a, c, g, or t
tacttttaatcagcggtttcgcttcctgaacctttctaccactgaactcacctacaatcattgttccatcagtaaatcccttcagatatgtcattctttttgcttcagcaagcttctccttgtcgttctggcttttaatcttaagatcatggcaaaccttctctgctgacttgtctccaaattcaggaatgtggattattggtataatctcataaggaagaacccactcatctttcactccatactttgctctcaatgctggctttgtgactaaatcttgcagtgccatgaaatcatcaggtgaatcactagggacactagtcacaatgccagtacctttgtnnnnnnagacnnnnnnnnnnnnnnnnntgtgactnnnnnnnnnngtgannnnnnnnntgatttcatgnnnnnnnnnnnnnnnnnnnnnnnnnnnnnnnnnnnnnnnnnnnnnnngtgaaagatgagtnnnnnnntcctt

SEQ ID NO: 2686 - DNA, 348 bp, Zea mays
  misc_feature (196)..(197): n is a, c, g, or t
  misc_feature (255)..(256): n is a, c, g, or t
agacatgccagcatgggaagtacgagggctcctaggacctggaaaaatcatcggcgtctcatgtaaaaccccggcccaagccgagcaggcatggaaggatggcgcaaactacatcggctgtggcggtgtcttcccgaccacaacgaaggcaaacaaccctaccttagggatcgagggcttgaggaccgtgtgcttnncttcgaagctacctgtggtggccatcggcggcatcaatgctggaaatgcaggctcggnnatggagcttgggctcccaaatctgaaaggtgtggctgtggtctctgctctgtttgaccgggaacgtgtcgcgactgagacaagaaacctcag

SEQ ID NO: 2687 - DNA, 406 bp, Zea mays
aatccctgttcaatttgcctcaaagcaacatataagaaattacataattagcttctgaatatgtgcactgctcttggaatacattctaagagttttgaaaagccttttcttgagtgcatttctgaatttgatggtacagaaggtgttaaatatatacaacaatttgatattctagactacctgaagcatgtagaatcaaggttgcaagaacatgaaaggtgtacgtgaaggatcctgacaacctgtgtgtgctgagttgctagtcactcttgttacttatttatggcatattcatggtgtggtttaccatggtatatataagacaaatgaacctaaaaggcttaaggcaggtgaaagttgatgagtaattaagtcacagcagttagctagtttctgtcccttacaa

SEQ ID NO: 2688 - DNA, 356 bp, Zea mays
catatataataactactgtaggcagcggcatctcctgctgggacgaaggttcaagaagctagctaagagagaagggcataacgagataataagcagcgcgcgaagatgcaagactgggcgccggtgttcgtctcgctggtgctcttcatcctgctgtcgccgggcctgctgttccagatgccgggcaagtgccggatcatcgagttcggcaacttccagaccagcgccatctccatcctcgtccacgccatcctcttcttcgccctcgccgccatcttcctcgtcgccgtcggggtgcacatgtacctcggctcctaggcggcggcgcggggcgccgtaccttctctccctctcta

SEQ ID NO: 2689 - DNA, 343 bp, Zea mays
gctgcttcgacaccatctccctcagccagaaactctccttgcaccgcctcgcagtgcgccccatccagctgcatctacttgcctgggagaagccttctgctcccaacccagcagagagggccgtgcgttccccaaagctcaccatgccttcaacgctgctccctcacctacagcaaaaccttgtggagaccatagaaggcggagtagatgctgaagaggagtacgtggggaatttgtcgtttcggatcgatgatatctcatttgagagcagctgggtgtgattccaggtttcaattttgtcatacacgcagctgatgtgcatacatatgttttcatcttgtct

SEQ ID NO: 2690 - DNA, 386 bp, Zea mays
tgtttctgctggtgttgctgcggtagtactcctctagccggaggctgtacctgcagaagagtccgtccatggcttccaagccgaagtgcgctcgcagcatgggctccacgaccgccctaacggtgcttgtcgtctccatggctagccactgcggcaagtcgtcgtcatcgtccgacgccgactggaggaggaggcagcggcgcgagatgtcgaagagctgcatggttctgacggtgaaggagccttccctggcgatgaccttggctaggtcgtcgaggcaggggccgtagaagggcacgttgaaggcgtggacctgctcctcgtcgacgaggccatcggcggccatgtccatgagggcgtcggcgaggaagtcccagaggtagcag

SEQ ID NO: 2691 - DNA, 402 bp, Zea mays
gtagccgcagccgcagccgcgctttacatcttacttggcaagttggcatgtacatttccacttccgccaccttctccttgcctgctgtagcgtcctctgcttcagccatgtcgtccgtgtccggcatgccgaacagcttgcccatctcctccagcgtccggccgcgggtctccggaaggcacgtgaagaagaagacccacgcgacggcggcgatgccggcgtagaggaagaagctgccgccgattgtgatgcctttcgagagggacaggaaggtcatggagatgacggcgctggtgacgcggttgctggccacgcccacggcgaagcccagcgcgcgcacccgcagcgggaatatctccgaggtgtacacgcccgtgatggggccgagcccgatggagaaga

SEQ ID NO: 2692 - DNA, 444 bp, Zea mays
cttcaagtttgccaatcttcagcccaatatcgaaggacaaagtaacacaagattagtttcaccaaatgcttaaaacaaaaaagtagtacatacatatatagataaaaatccaagacaatgaatggtctataaacatgtaatgaaagcaatagatttagtttctaatgtggccattggcagaaaattgaataaatagaactaacctgtccagttcggaagaacaactttgtgtagccaacttgatacatctcaggtaaaatgttgaactgatgaagaattgcaactgaaacactgagtggatcttgagatgcaacatcctcaagaagaagaaagccatacctgattaaattaagtattaacttttttataaaaaaaaagttggcagaaatttactgcagttgttcagagttaacttaccgccgagcaaacttctggtgagtcatt

SEQ ID NO: 2693 - DNA, 399 bp, Zea mays
ttttgtcttctttgttttgaatgcccttctgaccttcaagcatgtaatgtaagctcgcactttatttctgtactatcgtattattatctgtggtcgcatgttacatttagaatccaatgtagtattaaccgatatccacattgattcaaccatggcccaaactaatctggtacgttgcaacagtcagcatgccccgattcttatcctctgatgcagaaccaacctttcacaatccctcctccgcctcagctagtttcttcatattctttggaaacaacaggttgtgcattcagccttgggtttgactctttcactacgatgtcccttggaccaaatatttgtgccaacatgacgcccatggaaagatctatatctgccaaagaacctgagaattcagag

SEQ ID NO: 2694 - DNA, 659 bp, Zea mays
tacgtgcatgcatcagtggttcgtcattactgatatgtgctgctaggtttctgaagaacttactatgtttgcttactttgatcgtctagtctgctatctgtacactggaagatgtagatgttatcaaggaaggacaggtcagtatgtttccataacaacacatactctgagactgaatcctgtgcgagtaccatgggcagatttcaaagaaattttcttcacacaccgctatgctttgctcgctgcaggctaggattgctggatatgcactttcaggtggtggccgtggcattgagagagtggatgtatcagctgatgggggtaagacctgggtcgaggctcgtagataccagaaagacaatgtggcgtatgtgtcagatggacctcaaagtgacaagtgggcttgggttctctttgaggccacattagacgtaccagcgaatcctgagatcgtagttaaggcggtaagtgaagtctatcttgacacactatttcaatcaacttagaacagtttgtgagaaatacatcttgtgtgggtacaggtggactcagctgcaaatgttcagcccgagaaggtagaagacatatggaatctgagaggaatcctcaacacgtcttggcatcggatcaaaatccagagatcttcgtgcgttgaaaga

SEQ ID NO: 2695 - DNA, 369 bp, Zea mays
gtcggcgtccggtctctcctcgagcgcaacgacttcttctccgccgactgcaatccgcacgccgacgccgtcatccccgccagcgccgacgccgccgcggcctacgactcgacgtagctcaggcccaacgaccggtccagttaggtgctgccacattgccagctactactcatccgcgttctccccgcaaacgttgcggcacacaattttctttttcttttttacagatgatggaagaggaaactttggttccggtggagctggatcggattatcgattccttgctttcttctctccattgcttccttgcccgtaatctgtacatgtggttgccgtggttgggagcaactgatttttgaactcgaagac

SEQ ID NO: 2696 - DNA, 328 bp, Zea mays
  misc_feature (319)..(323): n is a, c, g, or t
aaccagcagtcagacttcactccaaagagtagcgtcgagggggagaatggaacccctaaaacgcttctgtcagaaaattcccttccgccgctggccgacttccccatttccaacctgggtgatgcttgcggtgcctcaagctgtgacggtagcagcattcagttcccaagttggcccgagttgtttgatgaacagttcatgtgcgagtttgtatgaattctggcctggagtgagtgtgtttgtgttactctatagtttgtttttttttcagttatagttttcttcccttcttacatctgttttttgtgccatattctgnnnnnggtct

SEQ ID NO: 2697 - DNA, 254 bp, Zea mays
cagtcctttttatttgtaataagaatccaattgatgtgtgtgcacgcgcaatcctagctaataaatagatcttctttgtgccttgctttgtttgatatatatataataaaagtcttcgttgcaaataaacgtacatcttttttatttaggaaatgtattttttgttttcattactaccgctttccggacggcatgcatggcctcaagtgctgtaaacaaaaaaagtgctagttgagagagccgtttcatgtcac

SEQ ID NO: 2698 - DNA, 393 bp, Zea mays
tcagattaacatatgtgctttacaaaattttctatcttgtttatttcctagtaggaactccaaagcatgagtagaaaaggaattgatttggtttttgttagttattattgaaagagaaatcaacggtttgctagtaatgttgtgactcaatcatttctgtcggtgtacaatcatattgcacaaaattatttacagcctttgtaaatgcaagcatattagttctgtttgactaccttgatgggttctacacttgtactctgttgttattttacctttgatggaagtttctttgtaaggaaatttctatagtaacttctagcctatatgtcatagaacctctgttgcaataatacctttctttcatcagttacaaacccaaatgcgttctaaaga

SEQ ID NO: 2699 - DNA, 364 bp, Zea mays
caataggcagaaagagaagggcgataagaggaatcactagcccaagtagtatcatagtacgcttggaactgtaaagagttggatcgtggaaagaacaaacgacgagatatagttccacgaagataacgtagaacccaaagcaagtgactatagtgaagctgagtggaagcggaaacaaactgactgagattatgtacagaataaaagatatcaggacgagtcacaccaacgtaaacaagactcccaacaatgtgacaataatgattagggtcttcaagaggctcaccatccgtggcacatagatgaatattgagttccataggagcctcaactgtccgctatcagtaagagaggcccgatcaag

SEQ ID NO: 2700 - DNA, 312 bp, Zea mays
tctctctctagctgcagattggtgcctcacccctagcggtcggtggttggggccgggttccgacggctgctcgggagctcgactggggcttggaagtccaaagccgccgcctcctcgtggcgcgccgctccggaattcttgccttcttgggctccgaatctcgccgcccggtgtttgatttgcggcgttcctagcgaattcggggctgatttgccccccctatggcgaggatttgagtggactcgagaggaacaagtagaggtggagtcctgatttgggcccctgccgtgatatgtgccatgaggaagctct

SEQ ID NO: 2701 - DNA, 457 bp, Zea mays
ggcccaggcgatgtcggcggcgtccagggccctggaccgcttcgacgtcctcgactgccggagcatcgcgtcccacatcaagaaggtaaccctcgtggctcgtgccgtcccgtctccaacctatgaacctcgattgattggggttgggtgggtggctgtaggagtttgacgcgatccatggccccggatggcaatgcgtggttggctccggcttcggctgctacatcacgcacagcaaggggagcttcatctacttccgcctggagtcgctcaggttcctcgtcttcaaaggggcggcagcatgatgacaagccccacggctaacatcgcgagttcacgaccaggcaaagcaggtggaggatggggttgtttttttttatttttttcttttctttcaccggcctttgtggacggcttgcctcgctgtatacgatatcaccatggtaataccaaccag

SEQ ID NO: 2702 - DNA, 381 bp, Zea mays
tccgtctcgtgccggccgctctcttcccgtttacacgattgcttatattagcttattcatgtaccagctcgtacgtagcactcctggggtggtagtggtaccagtcgctcagatggagatgctgttggggatgcccttggcagtgagccctgcggcggcgccactgtggtcagaggtgttgggatagagcagcatgtaggggaactcggcggggccgttcctgttcctcagctgcgggtcgcggttctcgcccaccaccttgccctcgatcttgaccagcgcgtcgctgaacctcttgaacgccgccagcgcccgggcgtcggaggtccactcgggggtgtcgcgctggccgaggtacacctcgtcggaggagtgcttgga

SEQ ID NO: 2703 - DNA, 366 bp, Zea mays
  misc_feature (356)..(357): n is a, c, g, or t
catactggatggagaacatttatctttttaataacgagtaaaagcataatggcatgcttgtgtttagttctctttttgttgaccaatcgctatatttttatcttgaattttttttatctataacttgaatttcaaagattcaatattttttattcagacatttttctcttctctagatattcttttatacaaataatacggttacactagatcagccaacattctgggaaataagctatatggtcagagtaagaggttcaagagttgatagttcaacaactttaactgagagcaaatctacaagaaaaaggaaacaagcaacctggaacctacaactgcaggagcttgcttgaaanngaacaatca

SEQ ID NO: 2704 - DNA, 757 bp, Zea mays
  misc_feature (715)..(715): n is a, c, g, or t
  misc_feature (730)..(734): n is a, c, g, or t
caccgaccctaaggatgcccgcctccgcgagttcggtgagatacctccgcctacgcctcccgatccgccccatttcgcgctcggatctgcgctatgctcgattagcgcggtaccgtttggggatttcaaatcatttttgggctcaagatctgaagtctagtgtttttctgttctactccgatggttagggccgttgtttaggaagacggttgcagattccaatgcgccggtacaggagaaggcgctcgatgcccttctcgcgttccagcgagctgctgacgccgatgcatcaaggtgtgtgcattcagctgccaagtcattccattcacatctatgcttctgattatttgttatctgcaacgatttatggagttggctcctctcagatacgcgaaggaggtctgtgattcaatcgtggccaagtgcctcactggccgaccaaagactgtcgagaaagctcaagctgcattcctcctatgggtggaactggaggcatcagaggtcttccttgtaagttgatcatcaatcccctgattgttatgattgtgagctgttggtgaaatgcatgtgcatacataatgctacttttttgttcacttggttttcacaacatgcggtgaaatgttccatgtagttgcaggtattattgacagtttggcattgtctaatagaccaactatcaatattgttacaaatgctaagcctatgacatagnattatgtgctgcatnnnnnccgccggatgattttcactttca

SEQ ID NO: 2705 - DNA, 368 bp, Zea mays
  misc_feature (342)..(361): n is a, c, g, or t
cagttttccagcaaacacaaggagagcagcagtttccatgggtggttacttctttaactcattgtataggtatgcagtcttggtgttggcagtttctatgatcaaaggcagtttccaacgttaggtggctgcttggatacaacaacgggctgctgacagttctgtgatcaaagaacatttatcctgggctcaggcgctcagcgacactgcaaaattacagttacctcaagcaaagttttcgtcactttcattattctagactctacacagtgttggacccctgcttggggacaagcaagctttcaagtggggcagatgtcacgaccctgaattgaagatagnnnnnnnnnnnnnnnnnnnngtaataa

SEQ ID NO: 2706 - DNA, 1151 bp, Zea mays
  misc_feature (597)..(597): n is a, c, g, or t
  misc_feature (906)..(907): n is a, c, g, or t
  misc_feature (988)..(990): n is a, c, g, or t
  misc_feature (1070)..(1070): n is a, c, g, or t
  misc_feature (1076)..(1079): n is a, c, g, or t
  misc_feature (1110)..(1120): n is a, c, g, or t
  misc_feature (1127)..(1142): n is a, c, g, or t
gctttcattgaggagaggggcaagtttgatgaagagacacttgtcaacgtgaacagcatcaagaggaataaaggaggcagccaaagatcaagtggttttagcaacgagtacattgtggtatgtaacagatgacaccaggcttgtcaaatagtaatcttatgtccatgcaaggaatatctttttgctgatacagttcagatgccaatagtgattcaagaattaagatttttgtctaaaaaaacactgctttacaaactcatatccctgtgttggtggggggatgatttctatcatgtgtactgtgtatgtttgtgtgattgaatgtttctgattacctgttttgctagtatcactcagtacagcagtgaccacatgatatctaagcctttttaatttcatatttgcagataaccatattggttgctgctgagggagtacataagctgccggttataaatagcagcaatgacttaaagacagctctacaaaagatgggtgccataccatcaagcaaaatactggtatttcttgctcgtttctttttttttctcttgtaatatcatcaagtttaaattctagtcctaccatccctactcnggagtcattccatgttgattgtattggggtaaaataattttaactgacagcaacctggttttcaccaacatctacagttcggtaaaatggtatttgctccaaaatttgatccagccttgtccaaaaacagttccgtagtccatttctgttgtatgaggctgtcagatctagtcagcaaatttaaaattgcagcaaatcaatgttgtgttgtagtgacatactgacatttaataaacatcttgctagagtacaaaacgtttagtccaagtaagctgtagtaacttagagatggaaccaacaagagcctcnngaattcactctaaaaaacaaagggaaaataaaaaaagggaaaagaagagctacatgaaccacaatctttgtatcctatttnnntataaaattcaggttgtttgcattttattcatactggtatgccatgataacgatgtccggttctttttaatcttctttanaggcannnnaggtcctgtggactccgcaaaatgagaatgnnnnnnnnnnngagcgannnnnnnnnnnnnnnnacccgctct

SEQ ID NO: 2707 - DNA, 309 bp, Zea mays
agtgggtgggacgggcccaggccaatgaataaggcgaagggacggtgagagtgccgggaaggggaaggattggttaggcgccgcgccggatcggttggtgacaacattattattttttattagtagtataggaaaggaaaggaaaggaaaagaaaaaaaaactggggctggtgcagacgtttgcactacatgttgtactactacggttactccctgggtgggtgggttagaaatgcgtgatgcagccgcacatcttttacctgtggtgatgactgatgatgtgcaccttgcacgcatgcaacttgtacc

SEQ ID NO: 2708 - DNA, 449 bp, Zea mays
gtagttaaaactaactgcatggaaaatccaaatcgataagcatagcgttcgtttgcagcggggggtcttcttctaacttcgcccccgtccctgatccttggcccagctcgccaacccgtacatgcccttcggcggcgtcggcgacagcgggatggggtgctaccacggcaagttcgggttcgactgcttcagccacaagaagggggtcctggtccgcggctttggcggcgaggcgaacgccaggtacccgccctacacgacggagaagcagaagattctgagggggctcatcaacggcagcttcatcgcgctcatccttgccctcctgggcttcccgagggagaagcgttagatgggccttctaactgggcccagtacaagcgttttgttcgtgttcgatggatggcacagccgcacagtatatacaccgccatgtgctgccaaataga

SEQ ID NO: 2709 - DNA, 374 bp, Zea mays
  misc_feature (354)..(369): n is a, c, g, or t
ttgtgtccttgatttaactctcagtctgaagccaagtttttctggaacaggtgcgtgaattttatcttgtgaggttcaagaaatactcgtcacttttcatcttgccggccgtggcatgctgtttcacattgctatttttcgtattgcagaccttggtaagcatgttccacgacgtacagaagaggtgagaaattattagggtgtgcaagatatcatttttatgcaatgggtgccgtcatgatatttttgctatcctgacgtgcaggaaattctcctgtacccgggatttgagaatacccctgtgaagtccggtatgtcccttgcgttaatttgctgtgtcttttttttttggannnnnnnnnnnnnnnnccccc

SEQ ID NO: 2710 - DNA, 489 bp, Zea mays
ctctcttctttcgctttcgcttctcagaaaacagaagcgtggcctttgtcaagacaaggacgcgcttattaatacaaccaaacatacaagctaagtagctaacctcaactgttcgttctgtgtggcagaaatgctcgccacagatcagctcgaccactgggaatggaattctatcgaggcggcggcagttgcttgctccaagaacctggatcggctgaggagctagctgttcatggagtagcgctctcatgttcgggccttggagattttgttgcgtctatatactactagtacggatcagacggagaaagcacattgggccaatgaatgaatagtcacacttcaccgacagagctccaagcacgctttttccacagcgctcttggaacatgtaagattgtaccgaaagaatggcgttagaatgaccatgtaaatgtaatcgtagactgagttctcggatgtgtgggtaaacagcatacttaggtgcgt

SEQ ID NO: 2711 - DNA, 710 bp, Zea mays
  misc_feature (605)..(614): n is a, c, g, or t
  misc_feature (647)..(662): n is a, c, g, or t
  misc_feature (668)..(672): n is a, c, g, or t
  misc_feature (676)..(682): n is a, c, g, or t
  misc_feature (689)..(697): n is a, c, g, or t
  misc_feature (699)..(699): n is a, c, g, or t
ctcagcaaatcaggatcaagcttctatagagaaatgcaatgctccaaagaatttaccaatacctgataattcacttctcgatgctcgtattctctattgtacctctcctgccctgggtcataacaaagtaagcaattcaggttcctgtttcatagtagaatacattcagttgcatgaatgctttgctactcattttcatgagctgcctgttgactcaaactttaatatttcgtatgattcattcttccataaagcatacctcatcttaaaattcatatttgaataatgcctttcgacttttttgaggaggggcagggtgggggagggggaggagcagtgattttatgtcaacaatacatgactactttatgtcgtcatggttgaaaacttaaatactgagttgctgaacaatatgcaatagttctagaccatctatgtaaatggttgttaactaaaaaccattctgtaccttactatgcaacaatttttttgaaaaaatatacatagaattatagaagtcacgatgtaataggtggtcctatctgtgttgtgcattatatcataatattttctgcttcttttttttgtatccaggaagcacaccnnnnnnnnnncaaaagagttcctgtgatagttgatactcttgnnnnnnnnnnnnnnnntcccannnnntacnnnnnnnactacannnnnnnnnanctattttttgg

SEQ ID NO: 2712 - DNA, 371 bp, Zea mays
cccctatcttaacaaactatcctatagcagatttatcccttcaggcggcctaggactcgccatccttatcccttctcttgtatgtctgcccgaccataacacactaactccacagttgcaaactctatggagttttcagagctgcagtacatatttttggagtacctcttttgctgctccggaaactctaaaaaaacaacctagacatggagtctggagttatttactcaccactgccagtcttccactggttataagaaaaccatttaaatctggaacaaagctgctccacccgagttttgaagtggagcagagccataatgccgaacacgcccttaatttattctgtgccacgtttaacttgtggttgt

SEQ ID NO: 2713 - DNA, 354 bp, Zea mays
gagcttggcggccatggctggagcaccgcagcgcgcgacgcaatggagaagaggagcgattggcgcgtgtgggagatagagcagagatgcgcgggcctagctgggaggccgcggcagggggagaagacgagggagcctagctccggctgggctgcagtcaggcgcggggagcagacgaggaaagcagccgagcgaaacaattaatatcagggagagttttgagcggtgggggagataaggactgcacgcgacttagaaaaaaatcagagagctggcgcttggggaagagggcgacgcggttggagaagctccacgcgcgcgtgcgcagggacgagcagggaggacacaagctcc

SEQ ID NO: 2714 - DNA, 401 bp, Zea mays
ttcttgaataaggcgtatcgttgagttaatcacttgattctcaccttagccagccctgatctttcatctccaacaacatataggatcacaaagacattctgattcctcatcacccaagatcccgggtgctagctatcacactatgtgccaatggccagctgtgctgctctagttacaggatgcattcttgtggcctgcccaccttgtgtgaatcgtgttaggagaaagatccagggcagtatgtttctccaatctcagcacaaccgtgttagaccacattttctgggctcacatataagccaatggttcggctgtgctcctgtcggtggccatctcacagttgcccacgctcaaggtcggagctgtctatttcgttttgcaccaaagatgactattcaagg

SEQ ID NO: 2715 - DNA, 677 bp, Zea mays
gaaatgagcgaggatgctaaaaaacttgcagccaaggcccttgcagctgccaaaaatgctgctgctgtggcatctggacgagggaaagtggaggtaatccaaactgtcagcatcacgaagcctttatttttgttattattacataatgtaaaataaaacttgctaaaaaattgtaacagaaaatggtttatatgtagctggactctttttgcatgtctagtgcattttcatgttcattttatttaaataatttttactgcgactggtttcataaaatttttaaacataaaaaaaatagtagcacaaaaacgtggtcactccctggaattatagttctggatatagatggcaaagctcgactgcttttgcaatatgtttgtaagctttaatatcagaatgctgaacaactggtactcttcacacgatccaacagatcactgaggtaagggactttgctgggaaggacatcgaaatcaagaaactggttgatgctaattcaaaggaggcaatcgagaaggccagggcaggtggtgccgccccatcagctgtcgataacatcctagagcaaatacggaagaagcagaagctgagcgtcctggacaagacgaagaaagactggggagagtacaaggaagagaaccggggcttgggggaagagctggacgcctacaagaaga

SEQ ID NO: 2716 - DNA, 1047 bp, Zea mays
  misc_feature (289)..(291): n is a, c, g, or t
attcgctagctccgtcgtgccgaggtacgccccactgaccaggtgattggttgaccatctctattgttcttcctcctctccaattatacgttggaagtccgtcgagccaccagtgtcgtcgcgccgaggtaccccttgactctggtgattgattgggcgtcactactgctcctcctcctcctctccgtttctacccaaggggagcgaggagacaaacgtgtggcctgccacggcgaggcggtggggatccagtcctccatcccttcaatttggccttctctatctgggnnnctctctatttagccacccgttcgacacacgctgctacaagctcttcgtgatcagtcaaaaatagtgagatcgagttgtttggggggagcactgcatgagccctcctccgacggacaccctctccgttctctagcgatcgagatgtgcgagattctgatgtgcgagatcgagggccaccacctcacgtcggcagccatcgtcgaccatgaaggcgccgcctgggctcagagcactgcattccccgaggtcaccgctaccttcatgcgaaccattcctctgccgtaaagtccgacggcagccacgtggtaccaggccacagctggcccacacgtcatccacccggctaccacaacgttcacggatgttacggtagaggatcctgccggcaccgtcacattcgattccccttgtattacataaacgttgttgtctgtgtgaccaattcgatctgatcccgctagctgacacctaacatgtgaagggatagattttgctgtgacgtcatccacccaattcaagcctgagatggccaacatcatgaaggatttcgatgagcgggggcaccgtaccttgcctcgaccggcctgttcctgggagccaccaagtacactgtcatccaaggcaagcttggtgctgttattcgtggcaagaaggtatttaactgcccatcgaacgtcgcaacgcgactgctccatcctctttgatccgattcattcccaactgttgctgcctttgttgttcccagggattcggtct

SEQ ID NO: 2717 - DNA, 368 bp, Zea mays
gaagagagcagacagacagctctgcaaatcctccctttgccatgtttcccgttaattagctccccctctacggtcatctatgcttcatgtcgtcgtctgccctgaccatttcggccctaggaggactgctatcattgtctgtcccgctatgcgtgctcttgtgttcagcttccgtgcctccgggagggtagtattgcgggtcggcgaggaaggagagcgccgcgacgacgtcgctgatccccggccggctggcagcgtcctcctgcaggcacatggacgcgacggcgagcgcctggtacagcgccttcactgggtacctgttgcccagcaacgggtcggccagcttcacgaacctcctcttgtctctc

SEQ ID NO: 2718 - DNA, 286 bp, Zea mays
tgcggcgccgtccatggcgagagagagagcgtctgcaggccagccgagagcccgagaccagtctgctgtctgctcgtgccggtgtgggtgacgacgggcgttggcgtgtgtgggggtctctgtccaagtccaagagcaaggtacgccgtacgctgaagctgctatgccttttggccctgcgtcgtgtctttcgacgttggctggtggccctggcaccacgccgtggagcggtggagccgccggtgggccgggacgggaggcaggccgccgccgggtgctcagctca

SEQ ID NO: 2719 - DNA, 446 bp, Zea mays
cgttctgcccttggacttcccctgattacggtgaacccttgcctggatggaggcttactctctcggcattacttgctggggacaagagatctgatggggacttgcaagtggatgttcagaccagccttctcgatgaggtagaggtgctttcattgaatcaagccttgcatctctagaacacaacctcacagtttgttttctatgattcaggaggatgaccctcttacctctgttaggaagcttttcatgacaccacctccgaaaaggcggaggatacagcaatctgaaaagagctgagaagtgaactgtatccacatgttgggaaagctggggtcaaacccatacggttagacaatatcatggggcagatccagaatgccatatgaattgaatattggaactggaaatgtttacgctgcacatctgtgcgatgtacaaattcttga

SEQ ID NO: 2720 - DNA, 1626 bp, Zea mays
  misc_feature (285)..(285): n is a, c, g, or t
  misc_feature (289)..(289): n is a, c, g, or t
  misc_feature (291)..(291): n is a, c, g, or t
  misc_feature (308)..(308): n is a, c, g, or t
  misc_feature (311)..(312): n is a, c, g, or t
  misc_feature (325)..(325): n is a, c, g, or t
  misc_feature (358)..(359): n is a, c, g, or t
  misc_feature (370)..(372): n is a, c, g, or t
  misc_feature (390)..(392): n is a, c, g, or t
  misc_feature (394)..(397): n is a, c, g, or t
  misc_feature (407)..(425): n is a, c, g, or t
  misc_feature (427)..(427): n is a, c, g, or t
  misc_feature (430)..(434): n is a, c, g, or t
  misc_feature (439)..(440): n is a, c, g, or t
  misc_feature (445)..(448): n is a, c, g, or t
  misc_feature (450)..(451): n is a, c, g, or t
  misc_feature (462)..(464): n is a, c, g, or t
  misc_feature (466)..(468): n is a, c, g, or t
  misc_feature (470)..(470): n is a, c, g, or t
  misc_feature (474)..(478): n is a, c, g, or t
  misc_feature (480)..(495): n is a, c, g, or t
  misc_feature (497)..(504): n is a, c, g, or t
  misc_feature (507)..(507): n is a, c, g, or t
  misc_feature (512)..(518): n is a, c, g, or t
  misc_feature (520)..(534): n is a, c, g, or t
  misc_feature (537)..(547): n is a, c, g, or t
  misc_feature (549)..(551): n is a, c, g, or t
  misc_feature (558)..(564): n is a, c, g, or t
  misc_feature (570)..(578): n is a, c, g, or t
  misc_feature (581)..(587): n is a, c, g, or t
  misc_feature (589)..(589): n is a, c, g, or t
  misc_feature (593)..(604): n is a, c, g, or t
  misc_feature (606)..(606): n is a, c, g, or t
  misc_feature (614)..(624): n is a, c, g, or t
  misc_feature (626)..(635): n is a, c, g, or t
  misc_feature (637)..(640): n is a, c, g, or t
  misc_feature (642)..(654): n is a, c, g, or t
  misc_feature (656)..(664): n is a, c, g, or t
  misc_feature (666)..(668): n is a, c, g, or t
  misc_feature (671)..(673): n is a, c, g, or t
  misc_feature (675)..(677): n is a, c, g, or t
  misc_feature (679)..(686): n is a, c, g, or t
  misc_feature (688)..(693): n is a, c, g, or t
  misc_feature (695)..(716): n is a, c, g, or t
  misc_feature (718)..(725): n is a, c, g, or t
  misc_feature (730)..(739): n is a, c, g, or t
  misc_feature (741)..(746): n is a, c, g, or t
  misc_feature (754)..(762): n is a, c, g, or t
  misc_feature (765)..(778): n is a, c, g, or t
  misc_feature (780)..(782): n is a, c, g, or t
  misc_feature (784)..(797): n is a, c, g, or t
  misc_feature (806)..(809): n is a, c, g, or t
  misc_feature (811)..(815): n is a, c, g, or t
  misc_feature (818)..(829): n is a, c, g, or t
  misc_feature (832)..(844): n is a, c, g, or t
  misc_feature (847)..(849): n is a, c, g, or t
  misc_feature (852)..(866): n is a, c, g, or t
  misc_feature (873)..(889): n is a, c, g, or t
  misc_feature (891)..(894): n is a, c, g, or t
  misc_feature (896)..(909): n is a, c, g, or t
  misc_feature (911)..(920): n is a, c, g, or t
  misc_feature (922)..(926): n is a, c, g, or t
  misc_feature (928)..(931): n is a, c, g, or t
  misc_feature (935)..(941): n is a, c, g, or t
  misc_feature (943)..(952): n is a, c, g, or t
  misc_feature (954)..(961): n is a, c, g, or t
  misc_feature (968)..(983): n is a, c, g, or t
  misc_feature (985)..(987): n is a, c, g, or t
  misc_feature (989)..(991): n is a, c, g, or t
  misc_feature (993)..(1020): n is a, c, g, or t
  misc_feature (1022)..(1025): n is a, c, g, or t
  misc_feature (1027)..(1030): n is a, c, g, or t
  misc_feature (1032)..(1047): n is a, c, g, or t
  misc_feature (1049)..(1052): n is a, c, g, or t
  misc_feature (1060)..(1064): n is a, c, g, or t
  misc_feature (1066)..(1068): n is a, c, g, or t
  misc_feature (1077)..(1089): n is a, c, g, or t
  misc_feature (1091)..(1093): n is a, c, g, or t
  misc_feature (1095)..(1109): n is a, c, g, or t
  misc_feature (1115)..(1129): n is a, c, g, or t
  misc_feature (1132)..(1133): n is a, c, g, or t
  misc_feature (1136)..(1137): n is a, c, g, or t
  misc_feature (1139)..(1148): n is a, c, g, or t
  misc_feature (1150)..(1153): n is a, c, g, or t
  misc_feature (1155)..(1155): n is a, c, g, or t
  misc_feature (1157)..(1160): n is a, c, g, or t
  misc_feature (1162)..(1163): n is a, c, g, or t
  misc_feature (1165)..(1174): n is a, c, g, or t
  misc_feature (1176)..(1192): n is a, c, g, or t
  misc_feature (1197)..(1221): n is a, c, g, or t
  misc_feature (1224)..(1224): n is a, c, g, or t
  misc_feature (1227)..(1233): n is a, c, g, or t
  misc_feature (1238)..(1245): n is a, c, g, or t
  misc_feature (1248)..(1255): n is a, c, g, or t
  misc_feature (1258)..(1263): n is a, c, g, or t
  misc_feature (1265)..(1266): n is a, c, g, or t
  misc_feature (1273)..(1274): n is a, c, g, or t
  misc_feature (1277)..(1309): n is a, c, g, or t
  misc_feature (1311)..(1311): n is a, c, g, or t
  misc_feature (1314)..(1315): n is a, c, g, or t
  misc_feature (1319)..(1321): n is a, c, g, or t
  misc_feature (1323)..(1331): n is a, c, g, or t
  misc_feature (1333)..(1342): n is a, c, g, or t
  misc_feature (1344)..(1347): n is a, c, g, or t
  misc_feature (1349)..(1358): n is a, c, g, or t
  misc_feature (1361)..(1369): n is a, c, g, or t
  misc_feature (1371)..(1373): n is a, c, g, or t
  misc_feature (1377)..(1382): n is a, c, g, or t
  misc_feature (1384)..(1384): n is a, c, g, or t
  misc_feature (1388)..(1396): n is a, c, g, or t
  misc_feature (1399)..(1404): n is a, c, g, or t
  misc_feature (1409)..(1416): n is a, c, g, or t
  misc_feature (1418)..(1425): n is a, c, g, or t
  misc_feature (1431)..(1434): n is a, c, g, or t
  misc_feature (1438)..(1449): n is a, c, g, or t
  misc_feature (1451)..(1466): n is a, c, g, or t
  misc_feature (1470)..(1480): n is a, c, g, or t
  misc_feature (1483)..(1483): n is a, c, g, or t
  misc_feature (1486)..(1487): n is a, c, g, or t
  misc_feature (1489)..(1491): n is a, c, g, or t
  misc_feature (1493)..(1508): n is a, c, g, or t
  misc_feature (1512)..(1527): n is a, c, g, or t
  misc_feature (1530)..(1536): n is a, c, g, or t
  misc_feature (1541)..(1543): n is a, c, g, or t
  misc_feature (1548)..(1551): n is a, c, g, or t
  misc_feature (1553)..(1565): n is a, c, g, or t
  misc_feature (1567)..(1575): n is a, c, g, or t
  misc_feature (1577)..(1589): n is a, c, g, or t
  misc_feature (1591)..(1601): n is a, c, g, or t
  misc_feature (1604)..(1607): n is a, c, g, or t
  misc_feature (1609)..(1623): n is a, c, g, or t
gtcaggcagcttgcattacttagacagttaagatgtgtttcagcacagatcagtcgacctcttctcagagcagctggcagagaagcttggctgagcgtgcaccacatatgtgcaacaaaggttgaagacgaccggccggcaccggcctccagaagaaagaataggaagaattaagaaaaggctagggagagaaagggagtatcgacggatcttgctctttttcttcttttgtatggtcgtgtcgtgcatctggtggcacgactgattacaaccaattcaatcaanacangncagagagggaaaggagntgnntcggcatcatcangcagttcccgggtccgacgatccgcggccgggnnggcgacaccgnnnacgtccaggttcaagaannngnnnnggatgtacgnnnnnnnnnnnnnnnnnnngnacnnnnngccgnngcggnnnnannggggggggggnnncnnnantcannnnntnnnnnnnnnnnnnnnngnnnnnnnnttncccgnnnnnnngnnnnnnnnnnnnnnngcnnnnnnnnnnncnnncccccgnnnnnnngttaannnnnnnnnacnnnnnnnanactnnnnnnnnnnnncncattcctnnnnnnnnnnngnnnnnnnnnnannnncnnnnnnnnnnnnncnnnnnnnnnannnccnnncnnnannnnnnnnannnnnncnnnnnnnnnnnnnnnnnnnnnnannnnnnnnactgnnnnnnnnnncnnnnnncaagcctnnnnnnnnntcnnnnnnnnnnnnnncnnnannnnnnnnnnnnnnagcagagannnngnnnnnatnnnnnnnnnnnnccnnnnnnnnnnnnntcnnncannnnnnnnnnnnnnnggcaagnnnnnnnnnnnnnnnnnannnngnnnnnnnnnnnnnnannnnnnnnnnannnnncnnnntcannnnnnnannnnnnnnnntnnnnnnnnccccccnnnnnnnnnnnnnnnntnnncnnnannnnnnnnnnnnnnnnnnnnnnnnnnnncnnnntnnnncnnnnnnnnnnnnnnnncnnnncttttttnnnnncnnnccgcccacnnnnnnnnnnnnngnnncnnnnnnnnnnnnnnnccactnnnnnnnnnnnnnnntgnntanncnnnnnnnnnncnnnncngnnnncnnannnnnnnnnncnnnnnnnnnnnnnnnnnacccnnnnnnnnnnnnnnnnnnnnnnnnncanacnnnnnnncattnnnnnnnncgnnnnnnnnaannnnnncnncacacanngcnnnnnnnnnnnnnnnnnnnnnnnnnnnnnnnnncnctnncaannnannnnnnnnnannnnnnnnnngnnnngnnnnnnnnnntcnnnnnnnnntnnncgannnnnncntaannnnnnnnntcnnnnnntcttnnnnnnnngnnnnnnnngtcacnnnnttannnnnnnnnnnnannnnnnnnnnnnnnnngtannnnnnnnnnnttnccnnannncnnnnnnnnnnnnnnnnactnnnnnnnnnnnnnnnnatnnnnnnncttcnnntcgtnnnnannnnnnnnnnnnntnnnnnnnnncnnnnnnnnnnnnntnnnnnnnnnnnctnnnnannnnnnnnnnnnnnngcc

SEQ ID NO: 2721 - DNA, 407 bp, Zea mays
  misc_feature (398)..(400): n is a, c, g, or t
gggtcttggcggccatgcatggggcaacgatcgagatcgacccggggcacgacggcggccgacggcggcgaggagggagacgatcgatccaagaggaggtgtgtccgtgcgtacgtgtgtgccgtgtgcacacggcagcgagcagctagggcatatgcatcatttcagaagagaactagctactccgatcaagatgagcgacgaaggattgtacgtatattgctgagaggagatcgaagagacggtgatgagttgcattggcggaaaggtcgatgcatgcgtggatgatcagccaatcgtacgtagtacgtgtgtaaaaggtcggccggagcgaataatggtcgtcgtcgtgcatgtctcgatcgagacacctctctcgctcgctcttcctctcctannncttaaaa

SEQ ID NO: 2722 - DNA, 360 bp, Zea mays
ggagttttcttttctgctgatacaatgctgaaggtggggtcaatgtcactgcagtgacttgggtgacctataagcactgctcatattgtgaggttctcttggatattcaggaaggagccgcagatgttcccgccaagatctgggaatgtggcacacccagacagaggattcaccttgcccctggaatcgatgctgacggggtacttgagcaggtggcccttcatctcggtcacatggctggagatgaatttctcccagttctgctgtccgatgtgacgcacctgcctcgtgcactctaggctctccggtctggtgaagctctcctcaatggctccgatgtgctctgcccatagagacatc

SEQ ID NO: 2723 - DNA, 357 bp, Zea mays
gactgggtgtggcacacggaggacgacctgttcatgaacggcgccatcttcaatccgtccggcggcgcccccaagcaggtcgacaccaacgagtgggtcaagcccaagccaggaacctacgttacaaggctcacccgcttctccggcacactgtcctgctgcacgggcaagccgtgctgaaggccggccggtgggcgtcagaggctgcttcttctagctcatggcctggccatgccaggtcgcgatggctgcgtttcatttcatggaagaaagcaaggatggatcacaggttgtcgttctgctaattaatctacatacgtttgccttcaagtactgtgttgtggcattgttacacat

SEQ ID NO: 2724 - DNA, 449 bp, Zea mays
ttctcatctcaccgcaccggtaatggagatcaagcagagcagctagagcgtactactaacccgagcatcgcgaggacgaagatctgccagaagattggccacgtcatcttgggcctgaccttcctgcacgcagccattaattttccacagtcgcatgcatcgtgatcagtcatcatcagtgcgctagctttagctcgatagatcgccagaaatcagaaatcagcgacgaggacctctcgaggacgagggcgaagggggcgatggagagcgtggcgaaggcgtggcggtagacgacgagcacgtagtggctcatgccctggttcagcgacaccttggtgagcacgttcatcccggcgtagccgaactggagcgagatcatggccacgtagggcttcgccttctccacgaacccggcgcaccgcgccatggagatccttgcttctcactcg

SEQ ID NO: 2725 - DNA, 364 bp, Zea mays
ggattcttggtgtccagggcttctctgctctgcccctgcattgtttgcagctgtgctacggattctttggatttgcagtggcagccaatctgatgagggacctcttgccaccaaagtacggcaaatgggttccattaccaatggcaatgggggttcccttcctagttggtgcgagctttgccatcgacatgtgtgtggggagcttgatggtcttcatctggcacatcattgacagaagtaaagcatctttaatggtgccagcagttgcatctgggttgatatgtggcgatgggctttggatcttccctgaatccttgcttgccttggccaagatcagtccaccattgtgcatggcattcaggtc

SEQ ID NO: 2726 - DNA, 457 bp, Zea mays
  misc_feature (385)..(432): n is a, c, g, or t
  misc_feature (441)..(454): n is a, c, g, or t
agaggatggtgttcggtcaggtggtgatcggcccgccgggctccggcaagaccacctactgcaacggcatgtcgcagttcctctccctcctcggcaggtaagtacgccgtttagttcctcaccgttgctttggttgcccctcaagctgctctagttaagtcgaacacgcttgaccttgatttgacccgctgcgtgatgccgtgattcgattagtagttgcttcggttgcccctcacaagctgatctaggactctaggtaagtggaatacgcttgaccttgacttgacccgctgcgtgattcgattagtagtcaataatagtgccctcctctgctaaggttgatcgagaatgttaactgataccatattgcttgtagcagaagttnnnnnnnnnnnnnnnnnnnnnnnnnnnnnnnnnnnnnnnnnnnnnnnntcactcacnnnnnnnnnnnnnnctt

SEQ ID NO: 2727 - DNA, 373 bp, Zea mays
gatcgaggccagcgactgtgttccaaaactaccttggcgatggcagtcggttcgtgccatcgaggaggtcacagatttatgggccaacactgggtgcagatggtcgcttgtggatggaaggcttcaacattgtccagtgtggaaattacgcacaatcagtacctacggccataccagttgctcaggtgcctcagctactttaccagtcagaggatgaactagcggcgaggcgaacacgcagtcacatcacaatctcatcgtcagttgggtcccctataaacccgctccagcgctctccgatcagagcgactccattgcgagtcggttcatacccccggtcgacagaggtgtccgtctgtactgctgtgaatat

SEQ ID NO: 2728 - DNA, 351 bp, Zea mays
tagagtaactcatgcccaacccatattaggccggtatcctcatggttaaagtttgttttggtatattcttacctaaagagtcaatatcttccaaaagaacacggtgacaatggactttgaaaaaaaaacgattcacttgtgctagtatcaaaatttcctacaagcttagtttatatgtaacttttttctgtcattacatctcggtaacccttaactcctgaaaagtgatcatgggctccgcaatcggcatcgtcatgaatggtacgctcttgggtcagatagtactgtaccagaagcccgctccaaagaaacagaagaaagaagattaagcaacatggagaagctgcagaa

SEQ ID NO: 2729 - DNA, 788 bp, Zea mays
taagtagatgtttgtggtattgctggggtttgtggtatctttgttaatatccattgctcatgttccttccttggcttctgaaggttcttgaacaaaaggaagaaaggatcgcccctgggactctatatgggtcaagccatacgtacgtctccctaaccacaaaaccttttgcatgctccccctgcttttgtatttattttaagcataaaaagagatgtatctcatgccgtgagtgctcgctttacaggtatgtgttgggaacacaagataaatcatcagctccgaaaagggtgagtgttggagctgcctccttctacccccatgggtgctctttgcaactaggtcgtttccctgatatttgatatacttggtcttcgtataaactcgtgttaaaaaaaatcggtggcaggtggatctgcttaagaatcaaaagtcagacaaggtggatgtcaccatccaacccgaggaactggaagccatggatgatgttctggcagccaagtaacgactgatgtctttgttcagttgagatataagtgtttttttttgttcttccgaagtcagacctgttctcttccgataatgcaacaggtatgaagaagctcgagaggaagagaagcttcggaaccaaaaggaggacttcagtgacatggtggcagaggtatgtactattcttccatgacacttctgatttggaatagctgggctgattgacacgagtgagcgctctctgcagaatgctcacaagaggaagaggaagcaagagaaggaaggcaagtcgaagaaga

SEQ ID NO: 2730 - DNA, 341 bp, Zea mays
ttctcagcgcgcggtggtcatcttcagcacgagctcctgctgtatgtgccacacggtgacgcgcctgttccgcgagctcggggtgaacccgacggtggtggagctggacgaggaccccagggggaaggagatggagaaggcactggcgaggctgctcgggcgcaaccccgctgtgccggcagtgttcatcggcggcaggctcgtcggctccaccgacaaggtcatgtcgcttcacctgagcggcaacctcgttccgcttctgcgcaatgccggcgcgctctgggtgtagccgtgttgcatatatatgtagctagccgtgttccattccatatgcatgctat

SEQ ID NO: 2731 - DNA, 362 bp, Zea mays
acacagcagttgacagttgaatcaaacctctaacattctactacctctgtcccaagataaatgttgttatcgttttcaattagtcaactatttttaactttaaccaaatataaaaaaattattaatatcaacagtatataattaatatcattagattgatgactaagacactagtataaaaaaatgtcaggtttgttcttcttgcaacgacagaaattcacacaggtttgttctgcttttggtttagtcattccttgggccattgcaaccaacctgtgagaagttagaaaagcggagacaagaactgagtcagatctgtccactcccttttctcccaccggttccctcgaggcggatataaa

SEQ ID NO: 2732 - DNA, 502 bp, Zea mays
gcaatattcatgagatcagatctgaatttatctgcagaagaatgaaaaagaatattttcatgagattgatgggcatggtggcatattcctgagagaatccatgagatgcaagataaagtgaatttgaatccatatgagattaaatattactcaagaataacaaattattattgacgtcaaatcctacatgctatgcaaaatacaaatttattgataaggaaaagaatggctcaaataagatggtgtcttatgaacactgaaaaactatgctttccaaccatgagattgagaaaataacttacctgtattttctttgttgtccatggtcttttttagcaaagaatctctggcacactcgagagccattctgtaacctaaaattttacaggatgaattaagtgctggagacgttgaatctcatcataaaaaacaatggttgtagctttgcagcagtgatctagaatgcatactagtagttcctcagaatacacactagctatct

SEQ ID NO: 2733 - DNA, 374 bp, Zea mays
atgagtacatacataaattaatagcgactgcatttttttcttatacaggaaccatattgaaagagaaggttgcccttaagtagatatcaacagcagaaaaggaaatatcatcctctaacaagattaacttttcatggtccggtatcaggagaaattgtagatcaattttcataacaacaaataacttgttttttattcaattgactacagaacaacgtttaggagaaggctgcaagggagacaaaaccacaccaacatcaaacatgtcagcattataccatggacaggcatgtatagctctgaagaacacacgccgtgctgcagaagagttgcagactatttctgcctcataggctagataacagcgccacaat

SEQ ID NO: 2734 - DNA, 309 bp, Zea mays
tttttttccatattctaagtttatacccgatgtataaatctacagatactttcttacctttgtttagttacgataaactttatccatcaattattttgtatacttttctaacctatgtaaatttagaggttaatttggactgtttaatatttaaatgttgtgggtggattaaggggttatttagtgttttaagtacaaacagaggaggacaattcatgcacatactttagctttttattgcaatgatagataatttatatgaagtttaggacttattttggatataatatgtcagaatgacagagattc

SEQ ID NO: 2735 - DNA, 501 bp, Zea mays
gtcatttgttttcctgatagtgtactgcgcagtaacattttcgctaggtcagatagctgttggcgaggcatgcacagtggatcagagggacaagatcacaacggactgcagagagttcatcaagctgaaaggccccgtcacagccccgtcgtacactgacgactgctgcgtcgccataagagcggtgcccaatctcgacatggagtgcatcattcgcctgctctccaataaacagaagaagaagtacgacgtggacaagatccggcggctcggcagagttctctgcaatccacatccggtgagaatgcgctgtgctgcagaaacgtacaaaagcatatcgtcaattgtttctgatggttgatgaaatatacatgcattgttcatccttgcttgtagctaattcttgtccttcaaacatgtcgtctgcaggtgatgacgtaaaatggggtgtggcagtagtttctgatggagtgcatcgcgtcaacaatatggagcttgaac

SEQ ID NO: 2736 - DNA, 506 bp, Zea mays
  misc_feature (146)..(147): n is a, c, g, or t
  misc_feature (373)..(375): n is a, c, g, or t
  misc_feature (490)..(494): n is a, c, g, or t
tataccctgattaccgctacccgctgcgagggcaagagaaaaagaggaagattgctgcttcggtcaccccagctgagcctgtgccgaagagcaaaaaggtgaaggttctgacccaccggccgcgttatattgaaccggtcgtggtnnctgaatttggcgcatggtcctcttcagcagccgaagcaacacaaactgctccgattgcacagagcgctgaagaggcgaccgtagtgccgaaggtacccatagccgagccagtcgaggataaggttgataaggctgaagagccaaagtttgaagaaataataaaagtgcctaaaattctgagccctctaacagagacaaaactgccgaaggtgcaaaaggcttctgnnncaactcctaagaggaggaggatggccaacgtgctggatgctgtgctggagactacaaaggccttgagccctgctcctacaaagaaaattgttgaggctgccaaagcgcaagctannnnnaaaactgggcaa

SEQ ID NO: 2737 - DNA, 480 bp, Zea mays
ctgcaccaaaatggctgcttgcaagcaactatgaactaccccatgtcttctaacctatttacgctgacttttgtcacgatgcatgcattttatggatatgcagtgtgcagtgtgaatggcctggagttgatgtaaccttctctgttgactccggctcgaacccgaactatctggctgtgctcatcgagtacgaggactgcgagagcgatctttcagccgtcgacatcatgcagagctcagcagggcaatgggtgccgatgcagcattcgtggggtgcaatctggaggctcgactctggctctgctcttcagggcccgttccacctccgcttgacgttcagctcaggccgggtactcatagccagcaatgccatacctgcaggatggaatgcgggtgtggcgtaccgggcaggcggagtggcggtgactagggccaggcccaggagtggtggcagccaggccggtgaggctgctgctggaa

SEQ ID NO: 2738 - DNA, 377 bp, Zea mays
aagaagggcgcgtccatggcaactaacgctcgcgtgtcgcccgcgctccccctttctatgtcccgacgcgatgggagtggaacaccgctgccgccgaggaggcgagaaagccgagacgagacggacgacggatgagagtgagacaacgccttgtctctcgcctttatcggtatgccggccacggccaggccagcaaccactccgcacaacctcagaagcgaacaagcggtacggtgccgggccggcagttggctgcgcaaccaaaccactcacctcccgagcgcgggtgacgcacgcacggcggagcagtcagagcaagcaatgggggtgggaacgggacgaggctctctggctgctcactagaccctgagcttaaa

SEQ ID NO: 2739 - DNA, 596 bp, Zea mays
aggctcctcccattcctcctctcccacgagctctcaccgctcctcgcggcggcaaaaacccccttgaattccctacgcgcccgcctccaatcccgccagtccggcggcgacccagggatccatggagaggtacgaactgctcaaggacatcggttccggcaacttcggggtggcgcggctgatgcggaacaaggacaccaaggagctcgtcgctatgaagtacatcccgagggggctcaaggtgcggcgcgggcggcctccgattcaagttctcgcgtttgattccggaactttcgatcttccttacgggttaatttctctgcccgcagattgacgagaatgtggcgagggagatcataaaccaccgctcgttgcggcaccccaacatcatccgcttcaaggaggtgagccaaacagaaagggaattggatttcgcgtacggagtgtttcctgcacacctcccctgctgccgctgaagcacgttttttttctctaccttttttcttcttcttattgttcgtttcatcatttaggacccctgtttttttcccctaggtcgtgctcacgcccacgcacctcgctatcgtcatggagta

SEQ ID NO: 2740 - DNA, 336 bp, Zea mays
accgagacctcgccagctacaggatcttcgactcaaccacagagaactgggctctaagcaaggagctgcaggataaatgtggcaaagagataaaagatagcctgcagggcatatcatttgaccggagcgtcctcatatggcacatcgccaccgatctttgcttccgctgctctgacgtcgtcgattatggccaagaagaggtagaagatggaggaggagcagaagggccagaagaagaagaaggaggaggaggagtcggaggagctggacagggaacggaggacaactacgccgtccgagcattacggctccaaatcaattgcacagaggccatat

SEQ ID NO: 2741 - DNA, 625 bp, Zea mays
tcattcacaccaagagacaacttcaatgtattgtagatgatctcgaaccaacactgcaagaagaagttagatatgcattggagacacctcttttcagaagactcaacagagtacaggccaggcaattcatctcaacatacgagaaaagcactacgcgtatcaatatgctcctggagttctcaaaattagacttcaacatcttgctcaccctatactgtgaggagctaaaagatcttacgctgtaagaaccgtcattaatagcataccaatcttgtactacttccgttcttgaatatttgtcgctcgttagtttatttttgtactaaaccgtgataaataaaaaaaagatagaagggagtactaagttctctcaatgttccacattaattagttcactcacatttccatattattttgtactaagaccatttacattgtatttaacaggtggtggaaagagttccaagcacaggctaacacgacaatctatgcacgagataggatggtggagatgcatttctggatgatgggagtcttctttgagccccaatactcctattcacgaaagatgctcacgcagttgtttatgatcgtgtctgtactcgatgacttgtatgacagccat

SEQ ID NO: 2742 - DNA, 771 bp, Zea mays
  misc_feature (735)..(736): n is a, c, g, or t
  misc_feature (751)..(754): n is a, c, g, or t
tgctcgaaaacaccttgctccctggggctctgtacacatgaaagaattgcagcgtgtcacagcaacattggtttttagaagcaatactaattgtactccatacaaggttagcaacattttcactgttctcagttatgatatgccactgtgtcacggaattgggcaactgctggaggtagaattgtagaaataccatgtttctgtatggcatctttggtttgtagctgacagtcaatttgagctgagactagaaaagtctttttgagaatatgacgactcaaccaaattagattttgtttcctggcttgagcatgaattttgaaacttacatgtattgaacgttcatcggttatttgggatcgactcctggtggagtactgctgctgcactacaaatgttttgcatacctgaacctgatactgttttctatttgttagatattgtttgagcaagaccgctgggactatcttgttgacattttcaagcaagatttttgcaagttatatggcatgacactagagccgctgctgaacatatatctgcaagcaggcctgacagctctcaagaccccgtatcctcgcatgtgtttcacttacttttgtctatggtcttttattgctaaaatacagtttgctagtattatttttgttatggtatcctgtattgtccttgaccatttatttaaaggttctgctctgagggtagctgtcccaaagaagaccccttgtctctggnnggcttcaggaaactnnnngagcctctgcccttctc

SEQ ID NO: 2743 - DNA, 361 bp, Zea mays
  misc_feature (353)..(358): n is a, c, g, or t
aactaattaaagagtatgaaattatcattaaaatcgaacagttatgttctctagagctcatacttcaataagaaatccaagaataacagcagaatacatagaattagcccaaaaatcacaatatgagagaaaactctacagtcaggaccttccatagtcttttctacttcagttcaggaaaaaaaaagatgtacagaacgaattcagatgagcgagtcatatcaaccgttagcatgtaagaataaaaaaggctattcactaacaaagctatataactcacgctgattaatgtttgagatgttttggcagtggaccctgcagccagtttcaatataggacctcattctgacagnnnnnnttg

SEQ ID NO: 2744 - DNA, 464 bp, Zea mays
acccaacgacactcagagacaacaaatcatcccctgtattcacacgcaaacgagggcattcaggcaacaacatgttccatgagtttttcaacccaacatgtcatcggtgttcccctggtttagaggatctgccactcttctcctgcctcgccagaggcgtcaaggtcgtagtcctcgttggccatgctactgccagaacaacagcacagcccatcatcctgtttatacatttgcttcgatggctggactgactgcatgacagtaaagagtggcgctccattggctttctctgccaactcagatgcccgagaacagaaatcatcgaaatcgtctgcgtaaaaagatgcaaataggaaacatagggattagagcttgaaaaaaccaactggatggcatctgagaaactacaacggctcacctttgtcgcgacagtaaaaaccaatggctagggatgggtctatttg

SEQ ID NO: 2745 - DNA, 464 bp, Zea mays
  misc_feature (255)..(255): n is a, c, g, or t
acccaacgacactcagagacaacaaatcatcccctgtattcacacgcaaacgagggcattcaggcaacaacatgttccatgagtttttcaacccaacatgtcatcggtgttcccctggtttagaggatctgccactcttctcctgcctcgccagaggcgtcaaggtcgtagtcctcgttggccatgctactgccagaacaacagcacagcccatcatcctgtttatacatttgcttcgatggctggactgactgnatgacagtaaagagtggcgctccattggctttctctgccaactcagatgcccgagaacagaaatcatcgaaatcgtctgcgtaaaaagatgcaaataggaaacatagggattagagcttgaaaaaaccaactggatggcatctgagaaactacaacggctcacctttgtcgcgacagtaaaaaccaatggctagggatgggtctatttg

SEQ ID NO: 2746 - DNA, 519 bp, Zea mays
gggacgcggaacgagtgatgccgccgaagtgagcagctgactggctcggaatctcaacctccgccgtgaatatgctgtacacaggcctgtgatccgagaaccgagactcgccgcgcacgtagcatagctgggacaggcctcgcccgtaccatagaatccggtcacaccttcagaaagcaacacgtatcaggaggtgaacattttcccatgcgagcgatcaaaggtgactattatgaccaaaaaaaaagttcagtttttttttgtgtgtgtgtgggaattttaccatgctggagtccttcgcttctcgttcgggtgcatgtcgtcgccagcgtatctatcggagttgtatgagtacttgtaggtgggaggaaagtaaatccttccttctttccagcctgcaaagacccgaccaaatctctgctctatgcgaagctgcagcagaaatttcaatcatcagatcaccaaacaaaggcgcgcgtctccataacaagaggcgataagttcacatggcaatagcta

SEQ ID NO: 2747 - DNA, 610 bp, Zea mays
attgcattcataattcaatccatctgaagcaagggcaagtgattctcgacgattcaactcagtgtatttcagaaaagaagcagcacgccaacactgaaacaaataataaagaaatttatcatatttcgtaaattcaatgtaaaagcaaacaaagtaacaccggttggtgcctagcttaccaaggctatgttgaacgcatgcagtatgctccgtggctcccgcacaactaaatgattatttaaaagatattcaaggaactggttggccagaaagagtacattatcctgcagttgtgaataatgaaaaaatagttcagaaccagaggatcagatacttccacaaataatgatatcagaaggacactaaatgcaacaataggagcagagagggagggaaaaagttagcaggaggattatacatactggtagctttaacaccgtatttagctttaacagctcatgcttaagttcggcgtgaagacttttaggtgtcctcatgttttccactccttcagaatgaaattattagaaaaatgtaatatctactcctacagaacaaaaatactactttcaaattgtaatttcatattgttttacctgtctcaggaagt

SEQ ID NO: 2748 - DNA, 323 bp, Zea mays
gtcggggaagtggtccactttggagacttcacaagcagcagtccgaggttcggtgcatattgggtcaataaagggcggatcgcgggtgcgtttcttgaaggcggaagtcgggaggagtacgaggccatctcgatcgctgttcggcgggaagctgtggtcacagacatgggtgaactcgagaaacaaggcctggcactcgccattcaggagagccagaaggaggtgcctgacagtgggcttgctgttgtcggaaaacctacttatgcgtggcatgccacagccggtgtcattgcagctgtgtcgattgctgcaattgggtattg

SEQ ID NO: 2749 - DNA, 342 bp, Zea mays
agcagcacgtagaccacccagtgatctgagacacaaacaaccacttataaacaacctgtcaagctttgctaaatgctcaaacactccttttgttggaagtgtagttaattccatattatatttcaattctaaattcctcagtgaagtaaggccaccaaggcaaatagctaaagcttcatttgtaatactgcatgaacaaagagaaagactacagagtcctgacggtagaactagtggcatctccatggccctcccataaatgaaacttatcctctgctcatggcaaaagagccatgctttgatgatgttttctttcatccataccttttctcctccttcctc

SEQ ID NO: 2750 - DNA, 354 bp, Zea mays
ttgttgctccatcatcttttgtgaaagatcgaaacaagaatgaccttaatgtccagtttttttatgaagtccagttagtggtatccgtggcaactaaagaggacactttccatcttagaaccaatgaccattcaaaatgtgaggaaattaaattaatcgaagattaacttattattgactatttgaaaccaagtcagacatttatgatgcctcatatgaactatcgtcacacatactactaccaaccaacttttatcacattagaaactcttgaatcatatggttttcagtcatatggtccaattgtcaattcaagagattatttcttggtgtcatgtccatattttctggtga

SEQ ID NO: 2751 - DNA, 354 bp, Zea mays
gcacgtcgtcctcgttggcgagatgacctccaagctccaccagacctcgcgctccaccgacgactggaggcctctgccccttcgggatctccttattcacaaggcgtcgaggccgccgtcgaccacgtcatgccgctacgctaggaggaggcgtcgaccaacatcggcttcgcagtggcctaggcgtgccgtgctgatgtgctccgccgtttcgcccgcctccctccccaaagctgcttctaggccgtcgcgatggaggcaatcagcaacaccaggttaaccctcgagatcctggtggccgacagcgtggtcctcgtcggcgagatggtgacctccaagctcttccaaatctgg

SEQ ID NO: 2752 - DNA, 369 bp, Zea mays
taaaaatcctgcagactaaaatctccaaaagggagaaacaaccaaataccatcttatctgcctacaatcattttttttctagcctaggaaaacgtttggtctcgtcttgagccaatgcaccatctccttgtcaaggggggaattattcaacacggcatccatcattggactgccaaagtatctcggatcactcttgaacacccatatcctatcctttggccatggtctctgtgcctgtttttcctgtaatcaaccaccaaatagtcaagggaaaacaattcgtaagatgatggcagtcttcacaatttacaactttttctaggcaaagacagtgatcactgggatgtaaagtaaaagaagcacgcatgt

SEQ ID NO: 2753 - DNA, 604 bp, Zea mays
  misc_feature (45)..(50): n is a, c, g, or t
  misc_feature (530)..(534): n is a, c, g, or t
  misc_feature (591)..(599): n is a, c, g, or t
ctttgcgttcatcggcctcgtctggatcgaacaggtagtcatacnnnnnnattaacacagcaaataacatgatcagtcgagagttgtgtgttcatgaccccgtttcgaaatataggccgtttttggtcttgtcctaagccaatcctttgtgactttgacaaagtttatagagaattaacatctgcaataccaactaaaatgcacttaccaagacatttaatggtggatttagctaacaaatttgattttggcacattttctacaaactttgacaaagctagaggatttttttgacttaggacaaaactaaattcacatgcatttaattttggaacggatatataatagtagagatgttcagcaaagagagggattcgtttcacataacatacgttagctcatcaccagcgcaaacttttttcttcgctattagaacaatacgactttcatcatgtccaacactcataatccttgcatagcagtttggtgtgcactgcatgaaaaaaaaaggtcaactgagcatctatttnnnnngtaaacatatatatggaattaggcatatggtccttacagaatgattgatcagtcgtnnnnnnnnnccttt

SEQ ID NO: 2754 - DNA, 504 bp, Zea mays
ggatcatcctggccgattcttccaggttttgggaatgacgaggtcctgccctcaagtccagttgactggtgaagcctttgattggttgatggacggctgctgctgctggtggtcgggactaggtggctactgcgatttgggtcgctgggatctccagaacctcggctgcttgacagaagagccttccttgatgtgcttccattccgagatgatgaatgctttcttttatctgaatcaacagcctggaatacgttgtgaaaagtgttatgcgatgagctctttagtcaatcaccgtgggattgtaaataaattctttggtaaccaccatgccctgaatatgactaaagacggaggaacaaagaaattcaattacttcaagcacccatattatctgctgactagagctacatattttcaaggcactaaaagaaaaatttagggctaagggctagtttgggaacaccattttcccaagggattcctattttcccaagggaaaatgaa

SEQ ID NO: 2755 - DNA, 346 bp, Zea mays
cgacgtcaagcatctcatgaagttctgtggccctggcctatatggtgggctgagcagacttgggaagctgctcaaggtcgagcgtgttgggaccggccatcaggctggttctgattgtctgctgaccctgcagtgcttcatgaagctcaagcagttgtacttaaaggagtctgtcaagttgtatgatggtttgttgtttgggcttattcctggggaagtggagatcaaaactgctcccccgcccattggatgagtaatggtagttaaataacaagattctgattgagaaaaatagggaacaaaatctatcatcggcgaatatatgactgatctgaggatttcctgt

SEQ ID NO: 2756 - DNA, 668 bp, Zea mays
tggatggtgaggatgacgatgatgaagacgatgatgacgaggatgatgatgattatgatacaaaggtatggaaacttttttctctaatgaggaatatcatttctacatcctttctagattctgagtatgttttgacatttttttatttcccctttggaacagaagaacaagggaactgctggaggggaagggcaacagggcaaacgacctacagagtgcaagcagcagtgaggtaatgcacatcgagtgtcagtagacattaactgtggagcaattaatttggttctacttgatgcaatgtcattgagttgattttgtggagcccttgagagggcgcttgttggttttacgaaattggtgggggatgtttcgggtacatggtgttatatgtgggtagttttgtcacttgttgtgttgggtttcagatactgtgttcttatgcttggagtgaagatggttgccactctggtgtgtcttattgtgcataccagaaatttagctctaggtaaaaggctagccttgtgcctaaatgtttttgcaaattgcatcttgcacatgggtcttgcattatctgttgtttcacaatgaggagacgttggtcagtgagtgcgctaggcctcatgggggtaattgtgtgaagattttatttttgtactgctctagcattc

SEQ ID NO: 2757 - DNA, 556 bp, Zea mays
gaccacaacactgcagaccttaaaacttcaaaaggtcgcttccatctccaagaagcttgcaaggcaaaagacatttcagaagcgagctgcattagcagagtaaagcagagcaatagcaacaactagcagatgtgaagggaacataatagcaagagatggaacatgttcactacccggggatcagctcgtactcccgcccggtctcctgcgcccggcgtgtggcgatctcccttcgcacggcgaccatgggcgacccggccggcacccgtagaaccactgatgacgttgccttccccttttcctgctagtcccaacacgggaaaaggagattttgcgctagccccaacgtggaggccgcgacatcgaacgcccccgttgagtgcgccactggaagggcaggagcagggccagcgactggagcatggcgaggagctagcgcagcgcgagcagtgcgcttatccggcctgttggatccgccgcgtgcatgctcccagccctagccatctttgcaatcgccgcctctccctcctatcccttcatctccctccatgtgtgt

SEQ ID NO: 2758 - DNA, 374 bp, Zea mays
aagcactaatggttcagcaaaagaaatccctaatgacaagcctgccgtcactaagcctagtccctatgaagaactgattggagacatcaaggctagcctaggaagtgctccgacccctacccagctcaaggctgtgctggcctcatcaacccttcctccccaggacgtgatgaatgctctcctggaggctctctttggtggtgtgggtaagggattcaccaaagaggttgtgaagaacaagaagtaccttgcagttgctgtgccagatgagggtgcccagacccttctggttcaggccattgaggcttttggtgggaagtgcaaccctgaggcgctgaaggaggttcccgttgtcctcaaagccctctacgatg

SEQ ID NO: 2759 - DNA, 447 bp, Zea mays
  misc_feature (59)..(61): n is a, c, g, or t
  misc_feature (392)..(394): n is a, c, g, or t
agaggaaggttgccagccatcgaagacgtctccagtcagaatatggtttatccactccnnntgatggtgctaacagcaggcgatcttctggtatgtaagaaggcagggaaagatacccgcttatttgacagtatcatttctgttgtatttgaacttgcagcatcattgacttccacaactccatatattactttgggcactaacaatgagccatgctgtacccctcaacttcattcagtcttcgctgctcctatattttgcaagctaggcgcgcattttaaacagtactctattttgcagaaagaacatcatcgtcgtcggagcggaaagagaggcatggcgatgcacatgatcatcctaggaaacggcgccggagccagagtagaagctgnnnccctccaaggaagtctcaggagagggatcgagagcacaatcgcggtagggacc

SEQ ID NO: 2760 - DNA, 196 bp, Zea mays
ccgcacaccggatccaccgctccctcccccgcgatggcctggttccaccgagacaactgcggggctagggtttggattcgtgggtggagcccagtgctagatccagcagggggagggaggtagaggaggaggggagggaactgctggtggtcggcagtgggcgaaggcgccaacgacaatccaggatatggattcc

SEQ ID NO: 2761 - DNA, 646 bp, Zea mays
  misc_feature (597)..(600): n is a, c, g, or t
tctcctgaggaggaccagcggctcagggactacatcctcaagcatggcctcggctgctggagtgctgtcccggcaaaggctggtgagctgctgctctcctttctcctctcctctcctctcctctccttccatgcacattgctggtgcatgtcaggctcctttctcctctcctctccttccatgcacattattgcaactgcattgttttcccaaaaaaacaaaaaaaacttcattcttctgatcccgaatggacttggcttctcaaaaaaaggtctccagagaaacggcaagagctgccgcctgcgctggatcaactacctgcgccctggactgaagcgtggaatgttctcccaggaggaggaggacgtcgtcatcgacctccaagccaagctgggcaacaagtaaaactctctctctctctctctctcccatccctgcctaagtgcctagtgaatgttttccaaatctatgcttcgtaatggatgtgttcaattcatgttgctgatgaattggtacatacatacgtacattacgtcaggtggtctcagattgcgatgcatctgccggggaggaccgacaacgaggtgaagaactacnnnnctcgtacctcaagaagagggtgatgcagcaggcccagggcgcgtcg

SEQ ID NO: 2762 - DNA, 442 bp, Zea mays
gcagactactccatagttgtctccacacgctttaccacccctgtcctcaccaccgctgccatcctccactacagcagctcaaatggtgctgcaagtgtgccgcctcccccggcgcctaccgttgagatcgatttctctctcaaccaggctagatccatccggtaaagactactttgttttggctatcatcatcagactacctaacagcatcagctactgacgcattgagtcgttctgttacctaccttttgagcaggtggaacctgacagcgagtggaccaaggccaaaccctcagggttcctaccactacggtctcgtcaacaccacaagaaccatcaggctcgccaactcgcgggcaaccatcaacggcaagctgagatacgcagtgaacggcatctccttcgtcccggccgacactcctctcaaggttgctgatttcta

SEQ ID NO: 2763 - DNA, 705 bp, Zea mays
gcgcggacggcgatttccttggccccgagcacgtcgagcacctcgacgtcgacggaccagaagcaccagcaccagtacttgccgtacttggttggacgctccgggtggtcgagcgagcacacatgccacgtctcgccgccgtccagcgtcacctccacccgggttactttccggccgccacctggcaacagaggcaccaccaccgtgagtttctgttttagcccacaaggaaactaggaaaataggcttggaaggcccaatagaagcctcaaacgttgttgtttctttactgggctttaacatggagaaagcccgagctcaaacaaaattcggatcgctcttccttgactccgactcagatctaggggggcgtgggtgatgcaatgcaagatgggatgatgaaatgctgcgttgttggactcactcaccggagtatgcgtatcctttgatcgtatacggccgctgcgtcgtgagggcgttgatgggcagcacctcgtcgtgtcctggtgtggtgatcaccgagttgatgttcagctcgtttatcatgcactccggcttgtaccaccacgctgtacaacagagagaaacatttattagcgtcgtcgccctcgcacacgttggcgagcagaagaaacaaaactagaccgatgtacaaaccttcggcattggcgaggtcggcgtcgacgtgggacggcagcacccggt

SEQ ID NO: 2764 - DNA, 954 bp, Zea mays
  misc_feature (939)..(942): n is a, c, g, or t
cctaaactctagcgacatggagttctagaacattgcatcatttcaagaccttcgtctgtccaagttcgctgccaactactatgctactccggttcgtgatggtcacaggggtcgcagtcattctcgattagttggtattggtccttgtgactccaaattttctttatccttctgatccatgaaatcactgttttatattcactatcttgttttatattcacaattttttccatcctcaaggttcatgttgcaaagtatagaaaacaactagtttctaggcatggtctactatctgcagttttagttttgttgattactagattcagcccttttttgttggcaatttgctttgaactgccaacgatagtcactaaaatatactttaggtgttgtgtacttaaggtgttgatagtagagctcttgtttgatagtgtactgcagttgcactgaccactcttgttttcagttatgcgagtttacagaaatgcagtagagctgaaatgttgtgcgagttatgcagtagagctcttttctctctagaaatgtcgtgtgagtttacagttatgcagtagagatgaaaacagtggtttcgttatatccgaatggtaatttgatagtgtttcttgatggatgaatcaaatgtagagttgaaaaatattggctgttgtttgcactatgtatttttcattggacatttatgtttgctctgctttttcatatggtattttctcatttttctaattttatggtcatgaattttctcattttctaatggtctaacatttttaggattttatcttattgactcgggttaccctaaccatgaaggatacctagctccttacaagggaactaagtatcatgtgccagagttttgaagaggccctagccaaatgggaaggagttattcaacttttgtcactcgtctcttcacaacgnnnncgagcatccgtt

SEQ ID NO: 2765 - DNA, 541 bp, Zea mays
tacttgtcccagctcgttttcctgtgagtagtttctcactgtttgtgctcatgtttaggtattatttttacttaactttgtgttcgctctatactatgttttcagagacttgtcatataataacctgagtggtccaataccgggatctttggcaagaacattcaagtaaggcttaaactttgtgtctttccctatcccaagtgctaatatatgacagtaggacaggaaatgcaagattaagaactattctgggctattgatgttcttgcagcatagttgggaatcctctcatctgcggcaccaacaccgaggaagattgctacgggactgccccaatgccgatgtcctacaagctcaatagctcgcagggtgctccgccacaggcaaaatccaaaagccacaagtttgttgcagttgcattcggtgcagcaattggttgcatcagcatcctctccctcgctgccggattcctgttctggtggaggcaccgtagaaaccggcagatccttttcgacgtcgacggtaagcggacctccacgtt

SEQ ID NO: 2766 - DNA, 463 bp, Zea mays
tgattcatgttgccaatagtcatactaatagtaatacaatcagaaatagtaagagatatttatcagtcacaggcatttaaaaataatatcagccaaataagcaaaaccttcaggtacacatcatgcacactgcacagcccagatgaagagaacaaaagacactccacgatcagtgcaaaacttgggacaataaagtgtaaaagctaaacagcacgaatatttataaactagcactctagaagagagcaaggcaggcctggagcagtggtgagaccgtgagagctatctcaccgagtcactaggtcacgggtccaaaacagcctctccacatttgtggggaactgcttgtctcagttttaacgctcacacggaagcctatggcactgggtctgccctttttagcactctagaagagagcatacataaaggagactccaaatcaataacagtcaacagaaggcca

SEQ ID NO: 2767 - DNA, 557 bp, Zea mays
  misc_feature (546)..(547): n is a, c, g, or t
agcgaggaggaagtggccaggtacaccgccaggatgatgccggtcctcgccgtctccgtcatgcttgacggccagcagtgcgtgctctcaggtgttgtcaggggctgtggccgccagaaggccggcgctttcatcaaccttgccgcctactacctcgccggtatccctgccgcgctcgctttcgccttcgtgcgccgtctcgcgggaatggtactctcctgctctctttgcaacttcgattgggatccttcagtttctgaattacatcagggaagttcttgtgccaactctgaacacaacagggcctctggttcgggatcttgtgcggcctggtggtgcagatgctctcgctgctctccgttaccttatgcaccgactggaacaaggaagtaagcacgagttttaaggttccatacgcgctgtcattggatgttttgttctcctcctgtgttctgaatgttgctcttgggtctccactctgcaggcactgaaggcgaagaacagagtcttcagtgcggctcttcctgcagacatggaaacatgagnntctgtctggg

SEQ ID NO: 2768 - DNA, 732 bp, Zea mays
gggaacgcatttttcaaggatggcgacagcaggagctaatttcacgtctgaaatctaaaatccctaaagaagctcatgattcgttaattgaggtatgtttcattggcactggtagggaaaaaatgattcttttgtcattccattgttgttcactgattaatttgacttggttgaatatggaattattcttgttattttaaaattttaattttctttgtagtttctcttgttacatatgacatcctaaatattcctattgttctataaagcaaacacatatttctcatagtaacatttttacatttgatttgcaccatttatatttttccattttcagtcatttcatcccttgttttggctgtccttgtctggtgtggtgaggcaagcagagctgataatccaaactcacatacgaagggttatccaagcatatttgattggtctggtgctcaatggcaaactttttctctctcaaatacatccatagcaaaatgctttcatatcttgctttcaaggacttctttttctcgaaaagcgtaggagaactgcgcctcattatatattaagaagaaacaaaggtctatagaagacccagatatatgaattatgattataacatcagactggaaagatgaatctgtggtaggcgtgcatttggccattgtgattctctgttttgatatcaattttgtgaagaattataaatatcagaatggaaaatgaagttgttag

SEQ ID NO: 2769 - DNA, 470 bp, Zea mays
tgcactgtgttgttagccaaagctttacagagagtatgagcccctcattcatcatgacaacgtttgagtccaacaaaccaatgaataatacagataaaggggtgactatggtcgggacaacagaagtcactgttatcgattgtggcgcaaaatatagtggatgcacaattggtataggaggacctctccttgggtgtttcttccgaaaaatttgaattggtgtttgtccaaaatttgcaatttggtcctcaatagcggacttttgtaacatatcatccatgttctccaaatcaacggcaccctcatatgtcagataataaaatatgtttgctgcctgttccaaataatagatacagatttagcaaggttaagtttgagcacagagaacccactgacccatgggagtttttaacaaaatatgatatacgtacctcaactgcaggcttgcctcgctgcttgtaaccaaatat

SEQ ID NO: 2770 - DNA, 379 bp, Zea mays
aacgaccccgggtggctcgtcggcgagcagaggcacgccattttcttgttggcggcgccggcaggtctcgggattctggcggtggcgggggaagggccagagcacggcgcggagggaatatggttgctgtagggtgctcgactgctccctgtggtggccgtggccgtggccttggccggggacggtgccggcttgcttttatacgcgagtacgcgacgcgagagcgggcgagggtatctgggcatgtgcgctgacgcaggatcgcatcggacgtagtggaacgcgcgagtgacttgcttgcttgtttgcattaggggttatgcatgggctgcgccctgcccagctgcatcggccgtgacacggaccaccctcctttcgt

SEQ ID NO: 2771 - DNA, 686 bp, Zea mays
tgacagatgcactccatgaagagtctgtcctttcacatctctcattaggtacttattatcattacggcctgcttctcttgtgatttgcatagagcaatgtccaaacgttcaaaaattccgtacctttggcaggaaagaacaacccaatttctagcaatacaatgcttaaccttctatccaaacttgcatctctcacaaggttagcagaaaatgtccatatcagttgtatagttactaaggtgttggcaagtatagaccagccatgcatgttgttcttgcaggttttcagaactaagcctgactggtataaaactgaataagttaatggttgataagttgtgcctccttgcacaatcctcgtgcctatcaggacttctgctaggtggaacttccattggaccggtaatttgctttccattttcttttccaaagaaaggctttgcgttcgagaaaaaaaaggctttgctttccatttgtggttagtgtttgcaacctgtacacaagcaatggtactactgtttatgcaggtggagacaactaggcttactgaggcattgtcttgtacatctcaagatttcctaaggttggagttgtctaattgtgggctcacaacacctgatttcacacaaatctgtacaaatctctcccggatcaatattcttgagttaaaccttggaggaaatcca

SEQ ID NO: 2772 - DNA, 838 bp, Zea mays
ggaagtctgcatccgccgtgtacaaaaggttatccaacccaaccgccctttgcagttgtctacatcaaatataagaatggatatcaatgagcatgcatggctgaatgcaatttgcatttgcacaaaaaatattttttgcagaaacaaaagtaatcatcatttaagcttacgttatgggtggtgtgcattcaaatttgtcaggtctaaaccaaataagtaacgaagttataaaaaatagtgaatacttcagctaccttgatttctccaaatcttgaagttcagtgacccatccgttgtagcggagctggacagtgacaacagggacaccatctaacttgtagatattgtcaaacatttcccattccctccattctgatggaagtaatcttttgatacccggaacatcacaggctgtggaacaccaagttaagtgtgtatggttggacatgctagtaaaagaagaaagacaagacaaagggaaaaaaacctgcgacgtatgcatcagctttgattatctctctacttgtagcctaaaaatgtccaaatgagtgaaattttagtaatagaggctacataatcgtacaaagcagagcagtgatacactgataagaaagcatgccttggtgagtagaaggcccttaacataggtctctccatcaggtgatttctcatagagaacctctctgcatccccaccttaagtgaaacctgaaggatttgccataagatgtaagtcttgaattctacagcagtacacagaagtttcacaagaaaaacttggtctctgtaaccatacctaccacccctgtctgttatatacttctttattgggccactta

SEQ ID NO: 2773 - DNA, 574 bp, Zea mays
tccccgctttgatctccgtacgtcctgtcatctcatcgatctgcttcgcatccacgcctgagcagactcatggtggcgttcatggcgagcagcggggccatgaaggcgtcgagcaggccaaccttcgtcacccctcgtagcttctttaactggggcaaaagcgcgagagaaaccgagacgccgccgccgcagctgcagttctcctaccacgacgtcgagccaccgttccccatgtcgctcgtggcaaaaacacacctcagaggtaattatcatatccttttggcgattaattggttattaagaggccgattgattggctcgctgtggttacttgtcatgtcattgcgaatcacttcaattgtcatatattttgtttttacatttagcgcacaatgactaactttgttttccgttcactgttcttgatgataaattgataatatggtggcgcagaccgtgagctcaggtgctgctacaaggccaccgtggacggcttcagtgctacggacttccaccggcggtgcgacttcaagggcccctgcgtcgtcgttggctacaccgacggtggcttccg

SEQ ID NO: 2774 - DNA, 684 bp, Zea mays
tggctagctagcactgcgactgcgacgacggaacttcgcgtcgtcgctagctcggttttttttccccccggcagtaataaaagccacctaccaataccatgcattgatcatatggcacagagggtctgttcaccggccgtctcagtcggccacagctacaacctgacggacgtaagagggcggaggatcgtcaacgtcgagaccgcctccgggaaccggttcgccgtccgcgaggccggcgccgtgcccttcttccacgccaacatgtaccggcatctccaagtgaagcaggtaaggggacgagatcgaactgaagccatgcatcgagttgattcgacagttcgatggctgacgagagtgaacgaactggcactgcgtcgacaaggtgccggacgagaactcgatgagcagggagaggagagctgcgcagtgttcgtcagcagtggatgtggactccaaagaggcggcgctctcgctgctgggagacacagctgacgagaagtacccgatctacatgacaggtgatattctgaatctctgttcaaattaacctttgctctttaatttgttctgtatgcataatgaacaaacaggtggctttgaaaactactttattttcaggtccgaggttgtacactctgtgcactgttttggttgacctggacgaggcgaccatgaccatat

SEQ ID NO: 2775 - DNA, 375 bp, Zea mays
cccggaaagagacgcgtttgcagcgcggtatgtatgtacacaaagaaggcggcgtgcagtgcaggccatgccatcgatcatttcctgtaaaaaacaacgggacaaacaacgcagagcacattctcagtgtgtttgatttcgaaggttgagaagaaaaaaaggataaaatattcgatcaccggacgcaaagatctctctctctctctccctctctattttttggctgaacattttcacggctcagtgtggattctgctcctgacggagcgacgcttaacaattcgcttaagccgccgggatacggaccaaagcttgagcgagtccttccagctcccatgcttgtcgaagtgggcgtagatcttgtcgagccggatg

SEQ ID NO: 2776 - DNA, 620 bp, Zea mays
  misc_feature (107)..(109): n is a, c, g, or t
  misc_feature (117)..(117): n is a, c, g, or t
aagcccagcttgaccggctacgcatgatctcgggagaagggatgcatgatcgattgcgttattacctgttcccccacagggcgtggagctggagtatgacgctctcnnnctgaagcnaggcaagatcacgccgcaggaggagagcgtcatactccagctccacgccctgtgggggaacaggtaataacgcaatcgatcatgcatcccttctcgccgagatcatgcgtagccggtcaagctgggcttaattaatttccttgtgtcgtacacaactggatgctctgaccacagatggtcgacgatcgcgcgcagcctaccggggcggacggacaacgagatcaagaactactggcggacgcacttcaagaaggccaagccgtccaagaacgtcgagcgcgccagggcgcggttcctcaagcagcgacgcgagatgcagagccagctgctgctgctgcaggggcaagatcagcatcagcaggaggaggaagaacagcccgatcatgacgacgacggcgccagggaggcaacgccgggtgttccactggaggaggaggaggagcagcagcagcagcagcaagaggacctgcggatgatgctgcagcaggacatggacgacctgc

SEQ ID NO: 2777 - DNA, 384 bp, Zea mays
agagcggtagctgcataaatcagttttgatgtgatcacaaactgaacatgaatagacctcccaacccttgacataagctccgctttccagccaggcaagagagaggctacccggtcaacaatagcttgaacttggtctctgggtagcttcttaattgagaggcaaaccaagatatttgcaaggaaaactcaaaatggaacatggcaacaactcttggacacatgccagattaatagattatcatcattacagcggatagggagcacattactttttttgcacgttggtcttaaggcccgaggccacgccaaagagagtaagaatgtccaaggctaagttgatatccgaggcaactggctttagaaacaacactgcatcatctgc

SEQ ID NO: 2778 - DNA, 364 bp, Zea mays
tgaggaactgcaggaaggccatccctccgagggaaggaggagggaaggtgataatcatcgacatggtggtcggggctgggccggcggacccgaggcacatggagatgcaggccctgttcgacctctacatcatggtcgtcaacggcatggagcgggacgagcaggagtggaagcagatcttcgtcgaggccgggttcaccgactacagagtcacgccggtcctcggcgtccgctccatcatcgaggtgtacccttgaacgaacgaacgaacgaacgtcgtctggtgccatgtgtgtgtgtttgtgtggagggagggtcatcctctattttcttttttgttttgtttctgcattctgaagacacg

SEQ ID NO: 2779 - DNA, 373 bp, Zea mays
gagagcagtcagcgattctaatttgtggaaatgtattgaactagatgatatccgatttgaggtagctatggttacagcagatggtgggcctttgttggatgtaccacctccagagggtgttgtaagaattggtgttgctttccaacagttcaagtccaacacctcagttgagcaattgttttttgtgttaggtttttatacttactttggtcaagtagcagaacgtatctcaaaggtcagcaacgctaacaagtctgagtcaatgaagtcatcggctgacaagtcggagaataaactgccaagtgatacagctgtgagtttaactatgaataatctccagctcaatttcttggaatctttgtcagcaagtgat

SEQ ID NO: 2780 - DNA, 599 bp, Zea mays
gatcctgccctaccccatgaaggccaaaaatatgcggccacgagagaaggatgctgaatttaatgttctagcaattcaaatgtccttttcttctcaaacaacaatgtgtcattttgcaaaaacaagaaccatttcaaacacgaattccgttccaacacgtattctactcccaggctcgctacatcatcatcggcatgttaaacaagtctgccagacgaagaagatttcacccgcatatgcctcttcgtctgcattagacgcaggtgtcaggttgcatacctgataactgatgccacggcgaaagataagagcatctgacatttacctttactccccttggtttttgagatttccaacaagggaaaaggccatggcatctcgattttccaagctcagagcatctgtgaatcagacacggtaagcatgacgactttcagagtattttccaagctcagagcatctgtgacaaaatcaaatatgcctagctgtattgactgattatatgtgtgttttaaaatttgaaggtcaggataaaggctaaaattagagcatgtaataaaaaaacataggttaggacttacacgctctctttgtcgcaa

SEQ ID NO: 2781 - DNA, 515 bp, Zea mays
gcacgcgaggtcgaagcgctgctgagaggcatcatcaccaagcgggagaccgccatgaagaacggccatgccgacgacagcgacctgctcggcaagctaatgcagtccaacgttgaagaggcccatggaggcggaggaagctccaagccgatgatgaccatggaagacatcatcggcgagctcaagctgttctacttcgccgggatggagacgacctcggcgctgctcgcgtggacactgatcgtgctcagcatgcaccccgagtggcaagaccgcgcgagggaggaggtcctggaggtgttcgggaagaacgagcccaacatcaatggcacaaatagtttaaaagtggtgggtaatcttcgtaaaggcgcgcaactactaccattctccatatataaagagttgttatcttgctagttagtttgaagagcatcattagttcttaatctttgctcctgtgcggcaggtgaccatggttctatacgaggtccttaggctgtacccaccgatcatag

SEQ ID NO: 2782 - DNA, 385 bp, Zea mays
cgtgggacttagcgataacagcgagttggagcgttggtcagctcagcagacacgatcaagaaaatttacgagcacacgcggggcgagcaattgagtgacggtggcggagcttgctggtctgacacggaaaggaccaacaaggtcgacagccagtgcgactagataatggagcgtagtccagcatcaaactgacgacggccaccagaagggcaaagacgaggtcgagcaaggtaaaacgggttcaacggctcgacgccaaacgcgagcacgcgtgaaacccgatggacgaagagcgagtgcaacgcagtgataacgagcagacgcgcgagcgttaacgcgagccagcggcaagcacgagtgctgaggtacaactgacaacactcgt

SEQ ID NO: 2783 - DNA, 287 bp, Zea mays
tatggacgaagctctcggggttgctggcagagagaccagggcggcagggcctcccctccagctccagtgatcgatcagacgatcacccgctgcccgtgagtctgagttggcgtcgtgtcgtatcggctgggcctgcgcaattggcaggcaggcatggcgccccgcccggccggcacatgttttgcactgcgcacatgcgcatgtccggcaggcggcaggctccgcggctgcctgcttgtgtatgtgtgtggtggactggtggtgcctgctgcctgcccctttttttt

SEQ ID NO: 2784 - DNA, 370 bp, Zea mays
atctctcgctggttccttctgggatttttcgaaatcccattgaaacttacttggcaatttgtgttttttttaccgttgatgtttgcagcgagataaaaatggatgatcatcgttatgatatgctctctattagtgccacgtaaatcaccaaaaatattttaatgttcctgtaaaaatatggaaataggaccatagaagtggcatgttgcaagattattttaaatcctccggtgaataagtgtcaaccaagagagtctgcaacaaaaatgttgtaactttaaccagtgatacctttatgaatatttacctaggccattgggaaagtcatttatagatttgattatctgactcaaatgctcttagtttcatc

SEQ ID NO: 2785 - DNA, 351 bp, Zea mays
tacgagccgatcaaacgattcgtcatacaggcacgctcgtagcactgcgaaaccgaagcttgaggtagggttatgcgcaggaggggcggaggacgcgagaggagagcgcgcgagatagcactcacccccattgaacggtgagcgcctcgtaatcccagtactccttggggcgcagcacgttgacgtcggcgtagaccctggccttggacatggcgccgaccgatccggcgtgccggcggcgaggcggggctagggtttcgacgatggggaagggaaaagggggcaaggaatctccgtttttctctttttctctttccaggggaaaacgttttgggaataaagctaggtggt

SEQ ID NO: 2786 - DNA, 424 bp, Zea mays
  misc_feature (234)..(237): n is a, c, g, or t
  misc_feature (281)..(315): n is a, c, g, or t
  misc_feature (319)..(347): n is a, c, g, or t
  misc_feature (352)..(376): n is a, c, g, or t
  misc_feature (394)..(417): n is a, c, g, or t
gttaggctagtcctgtactgctactgtacatgaaccagaaactgatgatcaagggcatatctagactcatgttctaacagtttggacttgagggaggacttgtcaatagaagtcatttcttttttgtgccagcatacatggctctttcccactgcgcgacatcttcgacccgcgagggcggtggcggtaggacctcacgctctaccaggtcccagccgtcgaatatgctatctnnnncgccaccatgcttcaccaacttaccggtgtacaagaagctctgnnnnnnnnnnnnnnnnnnnnnnnnnnnnnnnnnnngctnnnnnnnnnnnnnnnnnnnnnnnnnnnnnaaaannnnnnnnnnnnnnnnnnnnnnnnnaaaacaggaattttaccnnnnnnnnnnnnnnnnnnnnnnnnataaaac

SEQ ID NO: 2787 - DNA, 394 bp, Zea mays
ggggttgcatggcatgcattcaggttcatcatcaggcagggctgtcatctcatctcatgtagtgtaaagcagccaatctaactgtgtattcggctcgcgcgcggtgatccggtaatcgggcctctgccactaaaaagaattttgtagcggttaattgaaatcctaattctttggaataagtagctgggactggaatgtccagagagtagcggtcgttgttggcttagggattgctgctggtggatgcaaacctcacagctagctggtgactctgaaaccacaggaactccttttcttttccttttctttttacttgtatctgtatttgctgctacataagtaaacagaagtggggtgtacctagttttctggttctcgagtgtcttgaaagttg

SEQ ID NO: 2788 - DNA, 832 bp, Zea mays
agctggagttctagaagcgaaaccaattaaaggtactatagcacgtggcagaacaccagaggaagatgaatgcttacgtctgcagttgagatacaggcaagtacactatattgttttctagatgtatcttggctctaccactctttttttcaggaaatattgagcttgggatgctgtttctttgctttccctgatttattttatttgctgtttttattattttgagttaagtttcttcacaaatgttctcgcggaagaagttggtaaaaataactggataagtgtgtcaggaatcaagaaattgatattgacattcatcataagcttggctcaacactctgttgaagcaatatggctgctagtgctaattcagttttcagttgacatatctacgatagaaaattacatggtcgtataacatttactgtaagcataagtcaactagtttctgtggtgtgtcattggaagtttctacagtcacacctatgttcttattgatgtattcctttcctggtagttcagtttcattgttatctggatgttctaaatgctaatcctgtttcacagcgctcatatgctactgctatattttcccttttgcatgtgctcaactccaccagcgaaaaagaccaggccgagaacctgatgattgtcgacctcttaagaaacgatctcggcaaggtctgcgagccagggagcgtgcatgtcccacgcctcatggacgttgaatcatacagaagcgttcacaccatggtgagtaccgtctgcggaacaaagaagccagatctaagccctgttgattgtgtgaaagcggcctttccaggcggttcga

SEQ ID NO: 2789 - DNA, 475 bp, Zea mays
ctcaacttctcacacccaaagatctcagagaacttcgatccacacgcttgtgggtgggctttcgggatgaacatgtttgacctgaaggagtggaagaagcgcaatatcactggaatataccattattggcaagatttggtaagtagtggaatgagaaatgtactgctgattgcattgcctcgttgcatatagcccatcatttagtgaacctgtaatgaattttgttgtttcgcttactaatagaagacctattgcagaatgaggaccgtaagctgtggaagctgggtacgctgcctccaggtttaattactttctacaacctgacatacccgttgaatcgtacttggcatgtcttgggcctgggctatgatccagctgttgacattgctgagatcgacaacgctgcggtagttcattacaacgggaattataagccctggcttgaccttgccatttccaagtacaagccattctg

SEQ ID NO: 2790 - DNA, 527 bp, Zea mays
  misc_feature (410)..(415): n is a, c, g, or t
  misc_feature (419)..(421): n is a, c, g, or t
  misc_feature (425)..(428): n is a, c, g, or t
  misc_feature (431)..(434): n is a, c, g, or t
  misc_feature (446)..(446): n is a, c, g, or t
gaggagatcagattcttcgctcagaagaagaacctggtgcccatactgttcgacaccgagcccgcagagatcgccgggcttttcgatggtagactggaggataaggaagcgaaggaggcgttcgaagggctgatgcggtgccacgaattcaagctcgaggcgaacgagagcgattcaagaggctgtgtgtcgaggacagtcacactgcttcggtccaagcttgggcggaagaacatcgccgagaaggagagcgaagcctctgatggcctgccttttccgcgcaaccggcattttgtgggaagggagaaggagctgagcgagatcgaaggcatgctctttggttcgaccgccgcgggtatccaggaagtggattgcccgagggcttccagtacaaatgagagaaaaaaatnnnnnncttnnncctnnnnagnnnnagatttttatangtattgtggaccttacagcctttgcacatggtcagtctcttgtgtatgccctgttggttttaattcagcattgacagatac

SEQ ID NO: 2791 - DNA, 654 bp, Zea mays
ggtgagtacatgggtgagcttgagcgcaaggttcgtgtgctgcagatggaaactagtacgttatcttcaaaagcagcatcgtcgcaggtttgttctctgaggctatgaatgtgctgatcatttcggtgtacgttggcccaagttttggcactgctttactgccttaatatctattcgcagagggaatgcgaggcacttagaattctgaacaatgagatgaagatcaggctgcaagcaatggagcagcaagcacagctgaaagatggtacgttttacgaggagattggatggaataattctgaatgagtttctttacatgctattgcttcaacgtagacggacctggcatccatgctattgctttgtctctctcaccgttctctaattgactgtatagttcactgacatgtcaggggaatttccattgatctattacaagttcttatgatttatgtgtgcaatcttgttttcttagcgtattcaactactgattgtattattgctacattgttctgtatccagctctgaatgaagcactgactgctgaagtgcagcgcctgaaacaaattgctggtgaggccagtgatcctcatgtgccgaatatgagccgcaagattgtcgaacagcagctgcagaagcagccatcggaggccc

SEQ ID NO: 2792 - DNA, 386 bp, Zea mays
cgcctcgggtgggcgaccaacatggcggacctcgaccttgcctgcccatcggctgtggtggcgcctatggatatgggtaccacgacatcgatatggtgccaaggtgcacatgtctcttcaaggggcaagtatggcgatgatgtgtacggaaaaggagatgtgctagggttgtacatgagtacatctctctacctcatgggaagaggtttgagcttcaaatgtctgaaccacaagggcaagccttttcttgtaaagggcaggatgcacgggctcatattctaggtcagcactggctcatgttctaggatcatgttgcaacttgtaaccccttaatctagagaacctctgatcggataacctttgctagtaagggtacgtgcgtccta

SEQ ID NO: 2793 - DNA, 488 bp, Zea mays
  misc_feature (479)..(485): n is a, c, g, or t
aatcgcaccccaaaggtagtgagagggcgaggacctcgacgttatgaagctgctgcaaggaacaacagagaggttgttggatcccaacgaaaacagtgagttgtaactatcttgtgacataaatattttgtgattggctcactgatgcatttttgcttgtgaagtcctcttacacagttttctcattgtttgttcagagcagctagatttcgagaatctgctccaaatgctgtagcagccagagattccgggcaagtttcacatgcacagccagaggctgcccctcccaaaaggaatgtcatgagttcaagcctaaattctgcgtccccacctttttatccctccagtgcatctactcaagattttccggtagcagctcaaacgagggacatacaagcaggaggttctaataagatccctccatcttccatgaagatggatgataactcaaagctacaatctggttcaatggttagagnnnnnnnagc

SEQ ID NO: 2794 - DNA, 391 bp, Zea mays
agggagcggcgtgccgcacaggcacttgttgtgcgcgtagcactctgcctcgtgcatggacatgaaccttcccgccgggagctcgccgcagagctcgttatagctgacgtcgaagtgatccagcctcacgtccatcagcgacttggccactctgcccctgaccctgttgtggctcaggtccaggaacctgaggtggtgcgggaacctgacctccgtcaggtcgaactcgagctggttccacgacaggtcgatcttgaccgccggcttcgtgatgccgaacaggaacgacgaggggtcaccggtgagctggttgtgcgagaggtcgatggtgtcgacgtcgccgtcaccgtactctccgggtatctcccccgtgagccggttgttggacagg

SEQ ID NO: 2795 - DNA, 361 bp, Zea mays
ctctcagtttcatcaaacggtcgtcggtcaattggtggcagcttgatggggaaaaaaagaacattctccagttttgcgcgagcatcaagccaaagttaggtggatgtcaatttaagggtagacaaacggtcatctggttaaaactgaggcattgtaatatgcttactacaggctagtgaagttcctctgccaaccgagtcagtcgttcactcatttgttatctttgagtaagagctgctgctatattgttggtggcgaaatttttttgctattttgcctcttacagttttgttactatgtcattcgtgtgtctatgatttgtgagacatctgcttcaataatttgtgggtccgatggtaaa

SEQ ID NO: 2796 - DNA, 332 bp, Zea mays
gtcaagtccggcgcctccaaggtggccgtcaacgacgtcgtcttcaagaacatccacggcacctccaacacgccggaggccatcacgctcaactgcgccaacaacctgccctgccagggcgtgcagctcatcaacgtcgacatcaagtacaacaggtccgacaacaagaccatgtccgtctgcaagaacgccatcggcaagtccattggcatggcgaaggagctcgcctgcgtctgaacctacttgcatccatcactcactcttcgtcacctctctctttctcactctcgccagtctttttttaggcctctggcaatctgcgaactttctta

SEQ ID NO: 2797 - DNA, 362 bp, Zea mays
ttgaagacttggtgaaaagtgaagctactgagccaccatgtatctcccacaatgatgtggcagggagtcacccttccactgttgagattgatggtcttccaaatcatatgaacatcaatatggtgaaaccaggtcttggtgatatgcaattgaaatttactgacgtgtctgctttaggttctcattctgttctcaggtcaaaacgtggttctggtaaccctatgcagggttgttttgatgtgaacaaaaactgttctcaggaaatgaaaaaacatggtacaaattctactagcagtccacctgccatgagaaccagacctgaagagactaaatttaaagatgcaccagttaaaggcaagaag

SEQ ID NO: 2798 - DNA, 379 bp, Zea mays
gatgcacagcaaactacatctaacttaccagtagaataccatctatatcaatggtggatgattcattagtatcgctgcatgaagcttgtgctgtcaggctctgactctcacctgggttttgccagaagttcctgcgtacaccacttgagctcaggctatttgctgcaaggctgaggtctgacagcaaaggctgcagtggggcactgccttcaagcaggctaacaacttttgacatctttggtctgagtgtaggcgctgcagttgtgcatagcagggcaacattcagcatgaggagcgcctcttctgtcgagtaattggatcctagatctggatcaaccaattccagtagagttcctctctcatgtagaacacaagccca

SEQ ID NO: 2799 - DNA, 578 bp, Zea mays
ctacttccatcataaatcacagcagccaaggcagcattgggtacagatcagaagagcacctgggagatgcgtatggacacgatctgcccgtccctggccgtgtcccgcatcgcctcaaacgtcgatagcagtcctgtcacccaaagagcacgacacgcatcacatcagaactcgggattggcactgcgctggaacgaggatcgcaattggttttgctgtatgtacctccgttgctctggaggttggtgtggatggcagcggcggttgcggaagcacagtgcctggtcatcgggtcgtcgtgctttccggtccaggccctgttgaggacagctgaagaacaaggcaacatcaacgccaaccatgttattcacgaatcaacgattcaccaatccatcattctgtccactgtcgaaaacgtacagtacagagtacagacagataactgcaactgggaggaagagacagcactggaatgatggttgccgcccggacgtacatgcagtggatggggaagcgaactgcttcgcgttgacaacggcacagaaggcggcggccacctcctcgtcctgaaagtgctc

SEQ ID NO: 2800 - DNA, 360 bp, Zea mays
tacgtacacagctgccaccccaccacaaccaattcaccatacagcgggggggaaatcgtgatggttcactttccaaaccacggaaacgagtttcgtcgtcctacggatttcctcgcggttttggtttgctacgagtacgacagcggaacagatcagaattatcattagttccctgttcttgccccctttattttcagacccctttttttaaaattcccccaagaaccaaccagtctcatctgccgtttgggctcaattgtcaacgatggccactgatgctatcatttgatattcatcacaagctgtcggcttgttgctcgagtccatgcaatctgaatgcgtgtaatcaagctattcggt

SEQ ID NO: 2801 - DNA, 398 bp, Zea mays
tgacttcggcacagtggatgacattttcaaagcttgcccttcaactacagtgtccagttatatcattcagaaaacaacaagaaaggctccattcttttcaggcaaataaaaaccatgcaatttcatggcccatccattagtagattctcttctcaattaatagcaactctttattgaccattttataaacaataacactaatgaacaatctgcacaaacaaattgggatgtgctttcaaactcctcttgtaaaaagtcacaaactcacaatagtaaataggagtaggaagcatggggttattaggtcagtgatcagataaacagatctagggggtatttgaatgcactagagctaatagttagtggctaaaattagttgaaacatccaaacaccctag

SEQ ID NO: 2802 - DNA, 367 bp, Zea mays
tcggggtgggcgcatccaaccgtgccgcgaaggtgaaggcgaaccaccaggccctggcgaaacttctcaaggaggaccacgccgacgcggcggccacactgccagcatggcaggccatcgcgctaagcaacgcgccgaagccggcgcaggaccaggaagcgttcgtttggccctggacgggcgtcctcgcgaacgtcccggccggacaagcccaggagggtggagctacactgatggagcagctagctgagttcaaacccgtgcagatcactgccgtgtgcggtgccgatgggtatgccggctacgtcgttgttctgttcaccaaggattggatcgggttcaagaacgccttggcattccagaactg

SEQ ID NO: 2803 - DNA, 418 bp, Zea mays
  misc_feature (343)..(366): n is a, c, g, or t
gattttagtagatctgtcgaggttgccagcgtcttcatgcttacgagttaggactcaggagatacaacacttgctgaacatccaaagagtacccccacatgctaacaacttcagtgctgcttcataacgatttgaaggagggaacatacggggtaatataaggacaatcgtgccctaaggagcacagaacttgcacttgcctgctatccatgtcgtatgatatcagtttctagtctgagcaatgaacaaaaaagatcaaattccgatctgaatgaatgccaacaatattatagttaagagtgtatttaagatttgttgcttcgaccagctggcaaaggctcannnnnnnnnnnnnnnnnnnnnnnntgtatttaagatttgtagcttcgaccagctggcaaaggctcaggctatgctt

SEQ ID NO: 2804 - DNA, 388 bp, Zea mays
tcgccggtccactttccgtctttcctctggcgctcacgatccttttccctgcgtacgccgagctcacgcaggacaggagggagcggaggagatagacaaacagaaagagcccgtgtgcgtgacgcacggacgccgtgactccgccgcaaagagagggagagtccacgctctgaagaagcaacggcgacgcccccgacgacgagcacagctgcccagcaaactagcagcgccctcgtcagttccgtctcgttcccaacctctcccggattcgattcgattgacccgtccgctccaaatcgaatctaatcagcagttttggagttgcggaagggagaaagagagagagagagagaggagaggggcatggatcaggtgctaaaacaaggtg

SEQ ID NO: 2805 - DNA, 351 bp, Zea mays
ctattgattactatatatttataatgaataagtggaagcaaactaacaaagttatgtacagtaaggcaaaaaggagcaactagaacctaatttatttgaatttgatatcttgtggaaatgtttgcttcatcagtttgtaactttgtataacagtttccagtcccagatttatttatattgaaacatcaatagatgaacattgggggtatagaaacagctgtttttttcttcttcattgacattgctggacgtgtgcttatggtttatgctgcttgatggaatggtgattcccaagagctatatccacgtaccaaattctcttatgaaagcttcacaaacacactcagggtt

SEQ ID NO: 2806 - DNA, 472 bp, Zea mays
gagccagcttctttattggtacgtatccatccatcccttcagcctttttatttagtgtttgaactaactaaattccatggatgacaactttcttctgttgcagggtgtcgagcattgagagcaagtcaagccacccaatggcaaccgcactcgtcgagtacgctcagtccaaatccatccaacccgagccgacaagcgtcactgacttccgtatctaccctggagagggcatatccggagcgataaacggaaggcaaatcttcattgggaacacaaggatcatggcaaggtcctcctgctacgcagcaggagcaggtccggagatggaaggccagcaaggtgcgtcgatcgggcatgtgatcgtcgacggcgaccacgtggcggcgttttcgctctcggacgactgtaggaccggcgcggcagaggcgatccgtgagctgagatcgatgggcatcaggtcggtcatgctgac

SEQ ID NO: 2807 - DNA, 330 bp, Zea mays
gaaaacagacggggcatgtttggctcgctgcctaacttgccacactttgcctaacttttctgcctaaggttagttcttcaattcgaacgactaaccttaggcaaagtgtggcacagttagccacgaaccaaacaggctcctagtgtcaaaggcttccaccacatgagtggggtggtctagggaagggataaaccgaggcaagccttcccctacagatgcggagaggctgcttagaacctgtgacctggtgactcagtgagacactctcactgctgcaccaggcctgcccttgattgatagaatatcaggaccactcaaatttctcatatg

SEQ ID NO: 2808 - DNA, 522 bp, Zea mays
gagtctcgtttgagacaacttactttaaaggtaccttgagtttcttaattttgtgcaccatgacttcaactgttacttttcttggttagatatctggagttaacataaaagcatggttgtattatatttactgaaaaatataatttacttgtggtgtttgttcttctaaaatgcagattgagcgggatactaaaggaattttgcagtgccatccgtacccatgcgagtattcagatcccacaatagagtgtgcacattgtgccttctacatgggcttatcaaggaaagaggggttgaaaaaacgtggtcaacagtttgatatccgtgggacagtagatgaatttatgcgtgaaattggcatgtattcattgtggaagcctgggatggatctggctgtcacccatgttcatagggagcaggtcccatcttatgtatttgagcaaggatacaagaaaccctgccctacaatgcatgcaaaccaacaagagcagtctgatggagatggaacatttagcccatatc

SEQ ID NO: 2809 - DNA, 196 bp, Zea mays
cattccacgtggattgactttgactcgttgaaatccaacccctgcagctgcagcacagcgaccgagccatctccatttgaatttcaaattcccctctcctccctcctctgtctcactcacccaccgcgcaccctggccattcaatttcttccctcctcttccctttctttttttccccagcaccaccaccaccacc

SEQ ID NO: 2810 - DNA, 350 bp, Zea mays
  misc_feature (342)..(344): n is a, c, g, or t
gatgcgactttgcagcgcttctccagcgatgcaaaaacctatctttccgtatagtcgcccaggaatgcgcatgtgcagggtgagctgatgattttggatatcgataccatcccgagctggcatatgtagcacagcaggttgttgccattgtgattcgcggggactgcgtcctgaagaactttggttttgacgccttgtatttgtacggcaatgattgggatgaacatggccggtgagaattttttattttacattttctgtcctcgtttgccacgtgagtgttgtctgattctgatgtaaaacagcaacgagtaaaaaaaaagtataagtggaacctgtaannngggatt

SEQ ID NO: 2811 - DNA, 436 bp, Zea mays
  misc_feature (349)..(357): n is a, c, g, or t
  misc_feature (359)..(363): n is a, c, g, or t
agggcagaaggtatttgtgctatcaccattgtatgatccagtaaaaggggatacggttcagaagcatgtgcaggaggtggagctgcaatacttgtatgagatgctaggacaaggcctgaagccagttgccagcgtgggtgcagggaatgtggttgcaatccagggtcttgggcagcatatattgaagagcgccacattgtcgtccaccaagaattgctggcccttctcgagcatgatgttccaggcgtctccgatgcttaaggttgcaattgagccctcaaatccagctgatttaggagctcttgttaaagggcttaggcttcttaaccgggcagacccatttgttgannnnnnnnngnnnnnagcacaaataccttctgccctgcatgaaggacgccactgaagaccctcgcaaatgccataaagcactcctctg

SEQ ID NO: 2812 - DNA, 571 bp, Zea mays
tgcttctttcctttgaggctgatgcaccagaaaatggtcaaggcctttttagtcctcagttttcagagggcgtaaagaattctcagtcagcccatgcaaagcgccgtggccggccactgaagaaagtgacagaatctactgatgataccgtaacacagccaaataaagaacaggtcagtcttagtttcctttttttctgagagtgtattcatgagcctcagacccacacttatgtttttataatatgaacacaccttttgttcttgttgagcaggatttcctacgatcatcatttgtcacagaaaatacaaatatgatccaagggccatcttctgcctcccatcttgaaggtcctcacatgggagtgcaaggaggcattgatttaatggtacacagtaatttattttgtttgtcactgttattaatactgtatatattttaaaaaatcgtgctgcaaacttacacaggatggaataccaaatctctcatttggtaatcattttggaatggatattaatcaccaacatcaagtacccaaccaccaaaggatgcagcagaacaatttcataca

SEQ ID NO: 2813 - DNA, 464 bp, Zea mays
acagagagtaatgcgaataagcaattctctattacatgttgaccgatgcgaagcaaccaatttgagttgatggatcgcagtccctgccccgctggctgccggtgccgggacgctctcagtcttcgttcagatcgacgatggtcgcccgcattttcatgcatcggaacggaggatccattcaaacaatgcctagaagaatttattatccaatcaaagaaccgtgcttgcttgtctttctttatgttatttcccgccccgaattcagttcggggggtcactgactgcactgtacaagatgataacacgaacaagctatggtattcttgatcatctcagcagcgcgtactcggcccgcggcttggtcttggtgccgcggccgtcgtcgtcgtggagctcgaggccgtagagcacgccggcgcacatctccaggctgccttccttggggaagtagagcctggccatct

SEQ ID NO: 2814 - DNA, 371 bp, Zea mays
ctctggcatcagctgaagcccagcgatcgttatgcgaataggaccttgacatcggtggtctcttcgactcatcgtagtcgcgtgtcgggcggccgctacggtcagcatcaccgccaccgtcatcgttgcatttacgccttccatcaaagctgtggctcctcctgtcccaccccgacctcttggcttccctgtcgtcgtcccaccttgagccacgcccctggtcctcggctccacttccactccgcctccacctcgggccgtcgtcctcgtctctcttcctcccgtaactagagggagctagagtcggaggaggagcgggagcgggagcgggagcggggggctcagggcggtaaatgggattgtgatttggg

SEQ ID NO: 2815 - DNA, 309 bp, Zea mays
caagacaatgtttctaaagatgaggacaacaatagggcttggagcagttctttgcctgtcactgaaggtggtacctggggcaaatcaaaagacgacaactgtgatggagcaggtggtgcaggaggttgggatgcttctgttgccaactggaacaaatcatccgttgtggctgatgcacaggatgagggttggggaaaaggaaattggtcatctgctaagtctgaagaaacaaacaatgaaattggaaattggaacaaagctggagcttcggaccaagctggaccgaaatcttttggtggtgatggttgg

SEQ ID NO: 2816 - DNA, 398 bp, Zea mays
ttgagctgcctgcctcggacagtcggacggacctcggcttctttcttcttgcgtagcgtagtgctgtgccagctgccaggcactgaaaaaaaggcggccgtttccccactatataggttcgaagttctactagcttcgttatatcaggtcaggtgtatttgttgcggaaatggctgcaggtgcttcggtgtttttcctggaagagaactactgtgatgtgatcactctgcaactaatgtttcaagacctgtgcaacccttttgtcaaagaatttcctcggaaggtgatgcagaatagctaaagcctgcgtgcgtgtgtgtgtgtagcagagctcatgtcactgttaaaccctgtggtctagtgcgcacaagtgcaaaacagatgtggtgtgttcatgg

SEQ ID NO: 2817 - DNA, 1333 bp, Zea mays
  misc_feature (496)..(497): n is a, c, g, or t
  misc_feature (508)..(511): n is a, c, g, or t
  misc_feature (725)..(727): n is a, c, g, or t
  misc_feature (750)..(752): n is a, c, g, or t
  misc_feature (756)..(761): n is a, c, g, or t
  misc_feature (763)..(763): n is a, c, g, or t
  misc_feature (765)..(766): n is a, c, g, or t
  misc_feature (791)..(799): n is a, c, g, or t
  misc_feature (817)..(817): n is a, c, g, or t
  misc_feature (824)..(825): n is a, c, g, or t
  misc_feature (831)..(832): n is a, c, g, or t
  misc_feature (839)..(840): n is a, c, g, or t
  misc_feature (847)..(849): n is a, c, g, or t
  misc_feature (856)..(858): n is a, c, g, or t
  misc_feature (860)..(862): n is a, c, g, or t
  misc_feature (864)..(865): n is a, c, g, or t
  misc_feature (870)..(870): n is a, c, g, or t
  misc_feature (874)..(877): n is a, c, g, or t
  misc_feature (881)..(883): n is a, c, g, or t
  misc_feature (889)..(894): n is a, c, g, or t
  misc_feature (900)..(900): n is a, c, g, or t
  misc_feature (902)..(904): n is a, c, g, or t
  misc_feature (906)..(906): n is a, c, g, or t
  misc_feature (909)..(909): n is a, c, g, or t
  misc_feature (923)..(924): n is a, c, g, or t
  misc_feature (927)..(929): n is a, c, g, or t
  misc_feature (933)..(934): n is a, c, g, or t
  misc_feature (936)..(938): n is a, c, g, or t
  misc_feature (945)..(952): n is a, c, g, or t
  misc_feature (960)..(962): n is a, c, g, or t
  misc_feature (967)..(967): n is a, c, g, or t
  misc_feature (969)..(980): n is a, c, g, or t
  misc_feature (982)..(985): n is a, c, g, or t
  misc_feature (989)..(999): n is a, c, g, or t
  misc_feature (1002)..(1002): n is a, c, g, or t
  misc_feature (1005)..(1014): n is a, c, g, or t
  misc_feature (1018)..(1019): n is a, c, g, or t
  misc_feature (1023)..(1028): n is a, c, g, or t
  misc_feature (1030)..(1034): n is a, c, g, or t
  misc_feature (1036)..(1052): n is a, c, g, or t
  misc_feature (1055)..(1055): n is a, c, g, or t
  misc_feature (1059)..(1060): n is a, c, g, or t
  misc_feature (1062)..(1062): n is a, c, g, or t
  misc_feature (1064)..(1068): n is a, c, g, or t
  misc_feature (1070)..(1071): n is a, c, g, or t
  misc_feature (1076)..(1080): n is a, c, g, or t
  misc_feature (1088)..(1107): n is a, c, g, or t
  misc_feature (1109)..(1111): n is a, c, g, or t
  misc_feature (1120)..(1141): n is a, c, g, or t
  misc_feature (1143)..(1145): n is a, c, g, or t
  misc_feature (1148)..(1149): n is a, c, g, or t
  misc_feature (1151)..(1158): n is a, c, g, or t
  misc_feature (1166)..(1172): n is a, c, g, or t
  misc_feature (1174)..(1185): n is a, c, g, or t
  misc_feature (1187)..(1197): n is a, c, g, or t
  misc_feature (1200)..(1204): n is a, c, g, or t
  misc_feature (1208)..(1227): n is a, c, g, or t
  misc_feature (1230)..(1236): n is a, c, g, or t
  misc_feature (1241)..(1250): n is a, c, g, or t
  misc_feature (1268)..(1268): n is a, c, g, or t
  misc_feature (1270)..(1284): n is a, c, g, or t
  misc_feature (1288)..(1289): n is a, c, g, or t
  misc_feature (1291)..(1302): n is a, c, g, or t
  misc_feature (1305)..(1305): n is a, c, g, or t
  misc_feature (1308)..(1321): n is a, c, g, or t
  misc_feature (1324)..(1326): n is a, c, g, or t
cgtcatggacccgcagaaggcagtggacatggtggacgagaacaccatctgtgtcgcggccatcctcggttccacgctgaacggcgagttcgaggacgtgaagctgctcaacgacctgctcaccaagaagaacgcggagacagggtaaatactactggaaatagacaagcaagcaccctcgtaaaatatatatgctggtgcgatgcgatcctcgtgggcctgaactaaaacgtgcatgcagctgggacacgccgatccacgtggacgcggcgagcggcgggttcatcgcgccgttcctgtacccggaactggagtgggacttccggctgccgctcgtgaagagcatcaacgtcagtggacacaagtatggtctggtctacgccggcatcgggtggtgcatctggaggaccaaggcggacctgccggaggagctcatcttccacatcaactacctcggcgccgaccagcccacttcaccctcaacttctccaaaganntctgtggactnnnntatttttgctagagtttgtagttcacaggatgcaaaagtacttggactgagccactgaggaagcaacacctcaaaagaagacataaaagaagattaattgaagagcaacaagtaccaagcgagtccaagacatgaaggaagtgcagccactcgcaaaccatctgcctgagtgcaacggacagtccggtgccacccaacggactgtccggtgcannngggaataggagtcgaacgactannncttnnnnnnantnngaaggaaaaccaacggactatccgnnnnnnnnngtacgtgccaatggtcanattgcanngatcanntccaacnnctatgtnnnccgaacnnngnnntnngactncccnnnngccnnnactggnnnnnnccgttngnnnanagnaaaggggttgtctnnctnnnacgnnannntcaagtnnnnnnnnataccttnnnccttnannnnnnnnnnnnannnnatcnnnnnnnnnnnttnttnnnnnnnnnnggcnncacnnnnnntnnnnngnnnnnnnnnnnnnnnnngcncctnnancnnnnntnntgcannnnntccctatnnnnnnnnnnnnnnnnnnnnannntattacctnnnnnnnnnnnnnnnnnnnnnntnnnctnntnnnnnnnnatcctccnnnnnnntnnnnnnnnnnnngnnnnnnnnnnntcnnnnnctannnnnnnnnnnnnnnnnnnnccnnnnnnnacctnnnnnnnnnnctctccccctcccccccncnnnnnnnnnnnnnnntacnntnnnnnnnnnnnnccngtnnnnnnnnnnnnnntannnccccctc

SEQ ID NO: 2818 - DNA, 442 bp, Zea mays
ttgacgagatgatgccggtggaggaggcggcggcggatgactggtcggagtgcgcgttctcgctgacctgcgaggaagactgcgccgacctcggcaacggcgagctattcccgctctacagtgccggcgacgaggaggaagatgagtacttggagcagctggtgttcaaggagaccagcttctgctcctcctccgactcagctgccgactgcgacggcgatgaagaaggagacgaagaatactcttcgctcacctcagaggagtggttccgccaagctcgcctcgccgccgtcaagtggattcttgaggtgagtcccgatttccttagctctaaccccttcgcggcatcaggctggcacgacatctgattgcgtcgttcgcccattgcagacccgcgggtgcttcggcttcggccaccggacggcgtacctcgccatctcct

SEQ ID NO: 2819 - DNA, 512 bp, Zea mays
tgcggtcaataaggttgcagttcctaaatttgagccaaagaaaggggtgaatattgtgacagatgagaaggctactaacctttctagcgcctcagttgatgatgttgctgttattaatgatcttttggccaaactggaagaatatgccaagggcctgccaccagggttccaaatgaaacctatccaatttgagaaggtaagtattccaaatgaaactcaatttgagaaggttctttgagatggttccccaacatgcacttttcttttattaggattttgtttgttcgagggtcagatggatatgaaaaggccaggtataacatgcgctgctttctttccccaggatgatgatactaattttcacatggatttaatagctgggcttgcaaacatgcgcgcaaggaattacagcattcctgaggttgacaagttgaaggctaagttcatcgccggaaggatcatcccagccatcgcaacttcaacagccatggccacaggtctagtgtgcctgg

SEQ ID NO: 2820 - DNA, 398 bp, Zea mays
ttttgagtcatcgggtcgatctgacgatttgctatgggtgctctgagtactcgacctgggaactgtggggcgcttgtaggcggcgcagagttgggtctcgtcgttgtaatgattccatcggctcgttgcgtagggtttgatctgcctgtcgttttcttttcttttaattaaatttctgatgcacagtcatgtattgatctggtttggtgttcctagatgcgtgtaataaatggggaaaaaaccatgtcgtaataaaatcaatttatttttaataaaaaaaatctgaattctggctctagtgaataaatggatagagcctggctctaattctggtaaaataaaaagacaacgagcttaacttcttaattggtcaattggaagggttctccgatctaatt

SEQ ID NO: 2821 - DNA, 428 bp, Zea mays
tacagctccagcggcgatgggcccgacgtcgtctatggcgtcgccatgtgctacgccgacagccagtgggacgactgccagcagtgcctgcacagggcgctctcgtacgttttcacgcagtgcttgtacagcagaagcgcggcgatcatgtacagcgactgcgtcctgcgctactcccacgatgctttcttctccaacgagacggagtgggggcatgtgttcaacgtatggtctaccgcgttcgtcgacgacgcggccagatggaaccagacccggtggacgatgatgaaccagctcgccgcggaggccgcggtctcgatgccgcggttggcgacagggaacgcaacgtataaagacgacggcacggacatggtgtacgggctgctgcagtgcaggaacgacttgtcggcgggagaatgcagcaactg

SEQ ID NO: 2822 - DNA, 344 bp, Zea mays
tctttcttctttgagaattctctcaacatcctttcatggtacttggccaccccacgattacgagttattcgagcatcacgaatggcccaatgtgcctccaaaagcttcttgcgccactggaaaatggatttcagctgtttctctcttgaagctctctgcatctgctgaacttgccttacaagctcaacacgttggcgttcacattgtctgacaaactttctgtatatcctatctggcattgccatgatttcttgttgttcatgctcaacttcatcccttagacgagcctgatgctctaggagtttgagcttcttttcttcgatctgtagcctcaagacaagatc

SEQ ID NO: 2823 - DNA, 704 bp, Zea mays
  misc_feature (683)..(686): n is a, c, g, or t
ctgaggactctgtaagtatagccataaacttctgttattattttttagtttatacagacctttaaatttcctttttacaatgcaataatatacagttctcttgcgtgtttgaggaaaaactatagtgatatattaatgcttttgcaagaatataaattggcatttgttggttagattagagtggcaatttgatattctagtatttgaccagttgctacatccatgacacaatgattgacacctagctatccacttgcagtgtactctccaataacttattcagtggatcaatacctaaggaattgagtgctcttacaatgttggagatactggatttaagcaacaacaacttgagtggggaagttccacaagagattgcagaaatgcaatcacttaggcagttgtaggtttctgagtgattaattttgtgaaagttttcatcagcaataagtacaatgtcattatattttgtcgcttctgcagattgctttccaataactgctttcagtggcctctgacccaacattcctatgggaactacgatcaggaaaatgatttcaatatttatgataatcttgggaggggtaatatgaatcgaagagctgagaatgggtaagagaaaaaaatagttctataaatttccttctaagttatcacccatttttcttcttttttggaaattnnnnattatatgcagatcctga

SEQ ID NO: 2824 - DNA, 1136 bp, Zea mays
  misc_feature (792)..(793): n is a, c, g, or t
  misc_feature (955)..(957): n is a, c, g, or t
  misc_feature (1007)..(1008): n is a, c, g, or t
  misc_feature (1012)..(1016): n is a, c, g, or t
  misc_feature (1018)..(1018): n is a, c, g, or t
  misc_feature (1020)..(1026): n is a, c, g, or t
  misc_feature (1028)..(1028): n is a, c, g, or t
  misc_feature (1030)..(1030): n is a, c, g, or t
  misc_feature (1032)..(1032): n is a, c, g, or t
  misc_feature (1034)..(1034): n is a, c, g, or t
  misc_feature (1036)..(1038): n is a, c, g, or t
  misc_feature (1040)..(1041): n is a, c, g, or t
  misc_feature (1045)..(1048): n is a, c, g, or t
  misc_feature (1057)..(1059): n is a, c, g, or t
  misc_feature (1086)..(1092): n is a, c, g, or t
  misc_feature (1103)..(1112): n is a, c, g, or t
  misc_feature (1120)..(1129): n is a, c, g, or t
gatagtttatttgcagcctgcgctttatggtactccaataagggacctgtacttctgaactatcttaggaatgggtgattgtcacttattataagactcatgcagtttcagggtaacttcaagtgtgccattaccaaacctttcagtgtaattactgccaaaagtttattccattaggcaataccatgctattctcacaggtttacatctttactttccttttcagttgccagttttataaagatatctgttcaaagttagaaaatgaatttaggcgatctttggagagtgaggtagccttttctctgtcgtctatgattttctccttacttgatcattgacattttttaatttacaatttaataactcactgcaaaggtcagtgatatgcatggagaagatgctataactcccttgccttggtatccatgcagtcttgcatggcacctgaatttctcccggaaggaattgaggaaaaatcaggcactcgaaaggtaattaattgtagcatggtgtttaagtcttgccatgacatgaatcttgcttggtctatgtagcgtaaatacgagacacttttgcctttgcattagtgaatatatggtagggatttggggtggggtggagatgtctgagatggtcttgaagtgggcttcaaactgagttgtattgggtcagaagaatcaggatatccaataagcatcagatactggtactgcagattggtagagcatctgattaaacaggaaatatctgttccacatttatgttattaaaatttatctaatttcaggnnaaattggcttatgtagtattggcttttatgagcagttagttttcccaaaagcttaaattgttatggggaagtcggctatatatttcttctactttcaaagtattattattattctgaacaattaatttctgtttctatattgatgtgctatcgattaatctnnnctattgatgctatattgtccccgaggaggagggctccccgccgcgggggnngtgnnnnncntnnnnnnncngngngngnnncnnttannnnagcggcggnnnccgctctgggagatgacgccgcggggnnnnnnnatataattcgnnnnnnnnnnggaggagnnnnnnnnnntgtcgtc

SEQ ID NO: 2825 - DNA, 380 bp, Zea mays
aatcaatctattggtttcgacgagatatgtggtggtgaattcggcgggtcttgagaggggaaagggatttttaaaaaaaaaaccctgaaattttgtcagcggttccttggcctggctgcccgctttaataatggccgcgcggctggttggcttgccccaggccagatgcattgctcaggaggcaggagcgcttgggccgtgcgagctgcgggatttgggagatgcgtgcagttgaatgcgtgggattcgccgtgatttgtttatgctgatcgccctctcctcccgacccgtgctccctccgcgtccgctctctccctttttctcgtccccagttgccgccgagccaattcagcgccgctttactgttatataagccgcgc

SEQ ID NO: 2826 - DNA, 380 bp, Zea mays
  misc_feature (37)..(37): n is a, c, g, or t
  misc_feature (61)..(61): n is a, c, g, or t
  misc_feature (68)..(73): n is a, c, g, or t
  misc_feature (85)..(85): n is a, c, g, or t
  misc_feature (186)..(186): n is a, c, g, or t
  misc_feature (248)..(248): n is a, c, g, or t
aatcaatctattggtttcgacgagatatgtggtggtnaattcggcgggtcttgagaggggnaagggannnnnnaaaaaaaaaccntgaaattttgtcagcggttccttggcctggctgcccgctttaataatggccgcgcggctggttggcttgccccaggccagatgcattgctcaggaggcagnagcgcttgggccgtgcgagctgcgggatttgggagatgcgtgcagttgaatgcgtgggattngccgtgatttgtttatgctgatcgccctctcctcccgacccgtgctccctccgcgtccgctctctccctttttctcgtccccagttgccgccgagccaattcagcgccgctttactgttatataagccgcgc

SEQ ID NO: 2827 - DNA, 379 bp, Zea mays
ttgggagtgttttcgaggaaccacagttgcccaatattgatcctcctgctggtaaagatgcaagagaagttgaagaagtcgaaatgacgatgagggatggtaattatcgagatgctggcacagatgcatttggtgataagaatgaggcatctggaactcacagttcagatggtaataacgcgaaggtcaagagcaaggatgattctgctgacaagctggtttcttgtcacgatgagctgcgaccagttgtgacgcttgtgacctattcagactcggaagatggtgaaacgctctaggttaactgagcaacggattgcgtaggtggaggtacttgtaaactgccagcagaaatgatgccagcatgaatggatgcccatga

SEQ ID NO: 2828 - DNA, 352 bp, Zea mays
cgcctctagtcgatgtaaagccgaagagaagtgaagatttgacacagagggaggctaaactagggctaaactggaactactcataatgcataaggtaaaaacgttaagtagatttgatttgatcgattgtggggttcaatcgcccgtagcccttcatctatataaatgggaggtctggacccgttataagtcggttcacgagttaatctcgcagatttagctaacaaatcccgcaaaaaaatcgaaaccataactgattctgcgcacgcgcgaatcgtccgtgccaccaccgcataccgttcggaccgttcggcctacatgccagacagtccgtctccccaaaagtgggctc

SEQ ID NO: 2829 - DNA, 773 bp, Zea mays
aagcccaacaacgactcatagacaatctgcctgatgagtttgcaaaggtatgtattttttggttcttaacttctctagtcagatgtccttgcttatgttaggaacttaggatggaagcttttctctataagatgttctcttaccacatatgtttttttttgctttgttggcgtatcatggcctcgtggcttgtttcacctaatcagcttgtaccttaagtttcgactattttactacttttggtcattctaaaatagtgacagtaagagacggttaattttatggatggtgtgaattatgggctcttcctgtttcatttcagttatacagttctctcttcttttactggatgacatgtgaagctttcccttacatatcctttccatatgattttcatgctctaagcaacaactgctgtctggtggaataggtgcaacgggaataccatcttccgtcgggagattttccttatgtggagcacttcaaagaggtcttgagcgggtacagctttgacaagtttgagaaggtgaagcccaagatgatacaggccgtggatgatatgcttggatatgacattcctgaacttctcaagaacttcagaaacccatacgagtgaacccatacaggcggttgaaagatgacttcgatctgcaacagaatgagggattgattgtcaggcgatgtgaatcatagtggtcaatgtctcttggggcgttcattgccatccatgcttagccattgttatataactttatgcataagaatcatagagc

SEQ ID NO: 2830 - DNA, 471 bp, Zea mays
  misc_feature (329)..(329): n is a, c, g, or t
  misc_feature (331)..(331): n is a, c, g, or t
  misc_feature (338)..(341): n is a, c, g, or t
  misc_feature (346)..(351): n is a, c, g, or t
  misc_feature (400)..(400): n is a, c, g, or t
  misc_feature (402)..(402): n is a, c, g, or t
aattacaggttcttttgatggcaacttgaagattcttgagttgagaagaaatattggagaactggaagagatcctggtggcagagaagactgactttatggttaagtagttttgagtttctttgtataatgttttattcaattgtccactgtcctatgcatgtctgcacaaataaaatttctatagtgaagctgttctctgattatttgagtttttatctcccaggagtcattaaagaatctactgaaaacagatatgagaaaggaacagccgttcattgatattcttgatgtcaacaaactaaggaggcacttattatttctgtgatntngtcgatnnnncacannnnnnccaccgaacagggaatgctgggattactaacacactgtgccaatcaacnantttcaaatcaacagtacatatatctgagtaagaataatcaaaaacaataacctgtaatcatcatccaca

SEQ ID NO: 2831 - DNA, 391 bp, Zea mays
  misc_feature (381)..(387): n is a, c, g, or t
ctgaactacaaaatgaaagaagcaaatatcatgaaacaggcgctgtgaataacactagtgctgggtcactcagatcacaagcaaggaggtattcgactgcagcgagttttattggtgtccaaggaccaaagaaagaagtcacttctgagttaccgagtctggataagttcttggtgaagcatctttcaaaacttgaaagagaagttcaggaagcaagagaagcaagcagaaaatccacattagtaaagtctgtcacacaaggtgcccacatccaatttacaggcagcaatgcaaagacaccagaatcaacttcagaactcagcagcattctggtgaagcatgtgtctaagcttgagaaggaaatcctggaagcaaagaagnnnnnnnaaag

SEQ ID NO: 2832 - DNA, 388 bp, Zea mays
cagtttctcaacctcagctcaaatagattatctggtttactggataaggatctatgtccgcattgtatgactgtattcgatgtcagcggaaatgaactttcaggatcaattccagcatgtgtgaataaagtctgtacttctcagctaatgctggatgaaatgtcatccagttattcttcattcctcatgtccaaaactctacaagaactgccatcagttttttgcaactccggggagtgttctgttgtgtatcataattttgcaaagaacaaccttgaaggtcaccttacatccttgccatttagtgctgacaggtttggaaacaagacgtcatatgtgtttgtcgttgatcacaataatttcagtggatcgttggattcaattctgt

SEQ ID NO: 2833 - DNA, 393 bp, Zea mays
tgtacacgctaagtctaacaatggcattgggggtcagttgatgtaggtaaattttgaacttcttcaaaacatcaccgatcatctcataaaggggaatcaaagtcctaccttgaagaagcttttcaagactacgacttcatcctcttttggttctagaatcacctcctctccagcaaaacgaaccagttcgtcatcatcctctccaaagtatcctagtgttgggggccttcggcttccgaaggtcctcaaaaacataatttgacaatgttttccaagtatgcgagcaggtatcttcggaatcaggttgcgggtatacaaaagcatggtcaagacgaagcttgactgaaatggaagacgatcgtgacgaaggatgaaacgatcacgaagctatgt

SEQ ID NO: 2834 - DNA, 350 bp, Zea mays
  misc_feature (342)..(345): n is a, c, g, or t
gtatatgtgcacataccgctgtaagatatatgtactgtgaaaaggaattagactctcgttattccaatagagtactgcacttagttggaattttcaagtctcctagtgtcttgggaattgtacttatatagttcacctttagaaaattcaagggaacacaattaaaaattcctaaggtagctatctagagagctagattattctgtgaggaggcttaactatagaaacaagacatacattagatgcaaagtacttgacatcgagttagtttattaattaggtgaatatcagatcacaagattgttaatcccaagcgtgctgcagatacatacctcattgagnnnngcaca

SEQ ID NO: 2835 - DNA, 659 bp, Zea mays
tagcgacggaacggaaactcggaaaggcaccccatgcgcgttggatggaggagccctggagagtggagatggtgtttataaatccgctcctcctgccaccccaaggtttcagaaacccaccaccgcaacacctgcgctccgcggcctgctctctctttcaaacagcttcgtgtgtcgttgcgccgcgcatagttccagcgccagctcggcactgaagaatctggtgaccggccgggatcgagagccaagctcgagcaggaacggagagcgcgcggatatatatatagctagaatgatgatgatgatggacaggcagctcgtcaggcaatgcgacatggaggtcatgaggatggccatgctcaagcacgaagagaccttccggcagcaggtaaagcgcgcgccgacaaacttcggcttcttcttcttctttctcctgctgtccttcacaccgtcgctacttgtctaatatatttcacacatcatcctgcaaaggaagtgtatgaagcaagtatgaagtagaaactgctgctgctactgatcgatcgtggaatggattatcgccattgttcttggcaactaaccgtcttatcgtctgatcaggtccacgagctgcaccgcctgtaccgcatacagagggagctgatgagcgacctaataac

SEQ ID NO: 2836 - DNA, 1094 bp, Zea mays
  misc_feature (53)..(54): n is a, c, g, or t
  misc_feature (1033)..(1033): n is a, c, g, or t
  misc_feature (1084)..(1085): n is a, c, g, or t
tcttcgacatcgtgctcatggacctcgtcgcgcgcatcgagccgctcttcganncctttccagaccaggatctacaacctcaagtcgtccatttgcttgaggaatctcaacccatctggtaatagattatttcttttggacaaggtgacaatgctcgaaccaagttagactgtacattgtgtgatctgatttgtgatttcgtgttcgttgcagatattgagaagatggtatccatcaagggtatgataattagatgcagctcggtcataccggagctcaaggaggctgtgttccgctgcctggtttgtggtttctactcagagcccgtcatggttgatagaggtatggtgctaatagacatcttgatcatgcaactctgacccgtgatctcatttcaatgaattccgaaatatacgccacgtcaaaataagagcgccagtttggaaattcaacccccctgagaaaattagggggatttgagtttccaaagtagtccttgggtctttttggttataagggtttcccttgaatccccttctaaccaaacaagccttaatgtttggttggtccccacacagcttttcccagtgcaaggtgctcttcgaggcttccgattttgggtaaatgggggctcagattgttgtgcagtgtctgagctgcttgggaggccatgacccatgagccaagcctctaatgcccttcaaagaataatcacacatctttggccttgtttttttttatcttgaaggactagctgcttcgaaatgcatacaatccagcagtatatgatacaatgtatattcaacaccgtagctgatagaaagatatgcatgccatagtggaccatttaagtttgtctgtttgtattgtttttatcaatgtaaaactaatataatgtgtattgcctttctcaggaagagtaactgaaccacacatttgtcagaaagaacaatgtaaagccacaaattctatgaccctagtgcacaacagatgcaggtagctacacctacttgttgtcatttttgtctttaanagtactcttaacagaataaaaatcacgttgaatttaacattgtttttacannaccagattt

SEQ ID NO: 2837 - DNA, 429 bp, Zea mays
tcgataactcgcaggggcaaagaggacgaacacttactccatctctcaaaggtcaaagcccctcgccggcctaacaaaaataggacacacctgatactcttggtcttgggaggaagaggacgagcaaagctaaacgaactcaccaaactagcttgctactagcagtagcagcacactgctgaagtatcacttggtgacgtgacgtcagagtagcttgtagccgatgacccggacgttggccggcgtcccgtgctggacgtacacgaacctgaggctcttacctgcgcgcaacgccggtagccacttgggcgggacgtacccgtagcgcgccttgtcgaggccccagagccggccacggagctccgagacgccgaggtggagctcccggacggtcttcctcgacctgtttgtcagcgtcaccgagtagcg

SEQ ID NO: 2838 - DNA, 487 bp, Zea mays
agaccaagaatgcagccccctgtttcactcgaggtaacgcaacgctaccatgatatccttttacctggccattgtccgctggtatagcccccgagccttaatctgctatgcccacatcctgtttgatagaacgccaagaccagcggcatcatcggttgggagctgttcttttccaaggcaggaagggcagggcgcagcggccggcctcgcttgatttcggctgccctggtgttgccagatcctcgacgcattctccggggttcccggccgccggcgtcgcggtggtgaacaaggggatgggcgtatcgtatccgtcacacagtaggccggacgtgctgtctagtccggggacaccgagctgcaatcggcgtgggatggcaggcgttggctaccagcagggtcctcgttcagaaagagtgatcccgccttggaccggccatacaagccattctgggagcggcatggtgttaccttacagcactgggac

SEQ ID NO: 2839 - DNA, 608 bp, Zea mays
tgatctcatgctgggagaagaggacctgcttatatcagggattatttgtgttgccacatccttcctcacaattacaggggcactgctaatgtcaaacagccaaagtctttttagctttcaatttgcccatctgcacaagcagaaaacaataattcaaaagaatattaatgtcccttgagaaattgagcaaacaaaaatacaaaataaggtcaaatgcactgtgtgctaaataacattagaatgaagctgattatcaatatttaagccctctaaaactacctaggtcaataggggattctgctacattaactgtagatgaattcaagaatcaatgctttatcatgaacatttattaacagtactccgatgctaacaaaaacataaagaaagaatatatataatgcttaagcacattaagcctgtaccttgtactgattcatggaaccatcaacaccaacactaaggttggttggtttgtccgtattcatgtagcaatttcctgagcttcacttgtaactgttatttcgcctgtaagcctagaatatattgcagaaccaggacggcaattctgttcctccatgaatgatagcagacgggagcagtcagca

SEQ ID NO: 2840 - DNA, 1184 bp, Zea mays
  misc_feature (770)..(771): n is a, c, g, or t
  misc_feature (774)..(777): n is a, c, g, or t
  misc_feature (781)..(783): n is a, c, g, or t
  misc_feature (786)..(787): n is a, c, g, or t
  misc_feature (801)..(805): n is a, c, g, or t
  misc_feature (808)..(815): n is a, c, g, or t
  misc_feature (817)..(819): n is a, c, g, or t
  misc_feature (822)..(822): n is a, c, g, or t
  misc_feature (829)..(829): n is a, c, g, or t
  misc_feature (837)..(840): n is a, c, g, or t
  misc_feature (843)..(849): n is a, c, g, or t
  misc_feature (852)..(852): n is a, c, g, or t
  misc_feature (854)..(860): n is a, c, g, or t
  misc_feature (866)..(871): n is a, c, g, or t
  misc_feature (873)..(873): n is a, c, g, or t
  misc_feature (875)..(898): n is a, c, g, or t
  misc_feature (900)..(921): n is a, c, g, or t
  misc_feature (923)..(931): n is a, c, g, or t
  misc_feature (933)..(965): n is a, c, g, or t
  misc_feature (968)..(983): n is a, c, g, or t
  misc_feature (986)..(999): n is a, c, g, or t
  misc_feature (1001)..(1004): n is a, c, g, or t
  misc_feature (1006)..(1013): n is a, c, g, or t
  misc_feature (1015)..(1047): n is a, c, g, or t
  misc_feature (1049)..(1084): n is a, c, g, or t
  misc_feature (1086)..(1088): n is a, c, g, or t
  misc_feature (1090)..(1090): n is a, c, g, or t
  misc_feature (1094)..(1094): n is a, c, g, or t
  misc_feature (1097)..(1098): n is a, c, g, or t
  misc_feature (1100)..(1145): n is a, c, g, or t
  misc_feature (1153)..(1155): n is a, c, g, or t
  misc_feature (1157)..(1157): n is a, c, g, or t
  misc_feature (1159)..(1178): n is a, c, g, or t
gattttcttgttgttgtcctgtgcagctcgatggcttgttggcgatggtgcagcctgtcctctccaatgatcccaccgtacagttgatgccttgcatcgtctgatccctaggttgtgtggtatgtttgactctgcaaataacataccactggcactgaacatcaaccctaaaaaatatttaaaggtctgtgttgcctcttggtttatctcaatgtcacatgttttgcattctctgtggtctgtacttcataagttagtctatttatttcgtgtgattgtacagacaccattctctgcatgccaacatctagctgatgaagcaccctcattaccaagtgagcaaaaagagctcaggctttacaagcaacatgttgatagtctgcaccaattggcatgtaagttctggtagtcttcaatgaactgagaacaatagatagcacatacttgactttcaaatgtggcattgttcttttgatattttggcttctgaatctacagtcgtacatgtacatttgtatttgcatatcttaagaatttcatgttatgacaataaattgagatattaatgttgtcagctttcactttataatttcagcaaaaaatatgatagcctgagaaatattcaagtcatctagctgacgaagcatatcctcattactaagggagcaaaaagaactcaagctttacaagcaacatgttgatgttcttttgttgagattggtttaagtgctgtcttggttttcgttcttctttctgactactctcaaccnnaannnngtgnnnatnngatgcttgattacnnnnncannnnnnnntnnngtnacagttngttgttannnntgnnnnnnnttnannnnnnnttttcnnnnnntnannnnnnnnnnnnnnnnnnnnnnnntnnnnnnnnnnnnnnnnnnnnnntnnnnnnnnntnnnnnnnnnnnnnnnnnnnnnnnnnnnnnnnnnaannnnnnnnnnnnnnnnaannnnnnnnnnnnnnannnntnnnnnnnntnnnnnnnnnnnnnnnnnnnnnnnnnnnnnnnnnannnnnnnnnnnnnnnnnnnnnnnnnnnnnnnnnnnnannntntttnttnntnnnnnnnnnnnnnnnnnnnnnnnnnnnnnnnnnnnnnnnnnnnnnnaaaaaaannnancnnnnnnnnnnnnnnnnnnnnagaaaa

SEQ ID NO: 2841 - DNA, 358 bp, Zea mays
ttttctcaaacaaaatgcaaaaacttatttgtacgtgatgccttagccactagacagtcccagggcaggaagccggactcgctgtagtaacactacttctggtagatcttcacgtccggattgcgcatcggcttgagccacatgtcagccatcaccctcgacgacatgctccacagcacttcattcccggccttcccggacaccgcggctcggttcttcctgccggcggccttgcccagcccgtaggcgacgagccagtgcatcgccgtaagccgctgcttctcgccgtcccacatattgcgccggtcgggcgacttcagccgcaggcctccgaggtgcaggttcgctaccttgaact

SEQ ID NO: 2842 - DNA, 259 bp, Zea mays
  misc_feature (233)..(247): n is a, c, g, or t
cacgacgagaaggaaagaaacccctgctggtttctgagcactcggaagcaaagcgagtgcaccacactctcggtgtcgttctgtgtaattttttctctctctctgccactgctcccttcccgtcccgtcccgtcccgtccctgaaaaatattccgtgaggtttaggctcgatcacaaatggagatcttgatccgcggcaaggaatccttgtcggtctctgttttttttttcannnnnnnnnnnnnnntccctttttttg

SEQ ID NO: 2843 - DNA, 394 bp, Zea mays
tgactgcagaagaacttgcctccaaagaactctcagagtggcggctggctaaagctgaggagtttgcacagatggttgtccttccgaatatggaggttgacccaaggagtttggttagaaaaactcacaagggagagttccaagttgaagtcgaagaaccagatggaactgaaatgtatatttataatgaaagcaacaacttagaggtaacattattaggagtttttcagagtatggtgagaatgtttgtttgttcaaatgagcagttatggtgtcatgattctccaggacacttcaagagtctttggaggtggggataaagaaagcaacaacagtgaggaaccggatcccaagccggctgtggagatggaagacctaaaccaaggcaatgatc

SEQ ID NO: 2844 - DNA, 379 bp, Zea mays
cgctgcgatccttttgataaatagggtctactcattgctcgtgcatgacaattcatccatcaggactgttatccctgaaagcataatgtctatagaggtagtagacacgacgacgaagatctattggtcttgtctcaggtggtgctgtgtcgagagatgccccagtttggacagtgtcttcgccactaactacgatgctgtctgctttaatgctctagagaccttctgggcagctgatctcttggtggcccgatgtatctggagtaaaggaagaacaactaatgtgaaggacaccgaatccttcgctaaactgcaggctatacatctccactcctgtcctaggctggcatttgtcctcccactatcgtggttctacacc

SEQ ID NO: 2845 - DNA, 1083 bp, Zea mays
  misc_feature (993)..(993): n is a, c, g, or t
tgtctacttactggtatacagtatactgggcaaactaactgaacatatttctgatcgtgataggcctggagaagatctatggattctactcccatcatgacacaaatcattccacaaattatgaacccagagaaagcgtactcgttccgcacaatcctgataacacacaagaagcgtatgttgatccatatgattcagatatgactccaagcctcctggaggctttgcactggtcaactatggacataaggtatccaaataatgagtaatctaaatcattttgtttcttgaaaaggttacagtaacagtttatgtgtatatttagaatcttaactcggcaagcaatgtgtagttgtatactaccttgtagtcttgcgattaccatgtagtatcattgaagtaatttatgcaactttactttccctaaggactccgtgagctgttcatttcttttttctcgaatgaaacattatattggaagtatgcaactatgaatgccctcatcatccaaggttctagtcctctttggctccaaaatgggtggctttctgtgctttaatattaattaataaaatgtactttcatgttaaccaggttttacccaacaaacctctctcatagtcatatggttatagtcacaagtgccttatgtaatcaaactattgatgtggtgccttgtgttttccccagcattcaccttattgaatccatgatgcttttttggcactgcatgcctataccattgaatacactaaatatgagcaaacaggagtgccctagtattgtattgttgttctatgttccctatacgctgttgctgtagtgacatgtcatttccttgctgccttatgacatatctcatgagatcaagggtatttaagttcatcgtgtatgataagtctaagatgaaatgtcttaaaggtcctcatatttgataaatattcatggatggtttaccaaaggcagtgtggtttaatacagccatctattttntaatccagtctttttttgccaacagtggtgcagagtatagagggaaggaggtaccacttcttgtggtccctacaaggtatctcctcaagc

SEQ ID NO: 2846 - DNA, 379 bp, Zea mays
tcagcagttcaacagcttttaacagatcagtatatgttggttttggaggaagtgattaggaagaagaaacgatggaccacaatggtaagtgctcaccgttcgtaaatatatgacaccgttgatttttttaaaaaaaatttaatcactcgttttattaaaaaaataatgagttatcatttatttttatatgatttagtttgtgcttgacttaaaatttttacattttagaataaatattttgaataagatgagtcgtcaaagttttcaaaaaaaatcaatagtgttatatatttatgaacggaggtagtactcacttcggactgaattattgtggaaagaccatgaggatgtccggaaagtcacagtcatgcttcagtat

SEQ ID NO: 2847 - DNA, 441 bp, Zea mays
gaatcgttggagttgagccaggtcatatatggttttctttttgtcaaacttttacttgcaaatttgcagcttaccagtcgatctttatctttatctgaatatctgtaagaacaggcgaaacatatcgcttccgcgtccacaacgttggcgtctcaacaagcctcaacttcaggatccagaaccacaacatgcgtctggtggagaccgaagggacctacaccaaccagcagaactacaccgacctggacatccacgtgggacagtcctactctttcttggtgaccatggatcagaacgcgagcaccgactactacattgtggcgagcccgaggttcgtaggcaatcctcgatggcacgaagtggctggtgtggccgtccttcagtactccaactccaagggtagggcttctggcagcctccctgatgctccagatgatcact

SEQ ID NO: 2848 - DNA, 591 bp, Zea mays
atttgcagcaggttagacatgtcgtcgtcgtcgtcgtcaatgctacgccttcctccatgccgtcccgcagtccatccaggtgccaaactttcctcctcctcctccattcacggagcattttcctgtgcgttgtactgcttcacttttgcctgggaatttcgcacgtagtttggtagagagctggcgggcgtcgtctttgcacggctgaggacatgacaaggtaatctgcatgaaacagtgtgtaggggtgctggatcatcaggagggagcagtagcacgcacccactccgatcaagctcaagatcaaggccgtcgtcgctcaccgctgcgtgcgctctcaagacgccctcgaatggcggatcgagggggaaggcgaaggtcaaccccagggacctcttcaccttctcccacaagttcagcaccgacatcccgatgagcgaaacgcaaggggtaggttgctgctgcaagtgctcaaggatcggccggcttggggggttttttctctgcacatcgcagatgatctgatcccacggagccgtctctgtctctgcactgtgcaggcgtccatcgatgagtacctgcggaacagtc

SEQ ID NO: 2849 - DNA, 349 bp, Zea mays
ccaatgcatctgatttgctggacactgagtggccaggtcattattcacaagtttgcttggactacggcagtcagtgagagttcagttgcacttgtgattgatggttctcatgttcttgttactcctcttattttgggcctcatgccacctcccatgtctctgttccaccttgcatttccttgcgctgtgaatgaggtttcttttgtgaccaataactcgaagagccatttggctgcttatctctcaaatggcagcctgtctgttgtggaacttccagcacctgatacctgggaagaatttgaaggcaatgggataagtgttgatccttgctgttctgacttcaaattct

SEQ ID NO: 2850 - DNA, 361 bp, Zea mays
tcgcaagatccatccgcaggtgtcggcggcccgcggcccgcgcgaaagatggcgcctttcccaggctccccgggggtttgtcatcgtttcttggcccctatctaaagcggcggtttccagggagctgccgtccccgcccaattcagctgaggtggcggcaagtgggtttagggctcgattcagtgtgttgggtcgtgtctgactctgacccggtggggagcggtggttcttggctagttcttgagctggttgcggcgcttatccctcctcctggagttgttggattggcttgggggaagcagattcttgccaccgagggtccagcctagcgagctgctgcttcggttatcgtagaggagtt

SEQ ID NO: 2851 - DNA, 353 bp, Zea mays
attggatgtttttcagacacagttcagagtgcttgggactcagttttgaatgagacgtgccctttcaaaccatctatctgaaattaaagaagacaactcaaaggctagttggatggagcgataaacaagtgggacatataaggtctcagttggcattggctaaagaaatccttcacaggctggagattgaggggggtggaagaaccttatcaccggctcaaatctagttgaagaacaaggtaaaaaagcattcattaccattatcttccttgaaatgaaccatggcccggttgagaattgagatcaagaatctcatggctcaaggaggggggtgcaaattcaaagctcttcca

SEQ ID NO: 2852 - DNA, 461 bp, Zea mays
acgcggcttgttcttattgaatccatcaaggacgcaggaaagataggatcttcggctccgattctcggagcaacagcgcgaccgcagcgggttttggtgcttcctttctttagggttgtgtccttgcagaagttgctctgtggaatggggacctgtcggaggagagttctgggggtatggtttttcttctggttcttgttgacacttgagcagtgcacatccctgaatcgtgaaggtatctatcgtgttgtggtttgaatcgcttgcgtggatggttgttgcccgacctttgtttttgactctgtttagggttgtttctttgctgaactgcaggtgctgctctgctgagatttaaggcggcgatcgaggcagacccatatggtgctttgttggactggaatcaagagagtttgagcccctgtacttggtttggtgtggaatgctccgatgatggactagtc

SEQ ID NO: 2853 - DNA, 230 bp, Zea mays
caagttaaagacaatacatatgcacatatgtagagtagagttagaaacaaggtaaatagagaacatgagttgggttcaaaaagcatcataattcaggttataccataagaaatatttataacaagtgtcttggcctctgaacctacaccagagctggatgcatgttcaattactcgaccgcttccagtagagatggccattttccagcggtttaatgaatgtgtgtttga

SEQ ID NO: 2854 - DNA, 401 bp, Zea mays
gcgacccgttgcgctcacgcgctccgtggccttccaggaggggtcttgattcttcttcaagtacatccatcagcagcagcaggaatttcctcatgcagcgttccttctcatctgaacttctgaactgaacatgagctgatcagcctgacagtacgtactgaattttgtttttatataaatcatcataggattgtaatatctatctatatgctgagtgggaaacttagctagcgtatgtgtaagtggacttgtaatataggcggcacgcaggatgtacatagaattaattagctatatgggtttgagaaataaagaccaggagatcaataagaggtccctgggtgtagataaataacattaggggaaggaatgtattgcttcaggtatttcactcttcagca

SEQ ID NO: 2855 - DNA, 500 bp, Zea mays
gcgatgatgttgaagaatatcctggtgaaatacattacagttctagtcgcatagtcctaaaccttcatcgcagggctttatctctgaaggttgttaacaaggcagacagacccattcaggtgagcacgcctgggtatttttgtttggaccctggtgcaaacctgcaaagactttgtttcctacttatccttttgctgccaaaataaaaaaaaatgtaagttttttttgttaattttctaaagaggagataggtggcttactcatttgttgaaaattgaaattgcatcccgaatagttaaattcagtcttaatcaatgccatgttggcatcccttctggttaatgttttaacaccccataccacttgtggcgagacatgtttttgaactggcagacatgtaatactgttgttaatactaataaatccagagaacatttgccctgttccaccatgttatgttgaacttgtacgcgtgtttcaaactacgtgtaggtgatggt

SEQ ID NO: 2856 - DNA, 380 bp, Zea mays
cgccgtcgtcccacgggtgtcccccggcgccgccccatgggccgaccttgatcagcttctttttcgacaccaccatcttcctctgcgattgctgctgccccaaaaaaaaagacatgcagtttttttttaaattcagacattccccatttcggaaatcctgtatgctttcaaccacacgccctagttagttcctctcttttcaaaccaatgaaagaacgaaagaaaaaaagtttcagcagtttatgtctgaacagagaggcatgcgagaaagacgcgaaattcctaacggcgcgcaggaacaaaaagcaaacgaacagaacactagtgaagtccatgtgtgcaccatgtttccttcccttccaggggggtcttgagagaat

SEQ ID NO: 2857 - DNA, 1460 bp, Zea mays
  misc_feature (362)..(362): n is a, c, g, or t
  misc_feature (374)..(376): n is a, c, g, or t
  misc_feature (476)..(476): n is a, c, g, or t
  misc_feature (554)..(557): n is a, c, g, or t
  misc_feature (559)..(559): n is a, c, g, or t
  misc_feature (561)..(561): n is a, c, g, or t
  misc_feature (563)..(563): n is a, c, g, or t
  misc_feature (569)..(572): n is a, c, g, or t
  misc_feature (577)..(578): n is a, c, g, or t
  misc_feature (587)..(588): n is a, c, g, or t
  misc_feature (598)..(598): n is a, c, g, or t
  misc_feature (607)..(611): n is a, c, g, or t
  misc_feature (636)..(639): n is a, c, g, or t
  misc_feature (645)..(649): n is a, c, g, or t
  misc_feature (657)..(661): n is a, c, g, or t
  misc_feature (684)..(693): n is a, c, g, or t
  misc_feature (695)..(708): n is a, c, g, or t
  misc_feature (711)..(711): n is a, c, g, or t
  misc_feature (714)..(718): n is a, c, g, or t
  misc_feature (721)..(731): n is a, c, g, or t
  misc_feature (733)..(735): n is a, c, g, or t
  misc_feature (740)..(745): n is a, c, g, or t
  misc_feature (750)..(752): n is a, c, g, or t
  misc_feature (755)..(762): n is a, c, g, or t
  misc_feature (769)..(787): n is a, c, g, or t
  misc_feature (789)..(792): n is a, c, g, or t
  misc_feature (794)..(795): n is a, c, g, or t
  misc_feature (799)..(804): n is a, c, g, or t
  misc_feature (806)..(806): n is a, c, g, or t
  misc_feature (808)..(823): n is a, c, g, or t
  misc_feature (840)..(851): n is a, c, g, or t
  misc_feature (853)..(870): n is a, c, g, or t
  misc_feature (874)..(876): n is a, c, g, or t
  misc_feature (878)..(878): n is a, c, g, or t
  misc_feature (880)..(890): n is a, c, g, or t
  misc_feature (892)..(894): n is a, c, g, or t
  misc_feature (898)..(900): n is a, c, g, or t
  misc_feature (904)..(906): n is a, c, g, or t
  misc_feature (910)..(923): n is a, c, g, or t
  misc_feature (928)..(944): n is a, c, g, or t
  misc_feature (948)..(950): n is a, c, g, or t
  misc_feature (956)..(960): n is a, c, g, or t
  misc_feature (962)..(970): n is a, c, g, or t
  misc_feature (974)..(974): n is a, c, g, or t
  misc_feature (976)..(989): n is a, c, g, or t
  misc_feature (998)..(1007): n is a, c, g, or t
  misc_feature (1011)..(1043): n is a, c, g, or t
  misc_feature (1050)..(1050): n is a, c, g, or t
  misc_feature (1052)..(1065): n is a, c, g, or t
  misc_feature (1067)..(1077): n is a, c, g, or t
  misc_feature (1079)..(1085): n is a, c, g, or t
  misc_feature (1087)..(1102): n is a, c, g, or t
  misc_feature (1108)..(1116): n is a, c, g, or t
  misc_feature (1118)..(1118): n is a, c, g, or t
  misc_feature (1120)..(1123): n is a, c, g, or t
  misc_feature (1126)..(1132): n is a, c, g, or t
  misc_feature (1143)..(1144): n is a, c, g, or t
  misc_feature (1146)..(1146): n is a, c, g, or t
  misc_feature (1148)..(1152): n is a, c, g, or t
  misc_feature (1154)..(1162): n is a, c, g, or t
  misc_feature (1165)..(1167): n is a, c, g, or t
  misc_feature (1169)..(1170): n is a, c, g, or t
  misc_feature (1173)..(1189): n is a, c, g, or t
  misc_feature (1192)..(1192): n is a, c, g, or t
  misc_feature (1194)..(1198): n is a, c, g, or t
  misc_feature (1201)..(1214): n is a, c, g, or t
  misc_feature (1219)..(1221): n is a, c, g, or t
  misc_feature (1223)..(1223): n is a, c, g, or t
  misc_feature (1232)..(1243): n is a, c, g, or t
  misc_feature (1245)..(1259): n is a, c, g, or t
  misc_feature (1269)..(1275): n is a, c, g, or t
  misc_feature (1277)..(1297): n is a, c, g, or t
  misc_feature (1300)..(1300): n is a, c, g, or t
  misc_feature (1303)..(1345): n is a, c, g, or t
  misc_feature (1348)..(1350): n is a, c, g, or t
  misc_feature (1352)..(1368): n is a, c, g, or t
  misc_feature (1371)..(1381): n is a, c, g, or t
  misc_feature (1384)..(1387): n is a, c, g, or t
  misc_feature (1389)..(1402): n is a, c, g, or t
  misc_feature (1404)..(1404): n is a, c, g, or t
  misc_feature (1406)..(1429): n is a, c, g, or t
  misc_feature (1433)..(1435): n is a, c, g, or t
  misc_feature (1438)..(1456): n is a, c, g, or t
cttttctctggcttggatcgtcacgcagaaggtgatactatttctttcaccgtgccctcgagaaagatgccatttcaatgacttaatatccaaaaccggtggaggagagcacagcttcgagaattccagcaccaatttgacccatttgcatggctgacaatccaagtccaattatgcaggacgaaccacagctgcagatctgattcagcagagaacacatcgcactgctcctcacctatcttttccacccttcacagcctttgagctgttcctgccacacaaaagggccacaaaccacaagctgctgatgaatgacaagacactctctgcatcttcggcagagctggcatctcctcaaagcngcaaaggcaaannntactactccctccgtatcaaaatgttattcatttttgctcttacattttatgtctatgttctataggataatgaatctaaacatatagtatgaatttagnaattaactaaaacgaattttaatttgtaacagagggagtattagtaattaactaaaacgaattttaatttgtaacagnnnnantngnatattnnnngatgnncgataagtnngaggaggcgnggtgtgcgnnnnngcggataggctgactggctgagccnnnnttcgcnnnnnggccgtgnnnnngggctacgttgaatggaccagtnnnnnnnnnncnnnnnnnnnnnnnntanctnnnnnagnnnnnnnnnnngnnnatttnnnnnnatttnnnaannnnnnnntcctcannnnnnnnnnnnnnnnnnncnnnncnncatnnnnnncncnnnnnnnnnnnnnnnntcccctcccacccctcnnnnnnnnnnnngnnnnnnnnnnnnnnnnnnatannncntnnnnnnnnnnnannnaaannnaaannnctannnnnnnnnnnnnncttgnnnnnnnnnnnnnnnnnacgnnngtcgcnnnnnannnnnnnnngtcncnnnnnnnnnnnnnngctctttcnnnnnnnnnncccnnnnnnnnnnnnnnnnnnnnnnnnnnnnnnnnnctcttgngnnnnnnnnnnnnnncnnnnnnnnnnnannnnnnntnnnnnnnnnnnnnnnnctcccnnnnnnnnncncnnnncgnnnnnnncttcccttctnntnannnnncnnnnnnnnnacnnncnntcnnnnnnnnnnnnnnnnncanannnnnctnnnnnnnnnnnnnnccccnnncncacctactnnnnnnnnnnnncnnnnnnnnnnnnnnnctctcctgcnnnnnnncnnnnnnnnnnnnnnnnnnnnnttntcnnnnnnnnnnnnnnnnnnnnnnnnnnnnnnnnnnnnnnnnnnntannnannnnnnnnnnnnnnnnnttnnnnnnnnnnntannnngnnnnnnnnnnnnnncntnnnnnnnnnnnnnnnnnnnnnnnnctcnnnttnnnnnnnnnnnnnnnnnnntcag

SEQ ID NO: 2858 - DNA, 314 bp, Zea mays
aagcttaacctgcacccatctcccgactctacattttcctcgaatcaccaggcatcgataattcagcagtgctgtaactgtagttcaacaatctcactgcattgaaacatgcttctgctggtattttatatgtaagtgttagtgggttgtttcaaagggagctgatttgttaggccgtggttcctccgcaaacatcgcatccaaaagaatgatgctctcgagttacttttttgtagctgtattggatagagatgtttgtacaaaagctaactttattcttctgaccaagactggccacagacagggttgatata

SEQ ID NO: 2859 - DNA, 334 bp, Zea mays
gtgcgggccttgaggctcccttaggagaggcctcggctccggtgcactttgaggaacattcccatcagcattgtttccaaagccagggcgctgcaacatcagaaagaaggctcatagaggcaccaaacctgctcgtttatcatagaaaaaagaagcataataagccgctagttgaaattgctgaggaaacaacggaaaataataccattccagccctgcagatggatggcgtggaccctgtaacagccaaaaaagaggtatttcttaaacaaattgtgaaagaagtttctggtattctgccagcaccagcaaatccaactccaaagcccataat

SEQ ID NO: 2860 - DNA, 446 bp, Zea mays
tgcgctgcgcgacagcgctgaagcgcgcgaacagcccgtcgtcctggccgtcgtacatgaggtgggcgggcatggccaccttcttcctcatggtgtccgcgaaggcgcgcaccgtgtagtccgggtccacctcgaacagcttctcgacgatccgctcgtacgccgactcgtggcgcttctcgtcggcggcgattgtgccgcagatctgcgccagcttggtgtcgccgtaccgcctggcgtggcgcgccgtgttgccgtgggagatgaaggtggcgcgctcctggaacgacgtgtagacgaagcccatgtacgggttcgtctccgtcttgggatcctgcatttgtttgtacgtacgtcatgcgtgcgtacgttcatgcatcaaccacccatcatttaaaggtaaataattactcaccatccctgaggcgatgaggtactggacggtc

SEQ ID NO: 2861 - DNA, 548 bp, Zea mays
tggatccatagatggcaaaatccgtgtgtgggatattcccagatgcagtgtcattgattgggtggatattagagacataataacagcggtttgctatcgacctgatggaaaggtatcggcatgcattctgaagtggggtttttatggctaacttgttatttcagtgggtttgtgagattgattttctttgtcttttatatcttgcagggagcagtggttggaaccattaccggaaattgtcgattttatgatgcatcaggtacaaaaagaagtgaaatctctactagcttttcaataccatttgagtacctctctgcttttacttgaatgatactccataaatactgactataactacatcttgatggatcagataatctcctgaggtttgaaacacaagttgcagtcagtggcaagaaaaagtcttctcttaaaagaatcactgctttcgaggtaaatatcttgacgagaaggaaggcttttattgcacagttcacttcatcagtcatttttcgctcctatgttctgactatttattttatttttca

SEQ ID NO: 2862 - DNA, 382 bp, Zea mays
caaatagaggttcacaaaaccatattcaggttcgcaaagtatattagattgctcgtaggtgcaatgagaggaagtagagaaataaaatgtttgtcttataaaaatgtttgcattaacaaatttcaaagcacaaataatatatccaccggtagtaaattgctactgaattactaaaaccgtgaaacgaacaatcatgcaggcataaatcactggatggacaaagaataggttaatgatatatataaatgtgtgtgtgtgtgtgtcttatcccttccatcaccattgtctcctttaccctcaaataaagaaagaaagtgaagtaacctcatgtccaacattccagcatttagcaatgcaggcatataaactgaccttgtgtata

SEQ ID NO: 2863 - DNA, 651 bp, Zea mays
tttggagatcaagggttttgcttgatttgcaaacactctttaaaccatgtctttagttccatttattcttttgccctccttgttttgtatgtactgtagtattcattatgttattccctggcttatgatacagctttaaccctgaatagaattgagaaataactgctattccctttattaattgtttattatatcattgctaggtttctttggtcgatgtacttttttcttgtggaacatttgcatcattcttaacatttggacttgcagggggaccgaacacttctggaactccaacattggcacctagctttccatcaccaatacaacataacacttttgcttcgacaagtaatccattctcaacgaacccattttcaacaaacaatccgttcgctcctaagcccactacaactactagttcaccattcaacacctcatttaacaatgcatcagttgcaagttcgagtctattcacatcatcccctggtaccacaatgtttgggcaaccaggtgtttctacacttccagctccagcaagtaattcaccatcattatttggaaatatcaatcctgctcctgctacatcgtcaatatttgccacgtcagtgacgaataatccaagtccattcggcactggcacatcattgg

SEQ ID NO: 2864 - DNA, 378 bp, Zea mays
  misc_feature (268)..(272): n is a, c, g, or t
  misc_feature (276)..(292): n is a, c, g, or t
  misc_feature (301)..(321): n is a, c, g, or t
  misc_feature (326)..(374): n is a, c, g, or t
cttgaggccacatgatcctatgcaaacatttcgtgtgagttgctatttacatttcatatgcttataaattgcctgaaatgcatgaaactgctgaatggtgatacttctaaccactctctccaccatctctgccacaccttgctgttttatgctcaacttgaacgcgtcttgctatttattactgcacaaagtcaactaactgtacttatgtaaaccaaaaaaggtgcttagacctttctagtattttcgaggattttttttttgccannnnnaaannnnnnnnnnnnnnnnncaaaagggnnnnnnnnnnnnnnnnnnnnntccannnnnnnnnnnnnnnnnnnnnnnnnnnnnnnnnnnnnnnnnnnnnnnnnaaaa

SEQ ID NO: 2865 - DNA, 394 bp, Zea mays
tgttcctgctgtcgcctgcatcatctaggtcccctcccttcgttcagctgttcttgcgagttgttaatctaccgtatcgaggaggggaaggggggtccatttggccggaggttttgaggagatggacgacgaggactactcgtgggtgcggcgcaccaggttctcgcagtctgtcgtcaggtccagctccggcagggagcggtatggcgcgttcatcatcgacccgttcggtcgtggcgccaagctgaggcaggacgggttgggcacgggccccggggtctctagctcggcaaggcggctgccgatccccaaggcgagaccggcagttgcccggtcggaacggaagctgaagcacgcgtcttcagagggccaattgaacagggtgaggaacagt

SEQ ID NO: 2866 - DNA, 394 bp, Zea mays
  misc_feature (1)..(10): n is a, c, g, or t
  misc_feature (12)..(15): n is a, c, g, or t
  misc_feature (18)..(34): n is a, c, g, or t
  misc_feature (38)..(41): n is a, c, g, or t
  misc_feature (44)..(51): n is a, c, g, or t
  misc_feature (54)..(59): n is a, c, g, or t
  misc_feature (62)..(68): n is a, c, g, or t
  misc_feature (71)..(74): n is a, c, g, or t
  misc_feature (76)..(80): n is a, c, g, or t
  misc_feature (82)..(93): n is a, c, g, or t
  misc_feature (95)..(95): n is a, c, g, or t
  misc_feature (97)..(117): n is a, c, g, or t
  misc_feature (119)..(119): n is a, c, g, or t
  misc_feature (256)..(256): n is a, c, g, or t
  misc_feature (341)..(341): n is a, c, g, or t
  misc_feature (345)..(345): n is a, c, g, or t
nnnnnnnnnngnnnnctnnnnnnnnnnnnnnnnntccnnnngtnnnnnnnntcnnnnnngtnnnnnnnctnnnntnnnnngnnnnnnnnnnnngntnnnnnnnnnnnnnnnnnnnnngnagatggacgacgaggactactcgtgggtgcggcgcaccaggttctcgcagtctgtcgtcaggtccagctccggcagggagcggtatggcgcgttcatcatcgacccgttcggtcgtggcgccaagctgaggcaggangggttgggcacgggccccggggtctctagctcggcaaggcggctgccgatccccaaggcgagaccggcagttgcccggtcggaanggangctgaagcacgcgtcttcagagggccaattgaacagggtgaggaacagt

SEQ ID NO: 2867 - DNA, 379 bp, Zea mays
ataagatatcattgtttttgacaaaaaattctgggttaaggatcaagatgagtagaaaaatatatggtgaaaatgactctgagagaattgctagtgatgggacagctgcccgcacaagacctctgagcattaaggacattatgctgcggcgtgaaaagaaggctgcatcagaatctaagaaagccaaggaagggctagaaaatggtaaggacaaatctactcacttggaacgaggaagagaccacaaaagcagaaaggatcccagagatatgcctgtggagggttcaagaaaggaaaagaatagagatgcaacaagggagggcgccaagaaagaaaaaccaagacatataccaagggaatattccagaaaggaggacat

SEQ ID NO: 2868 - DNA, 323 bp, Zea mays
ctttcttctattttggtgttttatctatagtgtaaacatgaatctgacattgatattgaggatgatgataggctatagtgaatattgactagttgtagtgattatttagtaatatcctgcaacacatttttggttacgaaattgaacatgcatagggaagatgttttctaacttcagttatgtagaactggaaggcaagaactgatacacgagaaaaaaaatgcagcctaactccagttgtgcaagctggttcttattagtatttgcaagatgaaccttatccggaagaaatccaagatagttatctgttgaatttggagtgg

SEQ ID NO: 2869 - DNA, 334 bp, Zea mays
gatcggacggccccacggtgttgatgtccatggcgacgtcgtacctgtgcgaccaaacccaatgcaaggtggggatgctgcggttgatcgatagatgcatggatcactgaagaacagactatgtagctggctgctagctagcatcatcgatcacgcaccgctcgtcgaacgtggtgttggccgccgagttgatgatgacgtccacctggtcggcgatctcgtcggcgaggtcgggcgcgatgccgacgttggcttccctgacgtcgccgacgacggggaccagcttccttgcgatgaagccgtcgtagccttccccgtggatgtcctgcaggca

SEQ ID NO: 2870 - DNA, 810 bp, Zea mays
gcacctcttctagtgttaagagcatgtataactggaacaactggcttcagttattcagttatatactactgcctgcactaagaatcctatgagggtgcatgcatttttgctatcaaacaaataatatttagtccacaataataataggaatatccgtactgttttataggtcatcaacgagactgtccgattagccaatattgcgcctggcatcttcagaaaggcactgaaagacatacagttcagaggtgaagatgtccttacacctgcagttttctctgttgagcaaactgatcgcactctaaaacaaacatgataaaaatcatagctttgatgtcactataaagtgcttttgacgtgtgatcttgaacagggttcacaattccagctggatggggagtgatggtctgtcctccagcagtgcacttgaacccagtcatttacccagatcctcttatctttaaccctacaaggttcaaggtttgtggattcagtccatgtatgcagaagtacacatgcagtgatatctggtgaaattgtttttgcacatgtccacatacaggataaaccggagataaaccgtgggtcaagacacttcatggcattcggaggaggcctccgatcctgtgttggagcagacttcagcaagttgcaaatgtctattttcctccatttccttgtcactagatacaggtagaattttcacaagcttatttctccgggagtcagaactcagtttaaaaaaatccatattcattttccaatatcatcgccctttaatttctttcacatcatttcaggtggagaagt

SEQ ID NO: 2871 - DNA, 405 bp, Zea mays
gcgttggcttgtcggcggcgcagagctggtagtcgccgcgggtgaccaccagcaccgagtcgttcttctcgtacttgaaatctgcagcggcggatcggatggatggatcacgcgtgcatcaacgcgcatgccagataccaaattaatgtagcgaattctcgatcgatatgcatgcatggtatggttaaattagtgcatgcatgcactcacggaggaagtccccgacgtggaagcggttcctggcggcccagtggttgtagctctcctcgttgggcgccgttggcttcctccaccccctcggctcgccgccgaccacgaacacctgcgcatgccacgacgccgaagaggaacccacgaagaaagtggcggcgccgaggaaggagaaaaccacagcccggaacgagg

SEQ ID NO: 2872 - DNA, 355 bp, Zea mays
attctctttcaacagctattttatgtttgcaaatgcaacagtgtcttttgagaaaatcatatcgtcataccctggtcccttgtcacttgtttcaatactggtgagtgtagctgggtgctacatcagttccttagttatatctgttggctcagtgataattaatctgatcagcactttgttatttcctgatgttatggaaatggaactgagatttcagatgtctattcgctggttttgtagtgtcctgatccacacttcaaaaagaggcatcacaaaagaagagttctgcagcaaccattggtcgattcaatcataaataatctctgtttaggcggacaggtatagcaattccata

SEQ ID NO: 2873 - DNA, 360 bp, Zea mays
tcagcgtggccgtcaacctgggcgccacgttcctgctcacgcagacgttcctctccatgctgtgcacgctcaagtacgccaccttcatctactacgcggcctgggtagccgtcatgaccgccttcgtcgtggcgttcctgccggagaccaagggggtaccgctcgaggccatgggcgccatctgggagcgccactggtactggagacggttcgtgcagccttctgttgcggaggacccctgatgagtgatgagtgactgatgcggccttctgttgtggacgtgacacgcttccggacgttgtgtgtgtcaatggttgcagtttgtctgctgtggtcgtcgtctgaggaagagttgtctgt

SEQ ID NO: 2874 - DNA, 482 bp, Zea mays
ctgctggcactttcgcctttcttcgccatcatcgcctcctctcccattccttccttccttccttccttccttccacacgagagcctgcctttttcccgatccgcatcgtcatcaaatgggccatcttttcctcctcctggtagccctcctcctgctcacctccacgcgtgccgccgccgccgtccacgccagagcttcggtcattgaggtcagtcggcagtggcaacagccagataatggttacggtgtgtagtactctcaatcagctaggctcagcttcttgcttattggatgggccgcgacgaatcctttttttgtttctttctttcgtctgaagcttccttttgtggtctacggtctaccttgcaggaggcgagcttcgctggcatcagaggcgtgatcggatccaggccgccgacctgcgaggggaggtgcaggtcctgtggccattgcgaggcagtgcaggtgcccgtatctccgca

SEQ ID NO: 2875 - DNA, 381 bp, Zea mays
cggcagcttcgtcaccagcagctacggactgcgcgtcgccggagcctaataacaaggtcgccgccgccggtagctgcccggatctttccgtcctagatcatcaggacggtggccaccaccacgcaatgacgacgacgactgcaggtttgtggatggtggactcatcctcctcttgtacctcgtcgacctcgccaatgcatcagtttcagaggccgacgacgacgatggcagcggccgtggccagcgggagctatggaggtctcgtccccttccctgaccaggtccgtggtgttgtggccgacacgggagggttctttcatggccacgcggcgccagcgttcaagcaccaagttgccgcattgcacggtggtggttattact

SEQ ID NO: 2876 - DNA, 379 bp, Zea mays
cagctcgcagtgctcggttactcggagagcatcgcgaatctgtacacctcggagatccgggccaagtggctggcccatttcatggacggcggcttcaggatgccgagcgtcgctgcgatgcagaaggacgtcctcgagtgggagaagtgcatgaagaggtacgccggcggcaggtacttccgcaggtcctgtatagggctccttcacatctggtacaatgatcagctgtgccgggacatggggtgtgatccgaggaggaagaagggctttcttgaggaactgttcggagtctatggccctgctgattatgctgaccttcaccccgaccgcaagaaagacgactagaccttctgtggcggcactcgtaatctagaccttc

SEQ ID NO: 2877 - DNA, 331 bp, Zea mays
tctgtctttgtttcgtctttctcgccttgtatctgtactcttcacagcaatcctgtcagacgcttgaacctgattttgctgctgccccgtttggtggtggttgtccataaagttctaacgatggtgctgcaaagtctggaaagggccgacttgcgatcttcgtgctgatggctcggatggggccaatccattgggccgctggagccactgccctgctgcgttgttctacaagagttagttatcctcgcggttgacacagaaaggataaaattgcaagttgtgtctcagtttggcactcgaagggagttaggtgtgggtgtcgttgtttttt

SEQ ID NO: 2878 - DNA, 471 bp, Zea mays
gggcgacgcggaccgcgcaccgagcagcagcagcagcaagagctgggcgcagcaggcggaggaggcctacaacctccagctcgccctcgcgctccgcctctgctccgaggcctccgccgctgcggaccccaacttcctcgactcctccatcgctgccgccgaccacctccagcccattgcatcgcctcaatccctctcccaccgcttctgggtctgcacattctccctctcttacagttacctctacagttaccgtcggcctcggccatcgctgcctgaaatgtggcgaatatatcatatatgtcttgagttctccgagtgaccactgcgtcgttcgcaggtcaatggctgcttgtcctactccgacaaggtctcggatggtttctacttcatccaggggatggatcccttcatatggacgctctgcaacgatttgcacgacggaggccgcgtccccactattgagtccct

SEQ ID NO: 2879 - DNA, 471 bp, Zea mays
  misc_feature (167)..(167): n is a, c, g, or t
  misc_feature (184)..(184): n is a, c, g, or t
  misc_feature (243)..(254): n is a, c, g, or t
  misc_feature (262)..(267): n is a, c, g, or t
  misc_feature (296)..(302): n is a, c, g, or t
gggcgacgcggaccgcgcaccgagcagcagcagcagcaagagctgggcgcagcaggcggaggaggcctacaacctccagctcgccctcgcgctccgcctctgctccgaggcctccgccgctgcggaccccaacttcctcgactcctccatcgctgccgccgaccacntccagcccattgcatcncctcaatccctctcccaccgcttctgggtctgcacattctccctctcttacagttaccnnnnnnnnnnnngtcggccnnnnnnatcgctgcctgaaatgtggcgaatatatnnnnnnngtcttgagttctccgagtgaccactgcgtcgttcgcaggtcaatggctgcttgtcctactccgacaaggtctcggatggtttctacttcatccaggggatggatcccttcatatggacgctctgcaacgatttgcacgacggaggccgcgtccccactattgagtccct

SEQ ID NO: 2880 - DNA, 488 bp, Zea mays
  misc_feature (480)..(481): n is a, c, g, or t
agaggcgaggagagacgccgccggactgccgtgcccagcgcccgtgaccatcccatcccatcccatccggtcggtcgtacatgaaggaccgccgtggcagctcctccgtcggcggcggcgagcgcttcgccgtcttccccttctccatgggctgcatgtcgcagtccgccgtgtccgtcgccgaccccggcgacaagaaggcgcagggggacccgtcctccactgccgccgccacggtggctcggggtgagtgagtgctgctgatcgatcgaccacaattctgtacgtaccactacatacgtagccactttgtgctgtgctgacagagcagtcagcagcagcagcagcaggttcatcggaagaaggcgccggcgaggccatgacgaaggagaaggccgtggcgtcgtcggctacgacgacgccggggctcgtggcggccggggtgtcgaggctgatgaaggggatccggagcctgtcgcnnatgttcg

SEQ ID NO: 2881 - DNA, 382 bp, Zea mays
ggagctcgacgtgctggacctcagctccaacaccttctccggcaccatcccttcgtccatctgccaaggccccaactcaagcctctgcatgctgtacctccagaacaactacctctccggcgccatccctgagtcaatctccaactgcaccaggctcgaatctctcgatctcagcctcaacaacatcaacggcaccctcccggcatccctcgggaagctcggggagctccgggacctcattctttggcagaacttcttggagggcgagattccggcgtccctggaaaatttggacaagctcgagcatctcatcctcgactacaacgggctcatcggcatcatcccgtcggaactctccaagtgcaaggagctgaactggata

SEQ ID NO: 2882 - DNA, 346 bp, Zea mays
ataaaggacagtatccctccctggttggcaggatctggttacattggccttgcagcaatatcgattgcaaccgtcccaatgatctttccgcagatcaagtggtaccttgtcctctcggcatacgttgttgctcccctcctcgctttctgcaactcatatggcactggactaacggactggaatcttgcgtctacatatggaaagatcggcctcttcatttttgcatcatgggttggtcagaatggcggtgtgattgctggcttagcagcctgcggtgttatgatgtccatcgtgtccactgcagccgatctcatgcaggacttcaagaccggttacctcacactct

SEQ ID NO: 2883 - DNA, 378 bp, Zea mays
tacgggattatccccgctggacccaacatcgactacaatgccccacatgacagggagaggttcggcgcctgactgcgcctgggaccttgttgcttcctttctctctctctctctctctctcttttctgcaggagccgtgtgcagtgttgttgtgcttcatgagggtcttgtgcttggccgtgtcggaggctgcaagaatccctactgtactttttttcttcttctgagcagttgaagatggaagacaaggttttatttcgcacagataaataaaaggtacaaagggtcgtcgattttatatgaaggcctcgtttggcacagtagcaccgaacgtggtgttttctttctttccttccttatgacatcccttcaaaccaa

SEQ ID NO: 2884 - DNA, 358 bp, Zea mays
gtggaagcgcaattggcccttcctcacggggttcgccatcaccggcttcatcatcactaagatgacggccaacttcaccgaggaggacctcaagaactccaagttcgtccaggagcacaagaagcgctgaccaaccaggtgagccccccctatcaagtccgcttctagatctcggccgccctggttgacgcttgtgtgcgatgcccctgcgctaggggatgggcgcgatgttttggcgatatgttccggggatgggtgtcactggcgctagtgttgccacgcggttcattttttccctttagactacccttagctagcctgtatcgatcatagttcataataccttccgttgatgcca

SEQ ID NO: 2885 - DNA, 194 bp, Zea mays
acctatggtgcaaggagtttctgtgactggtggtggttctgtaaccccttcgtcggctattacaatgccaaatgctccaaactttcacccatcaaacccagcctcacctttgtcagtaatgaacaccataggatctcctactcagtctggtattgaccaacctgtaggtgcaaatgtgtcaccaatcaaggcag

SEQ ID NO: 2886 - DNA, 378 bp, Zea mays
ctcgacttggtagcgtacggcggttatttattcgccgggctatcgctcgccgtcgtcgcgaggctcgtgtgggcgtactcgtactatgtgatgatgccgtggatgagcctgtgcatgggggtgttcctggtgaggacgatgaagagggtgctcttcacggagatgagaagcagcgagaggcactcgtcgcggcagcactacttccttctcttcatggcaatcgcacagttccccctgttcttctggctcggcagcataggtgcatgatacagttttgtgtacttttcgcagcattaacgttgcaaaaatgatattgaagtgtttagatgtgttgtaaagaaaaaaacaattggacaatggtctcaacagcttagaggt

SEQ ID NO: 2887 - DNA, 672 bp, Zea mays
ccggtccgcgctcatcgccatgctccagtcgctcaaccacgccaagcacggcgtcgacgtggtgtccggcacccgcgtcaagacccacttcgccagacccaactggcgcaacgtctacaagcgcatcgcgctcaaccaccagaaccagcgcgtcggtgagttgttgttgttgttgttcttcttcttcttctttgttgtgcattcctcgaccggtcgccattctacttcggtccattcgtcgaacacgtggcatgcattactacttgcttctctcatgacccggcggtgaaagaagctttctaccaaacccgatatgcatgacaggccggtggtggacaggtgtgatgcgcgtgcggggagtagcagtagtagtgcaatgcggctggcctaactttcgttatagaagacagacagacacatgcattagaggatatagctaatcattgttgctgagacttgatattaattaattaattgcaggagtgttctactgcggcgccccggtgctgaccaaggagctgcgcgagctggcgcaggacttctcgcggaagaccaacaccaagttcgagttccacaaggagaacttctagctctctctctctatatatatatgtaaggatatggatgggtgtagagaggggatcggagtagcgcaaagtaggtatttgcttg

SEQ ID NO: 2888 - DNA, 494 bp, Zea mays
  misc_feature (393)..(394): n is a, c, g, or t
aatcaactctactaataacgggtaacggcgagcttttcaccagtacgaacagggaggcgaaggcgacgctctgggccgcttgctgtcgccggcgaactccgcgtgcatctgcggcacccaccgctcccagttggcccgctcgtctgcgacgtcagcgggcaccagctcccgccccgtccacggcatgtaagcttcttgcagcaccccgctgatctgtccatcttgttgtccctgctaaaaatgcaagttaaatgaccacacgccaagtgagaccatggttccacacatgaaattaatgaatttttgcctttttccattgttttattggtttagcacatgatgttcgcttgcatcagatcgtatcgtatcgtatctaggtggtctccacgaganncaaggaaacagggagtttctggttgaggttctaatgcttagtctgttgcaccatgacaatctaggaaacttaattggatactgcgctgatggagaccaac

SEQ ID NO: 2889 - DNA, 484 bp, Zea mays
ggtgctgtggctcaacggaggttctaattctaattcactcactaactgactgaatctgtactatcgtcttcttgtctattttttttgaagaatcgttgtatgttcatcagggcctggctgttcttccattgggttcgggcagtcgcaagaactcgggccgttcctggtgaagaaagatgtccctgagctcgagctcaacccgtatgcttggaaccaaggcaagtgaaaaaaaaactggaagaactgactcgatccagccttgacgacaatggaagcagcacatatgtaaactgaactgcatgtctggatctgtggtgtttctttcagctgccaatctgctgttcctggactccccagcgggcgtcgggttttcctacacaaacacatccttcgaaaaggatccaccgggagacaattccacaggtatggagtatgtatacatgtctgtcggatagatagatatagatacgagacgtctactact

SEQ ID NO: 2890 - DNA, 391 bp, Zea mays
gatacgatgagctctgctagctctttggaataaggtactctttaaaatctcagggaagcttatggaagccgcccagcgcatgtacgccatggacccttgcgctgcgggctgcggctggcaacgtttcttttcttttatcggtgaggtcctcgttgccgtctttgtggcttccgatgatggaattttagccagctccgttccgtccttcaggcttcaaccttgggggaagggacgcgtgaaggtttggttaacttaacacctgtgtctttgctctcctccctaggagtccgcttaacggaaagcactgtttgactagtccttgctagccctcctctctctctctctctctcttacttgtctactcgtttcctcttcctttccgtaaagattg

SEQ ID NO: 2891 - DNA, 919 bp, Zea mays
  misc_feature (572)..(589): n is a, c, g, or t
  misc_feature (596)..(600): n is a, c, g, or t
  misc_feature (607)..(611): n is a, c, g, or t
tccgcgttccctggcgggtgctactcgaagccttgtccccagttcttgttttcctggctgcgggccgcttgcggtggctgcccttcatcagctgtgccactacgacaggccttttgatccttaggcgtggtgacttcagaaccatcctcctggcaacaactgctggattctgaaccacgatacagaaggcaaaagggggatcaggcaagagatgtgcatagatgataaattttcagtatgggacgacaaaacaaacaactctactgctggtacctgactcgctgctgggtcagctcggactcgcggaggcacaactataacgtcgatagagctcgtacatccgacctaaatttggagagaagatggatggatggatgtcaaacaaataacctctgaaatataacaaggttgtcgacaagagagggtgctcgaagaaacccatctgcacgagctgttgatttcctgcgcctatcagaacactagtgctatattaagaagaaaaaatggtactcatatgcctcgcacaacatcacaatataaaactgcaatcaatagaatcagctgcatacttnnnnnnnnnnnnnnnnnngttcaannnnncccgatnnnnngccataatgaaacaaacatttgattactttttgaatgtaaaggagcaaaaaaaaacatcagcttaccttgtcaactgaaacattttggcatataccattctcctgttctatatgcctgacacatccgacctgagtaaagacaagttgcataatagatgagatgaaagaatgtgtcatgctatatttcattatctgacttttttttcctcggacacgcacgagaactgtgtattattatattaacaagacagcattggtacatcaagataaatatatttcacaactgtatgtatagcacaataacttac

SEQ ID NO: 2892 - DNA, 674 bp, Zea mays
ctgccatgggacaacatagttcatgcattgaaagctggcatcgggcaacaaaactctgcagcaagcagtatgtatgtttcacttgtcacctttgcgaaggcaataaaaacgtcatctattttgcagagaacaagaaaagctcaggctcagaggacattgttggaatacagagacaacattgtcacaagtacagaaaaaacatactaaattaagttttccaaacatggtgacaacagtttgtaaacagataataacagtttgggataagtgtgtaacaaaccactttttaatactttccactattcatatgctataaacataattatatatgaatatttcataatttctatagcttcagctacacaaaagataagagatgtcaacttccattaagacaaatatacttgtttttattgttcattattaatatcataggactggacgttgacggacacatgtatggagtggccaatggagtagatggacagctgcacccactgcctagacttgaagaatcactcattcgagttgatggtcatgctacattgaaacattcagaggtcgtcacgcagagactacctagctgcctggttcattagagacagacaagtgtaggaggaaaggaaatttcagggacctcctcactcagtaggcggtgtaccacaaagtagttg

SEQ ID NO: 2893 - DNA, 340 bp, Zea mays
agcagtttaagcctaaggttccttttcttgtgcaggagcgcataattgaagctttggctagcttgtatagtaacccggttctctgcaagacactagcagattctgatgcaaaacgcttgcttgttggtttaataaccatggcagctactgaggtgcaagatgacctcacaaaatcactgtttgctctctgcaaaaaggattgtgatctatggcaagctctgcaaggccgtgaaggtgtccagctattgatttctttacttggtctttcatcagaacagcagcaggaatgtgctgttgctctgcttgcgcttctttcaaaggagaatgatgagagcaaatg

SEQ ID NO: 2894 - DNA, 489 bp, Zea mays
caaacctgaagctgaacaaacacgttctcacgaagcccggacatgcggcatggtggcgatctcgaccagcgtcttgtgcagcgcctgcggcttggagaagaagggcgcgtggtctgcccccttcagccgcagcaccttctccggtgggttggcaccacacatgctctgctggaggggcagaggaatcgtgttgtcctccgtggtctccacgtagaaccgccgcaccgagccgtagttctcggccgtgagcacaagcttctccagcacaggggcgaaggggatgggcctcatggacaccgaggccagcgacacgtccttcacaagcacaacaaggtgtcacgacttcagaactcagcactaggattcagtgatgtgaatggaggtgattgtcagtggcagactggcagtaacattgtactccaaagtcctaccaaccttggaagggctctggttgaacaacaggtccctaagcgatgtcctgtcgatgtt

SEQ ID NO: 2895 - DNA, 358 bp, Zea mays
gttcaggttcgtgctccacaccctgcaactcctgtttgcttcatccagagagaccatttaacagcttctaggaaattttcgttcctttgcagggcagcaatgaggttagcatatgtcactcgatcagggctgatgcctttaaccctcatctcttgcatcagtttgacggcatcttcaggcattctcgctatcccatatgcttttatcaaggtattgtagctgtacagatctggctccacacctcggtcctttagctccgcaagaacattcgaaacatcttgtatccaacctcttctaccatagatattgatcattatattgtaagtgtagtgatcaaacttgcatttcgctctcttca

SEQ ID NO: 2896 - DNA, 405 bp, Zea mays
gctgctgctgctggtttcgtcttcgtcttcgtcagacaagcagtcggtgacgtcggtaacacagctggaggacgacggctgtggcgccgagaatggcaacggctgctgtcctctcacgtcttccggctgctgctgccgccgccgccgccgagcggaggcgccgtgtcgcaaagttttgctgccggcgtcccggttcggcctgttcttcaggaagacccggcacacgacccactctcccggttcagcaacgtagccctgcagtcattggcaacggcacgcatataggaatcactatacatgtgcaaaacgaataaaacattgccctccaaattcgtggggggagcaaatgtaagctacggcggcaaaacatcgcgatcgaggttgcaaagcggatcgagtactcca

SEQ ID NO: 2897 - DNA, 408 bp, Zea mays
agccatgcacccgtacgctcacccgtaccagcaccatgccgccgccgttgcccccaccaccaagcactacggccactgccatgatgccgaggaggaggacgaccatcagtccatgctgctcctctccctgtggcctcccggccaccaccaccacagcgtcgccgccgctgcttcctcggcgtgctcgtctcctcccaccatctgcgccaccaccagcagcaccagcaccagcaccacctccatggccgcctcctccgcttcttcttaccctttttgcctcacccaccaaagccattacaatggcggcggatctgcagggagcagcagccacagtagtagctgcttcctgttccaccacgagcaccagcagcaggaggagcccgccgatgtgagcatatcgctgtccat

SEQ ID NO: 2898 - DNA, 731 bp, Zea mays
cgcctacgacgacgccacctccaccttcacctgcaaccacaccgattacaccatcaccttctgccccaaatccactccaaccaggtccttgcccaaatcagatcattccttcatctagttccttcacttccagtttcaacttcagttgcaatttcgagctgtaaggtattgtttgatatagaattcgtgagaatgacgaggtcttgattcggaattcttaggcttggagaaaagcaaagaagctttgatttacactcttctctttcccatctttttccttgtgtccccactcggcaccttgccaccttgtgtgctgtgtgactagaaaaccacaactgccgagttgggactgcaaggaacacatcagactgatagagggttccacatccgatgcttagattaactttacaagttcatgctttacaagattaagcaaacctggtcttacgcgagcaatatttcttttgacatttttgcagcgacaaatccgaacattcgtctcggaggccaagccacgagcaactggaagattcggtgtggcttgcatccttgaaggcaagtgacgccagtgctctggcaacaacgtcatggtcggcgtccattgtgctccgatctgccttggcaattgcagtggcgaccttgcttgctgcacaacttgcaccagatcatcctatggtcagcttgctatgattcatcatggttgcggttcttgatcggtaggagtcatctaa

SEQ ID NO: 2899 - DNA, 729 bp, Zea mays
  misc_feature (691)..(694): n is a, c, g, or t
  misc_feature (710)..(723): n is a, c, g, or t
gctcacgccatcagttttggagtctcttggatgctgtaacaccgaactccattgtcggctccattgcctggggttgtgctcacgccattagttttggagttcggaggaggtaggacactcactattctcgttttccccaaaatagaacatctcttccaacattgttactgtccagttgagtacatactgtcaaaatccatcagaaatatctaactgactcttgttatcggtagctctcctactcgatttgttaaatatctaactgactgttgatatatggagggaggaaaagcagggtagccagaatctctgttggcgtcgcctgtttcattatgttcatgatgatcctttcagtaataggcctttttaggaagtaaaggaaacgtttgtgctctggtttctgcaagaggtttgcacataaacaattttttattgcagtctaggctccaacctttggttgataaacactctcaccataagtaacgaaggaataagaataaatggtgggagatacaagaatatgaaaatgaataaatgatgcgacaggttgttgtagagtagcatgatgtaagtgaatgcataactctactcttatatcatatcatttctctcaatccatgtcttttaactggtgaatcattttaggcttctgtttcttttatgcttttatacaggcttacacagacctgtnnnncaagagccgagcagcnnnnnnnnnnnnnnaccacg

SEQ ID NO: 2900 - DNA, 379 bp, Zea mays
cttcggggacctctacctattcaagtggaccaccctgttggtgccccccaccacgctcatcatcatcaacatggtgggcatcgtggccggcgtgtccgacgccgtcaacaacggctacggctcctggggcccgctcttcggcaagctcttcttctccttctgggtcatcgtccacctctacccgttcctcaaggggctcatggggaggcagaaccggacgcccaccatcgtcgtgctctggtccatcctcctcgcctccatcttctcgctcgtctgggtcaggatcgacccgtttatcccgaaggccaagggccccatcctcaagccatgcggagtcgagtgctgagctcacctagctaccttcttgttgcatgtacgg

SEQ ID NO: 2901 - DNA, 267 bp, Zea mays
ttgcatgcacatgcagcagcacacctgaacaacttgcctgttgtactgtaccacgagcagccacatgatgacgctcctcaagacgtaccaccaccacaacgacaagcagcgccagttctcgcttcccaagaggaacttcgtcacctacgccgtctacgcgctcatcgccgtcgcgctcctctacctgttcgtcgacccggcagctccgcctgctgcgggttcgggtgcgactgcggcatcatctacgaccaccaccaagccatcatc

SEQ ID NO: 2902 - DNA, 391 bp, Zea mays
ttgccctcctgcgcatatcacttcctcccagtcgccttcttccctcgctcttccctccaccattccgcagcctgccgctggagcccagcccgcccatagcctcgtgcccctctccgcctccggtcgctggagcccagccaggtcacggcctcgtgccccactccgcctccgatagggaccacaacggcaggaagacgaagaccccaacgcctccgcctgcatgtttgtaaaggggcaaaagccacaaaacccatctaatttcgattcgattcgcctgtggtgcttacaacggagggaatggcgaacggcgacggcgcggcggcgccggggacctgtcgaagcacatcggctgcggcgccacaaccgggcgattctggtcaaggccgatctc

SEQ ID NO: 2903 - DNA, 391 bp, Zea mays
  misc_feature (15)..(15): n is a, c, g, or t
  misc_feature (66)..(66): n is a, c, g, or t
  misc_feature (73)..(73): n is a, c, g, or t
  misc_feature (109)..(111): n is a, c, g, or t
  misc_feature (116)..(118): n is a, c, g, or t
  misc_feature (122)..(122): n is a, c, g, or t
  misc_feature (126)..(126): n is a, c, g, or t
  misc_feature (138)..(138): n is a, c, g, or t
  misc_feature (150)..(150): n is a, c, g, or t
  misc_feature (161)..(162): n is a, c, g, or t
  misc_feature (164)..(164): n is a, c, g, or t
  misc_feature (173)..(173): n is a, c, g, or t
  misc_feature (182)..(182): n is a, c, g, or t
  misc_feature (186)..(186): n is a, c, g, or t
  misc_feature (190)..(190): n is a, c, g, or t
  misc_feature (208)..(208): n is a, c, g, or t
  misc_feature (219)..(249): n is a, c, g, or t
  misc_feature (257)..(257): n is a, c, g, or t
  misc_feature (285)..(286): n is a, c, g, or t
  misc_feature (290)..(290): n is a, c, g, or t
  misc_feature (302)..(302): n is a, c, g, or t
  misc_feature (308)..(309): n is a, c, g, or t
  misc_feature (312)..(312): n is a, c, g, or t
  misc_feature (315)..(315): n is a, c, g, or t
  misc_feature (317)..(317): n is a, c, g, or t
  misc_feature (321)..(321): n is a, c, g, or t
  misc_feature (325)..(326): n is a, c, g, or t
  misc_feature (338)..(338): n is a, c, g, or t
  misc_feature (347)..(347): n is a, c, g, or t
  misc_feature (351)..(357): n is a, c, g, or t
  misc_feature (370)..(370): n is a, c, g, or t
ttgccctcctgcgcntatcacttcctcccagtcgccttcttccctcgctcttccctccaccattcngcagccngccgctggagcccagcccgcccatagcctcgtgccnnnctccnnntccngtcnctggagcccagncaggtcacggcntcgtgccccanncngcctccganagggaccanaacngcangaagacgaagaccccaangcctccgcctnnnnnnnnnnnnnnnnnnnnnnnnnnnnnnncccatctnatttcgattcgattcgcctgtggtgctnncaanggagggaatggngaacgnnganggngnggcngcgnnggggacctgtcnaagcacatnggcnnnnnnnccacaaccgggcnattctggtcaaggccgatctc

SEQ ID NO: 2904 - DNA, 369 bp, Zea mays
tcttttgaagttttagcccttgttctttaactcaggctgagtaatccatattgcagaattcttaattatgaatcactttaagacatcagtaataaccacttctaatctggcatgattgcgtttgaagtaggcatcacctcagcccccgaaggtagaaacaccagttccaaaggtggttttacctcctcagtcacagaaatcccccgccaaagttgatgcaacaccgcctaaagttgagaagccatcggttacaccacctcctaaagttgattatgccactgatctctttaacatgttgtcaatggatggaacaacagagaaagagtcagcgtcatcttcaaacgacgataatggctgggatggcttcca

SEQ ID NO: 2905 - DNA, 461 bp, Zea mays
  misc_feature (56)..(56): n is a, c, g, or t
  misc_feature (322)..(326): n is a, c, g, or t
  misc_feature (330)..(332): n is a, c, g, or t
  misc_feature (340)..(364): n is a, c, g, or t
  misc_feature (426)..(430): n is a, c, g, or t
  misc_feature (448)..(450): n is a, c, g, or t
tccattgtaaaagctccatctgatgatatgaagaagatacaggggctacttgaacngagaacagttacaaatgagatggtccgcttaattgagacagcaactgcccctgtcttggctgtcgacattgccggtaacataaatggatggaacaataaagctgcagaactaacaggtttacctgtaatggaagccatagggaggcccctgatagatcttgttgttactgattctatagaagtggttaagcagattttggactcagctttacaaggtttgtcactttgctttcagtcgatttttttgtggtccccagcttaatctnnnnntgtnnncttttttnnnnnnnnnnnnnnnnnnnnnnnnngtttcaggaattgaagagcaaaatatggaaatcaagcttaaaacattccatgaacatgaatnnnnnggtccagtaatcttgaannntaactcctgct

SEQ ID NO: 2906 - DNA, 465 bp, Zea mays
agcaatcctgcgacaaatgattggataccatcttctgagtcggtatggctaccaaccaaaaacatcagcgagcagggcagcatcaagctacatcttgtgatttcctgactgaccttttaattttgcagatcatccctgcttcgaacaagcccagcaggagcgactcctgaccagcctttccttgccttgaagtgccgtggattgcttacctgcaaagataataaaatgcactgcttctgtgtggtagtaccgtagtagtgcagcacgcggcagagatcctgacttgacactcgagagagagagaagggaagcatactgccggagtgccgggcgcacgggttggggacacgagatgtgactacttcaacgaagaatgtgtacgggtacgggtgcgtcagcacatgttacttgttgctgcacctgcacactactgttcgagtgttgataatgaactacagaccctga

SEQ ID NO: 2907 - DNA, 345 bp, Zea mays
agccggtgtttcagtttccagcaattcggattcagcaaagctcagcaagggagcacgccggcgagagaagaaggcgaaggaggaagctgcccgagagcagcggatccaagaggaacaaagcaatctcgtgagcgaccgcatgctagaaaacgagaagctcgaaaggaagctcgagcccttggggctgaccgtccaagagataaagccggacgggcactgcctgtaccgagcagttgaaaaccagctgtcgctccactccaatggcgctgcacggtacagttaccaggacctacggcagatgacggccaagtacatgagggagcacgccgccaatttccttccctt

SEQ ID NO: 2908 - DNA, 590 bp, Zea mays
attgctttttgtcttgagggcacccataaagtgtcttgatgagcttgtttcatttgatggcatcttcaatttaggagattgcaagctgagattcttgcacatcaaggtgtcagaaagaagattgaaggtctcaaattggaagcaaagcgtaaagatgatgaggttcatgtcgaacttatacacaactatttgagatttgagttctttcttctcttaaataataatctaaaccagcgattctatagattggacaatacaaagagcatattgctgagttggtcctgcattcagaagcacagtccttgttgtttcaggagaaggtatggtacgctacctatatagttcttttttgtgtgtctatttctgctgtctatgtgctaataaatcttgccgtgcagtacaatgaaatggaacacatggtttctagacagaggtttggtccgcatgaatcttattctgagactgtccccaagactgaaaagccttcagggcgagcaagaggatccagctcccctttccggtgcatatctagcattattcaacaaatgaactctgagagagatcaagaaatcttggtggcacgccaacga

SEQ ID NO: 2909 - DNA, 553 bp, Zea mays
tataaatgcttaaacttaacctggtaaattcatctacaggctctttcaaatggcaaacccactgttgttgagttttatgcaaactgatgtgaagtctgcagggaactagctccagatatctacaaagttgaacaacaatacaagtaatttgtttacacaccacttttcacatttctgaactttaagccttgattgagaataacaattgtgattcatttaataaaatcaatgcttgtcgatgctttgttgcgttgcctatcctattaaccacgttgattgaaccttgctatgggcatgacagttgggatccaagttgctgcacgacagacagaaccagcgaacaccacggacaacgacgacgacgaaccagagcaggtccgcttctcgctcttgggtggcaagaactgcagcaacgttggtgtcacgaccgccattaggcccatgaacaacgccaggctgaggtccagggatggaggcaacgccacgcccacgaccatcacccacagtgactctgcatcggggagcatgaggacgatttgtacgccatcacaat

SEQ ID NO: 2910 - DNA, 1031 bp, Zea mays
cctcttaacctccattcctttgcagtttcttgatttccaccaataatttgttccagtcgtgaaatctcgcccccctttcctggtttttgtgtcaggtggctccggctcggtgcaggtcgggcgcgccgagctttactcgaagatggcgcgtgacctcgacgagcgcggcgcggcgttcctgaagggcggcgagacgtcgcagtcgctcacgctctcggacctcttcgacaccgcagatgacggcggcgtcgtacccaggctcaaggtgcgggctttcttcaccagccccgtgtcctgctcgtcacgctggttgacatgtagctggttgtggcttatgatggtgtcgctgaactgaaatgtgcttggcaggccgccgacccgccagtgcgcgcgaatgtgctctatatggaccccaagttcgccgctgtgatctcgtgagtggtgacctttgccaaaatccgcaggcaacttgctgttaattgttcctgaagcgatgctctctccttacaagggagaagaactaagttagcccgtgattggtcagatggctgtataattgttcctttgggaggtcaggtcagggcagtgctcattcagtatgttttgggcttgcaggaaagctgtaaaggacgtgtttcttccttattttgaccaaggtacagcttctatgctatggcatccatacatgtacaactgtagaattttcacctgctgaattcatggcctgacatttaaatgatgctaaatagagttgtcacttaccagttcagttgcctgctgactgattggttagtgtcacagaaaccgacagcttttttgagcatttggtcttgaccactttgcttggttgatttgttttgcagctatctggttccaaaatacgagcatgtatcacttcagcatgtttcatgcctcccatcacttggagcccattgtagcaaccgaggatgaggtgagtgcaccctctgattgacgtgagcatcacagttgaagttttcactgacatatctatatgtgatatctttgagatg

SEQ ID NO: 2911 - DNA, 670 bp, Zea mays
  misc_feature (630)..(641): n is a, c, g, or t
  misc_feature (660)..(663): n is a, c, g, or t
cttgctggagttggattcatttctagtattggagctggagttgcttcagatgtcttatatggtgcccgtcggattcttaaaccttctgcaaatatggaagtggggcgcaaaagatctccgatctggaaatcagcagctgtttatagttgcttccttggaacatcagcaaacctgcgatatcaggtagtttgccaagagcatctttctgtttactcaaatgatattagttatgcgaagctattttgtgggtggttgcatgtatcggggcatatgtcggtaatggtcaaaatttgttgtaataatactacatgctgagaatggaaagtcgttaacatcaagattaggccttgcaactgcagataatgtgcaaccagtaactcactgatgcaataggttattctagtaaatgcagcttataatttgctctattttacacaggagtgttaaccttttccaatgaacatgtttcaggtcatagctggtctgattgagcatcggctaggagagaatctgatggcctactatgaccagccacttattgctaacctgttgtcctttgtttcaaggacagttaactcatactggggaacacaggtttaacacttttgcactttacattaacttgataannnnnnnnnnnntaaatctgcacttttgaannnngctgaac

SEQ ID NO: 2912 - DNA, 1242 bp, Zea mays
  misc_feature (1209)..(1212): n is a, c, g, or t
cataacaaggccttctcattgcgatgctatcagtcaggtaagatattctttctgtgtgaaaaacattattatgttgacactaaatgtgtatacttactgtttcaaataagctaattgtaaaagataaatgttttcaaagccctatgatagttacactgatattctcatgtgattattggacaattgcctgtcttccatttttcccacgatatccagcatttgattgaccttgcttatacgactgaaatatatttttagggaaactgtggagtttgctccccagtgattttatcaaaacaaaacaggacacttttacaaaggttagccaagaattacccagaggaaagggctacttacattacacggccatggcaataagactacgactagatcctttggcacactgaattcctatcacaaactgtcttatgttacaagacattctgcttcattggtcattctatgaaaacgagctaacattcaggagtacgtcaaaaatattcaaaaacgatgtggtttgaagctatgaagataacatttgaaatgtaatgatctcttgtttgtatatctatctcagcattgttgtttttttggagaacaaaaacgaaatatatattgaactcactacatttttcattgtttcacatgactgtttgccagaagatcattttgctcttgttttaatccgtgtatggtaacttgcactgacattctaagtttaactaatggatattattgcctatctttccattttccccaatactcatgagtccatggcagccatcatccagttagttatctcgctatcatttagttgcttcatgtagcagaatgcttcaatagcttttgcaatatctacaagcttttggttttcaggttcctgtgcttgcgattttcagctcttgtattaggctataaatgacatgttgttatcccattttcagcaaatcagaacattcatccagatgaggactaacctgaaggtggtcgataactccggggccaagcgggtgatgtgcatccagtccctgagggggaagaaaggagcaaggctcggggacatgatcatcggatccgtaaaggaggcccagcctcgtggcaaggtcaagaaaggagacgtagtctacggcgtggtcgtccgtgccgccatgaagaaaggacgcagcgatggcagcgaggtccagttcgacgacaacgcggtggtcctcnnnncaagaagggcgagctgatcggcacccgcgt

SEQ ID NO: 2913 - DNA, 387 bp, Zea mays
  misc_feature (380)..(380): n is a, c, g, or t
agaccatgggcaagcggtaggtctggtcttggtagccgagtgggtggcgcgggagctaaaatcaaactctacgctgtttacggttggactgaagggtgctcccttcaatttgcccaaacactcctcgtgcatgaaatcatctacctcagcaccaataataatcttgattagatgccccgtcgcaattaattgccgtatgctcatcagttctttctaagcagaaacaaattaattaagcttgattcgtacaatgcccttctcgtcctccttttttttttgctaaattaagtttgttattgtttgaaaaaagttctacaagaatttctggttcatttttggggaataacatgcgcagcgtagtacttgcaggcacagggaangtatttt

SEQ ID NO: 2914 - DNA, 365 bp, Zea mays
gtgcaggcgctgcctccgttcgcgcagcggcgaggccagtcccagctcctgaacatgcacctgctctccagccgggtcctgctgccgccccaggtggcggtaaagatggtggaccaggtgaggagcaacagggtggtgtacacaatcagaggcgccttcaaagtggaggccaggttcaggttcggccactactcgtactggatgtacacggtctgtcagctggaactcactgcccctccttctggagttcttgttgcccggagatgcacaacaaaatgactggctctagaaaaattcccctcgttttcttttgttattatatataaaatcttagctattttttatactgatgatggaaatggccc

SEQ ID NO: 2915 - DNA, 819 bp, Zea mays
ctgtactttgcttgatgggaatctcaacagcagtcgccattgctgatgtaacaatagatgcttcaatcgcaaagaatagtattgataagccggcgctggctccagacatgcagagcctctgtgcattctcctcatctctaggtgcacttgttgggtatgctacaagtggattatttgtccatcatcttggagcacaggtcaatttctgtctaaatgctctattttactaggtttcatccatgtctgttggcttagtgagaaattatatgttgaatgacttttgactcaatgtagggtgcgttaggtgttatggctatacctcctgccacagtggttttccttggttttatcatatatgagctgaaaacacatcaacataatgttaaagagaaggtatgttgatcaggcgatctttcaccatttagttatgatcatattacctcctcatcttatcaaacatgatgttctatccgggaccatctcatgcggcttggtttgtgcaagctgaattctgatttctacattattcttccagaatactatcctagcaaaaatttagaataaaataactttggtgcttcagaaattgaaattcttccggtaaatctttaaataaattaatggtttatctgttgaaccagaagtgaacctagcgagttaactgaagagagtggtgatgcttatgtgtgtggatgggtgagtggggacaagaatccatgtacacagcgtcatactgatgaaagaaacatgaagaatatagaataacttgattcctcaatcctcactgatattctgatgacatgcaggtttaaacaaggt

SEQ ID NO: 2916 - DNA, 542 bp, Zea mays
ctctgcaattgtaaactgtgcagccttggtcataccaagggtgctactcataaggtgatctttcttccactcagggtaaagcaattgaagtggtattttattgttgtatttattttttttggttttatgacttggatctccaggaaccgccaagtggtgaaaggaagatactcagcataaaaatttccaaccatcaattttacaagcttttacctgtaaaacttgaccgggagcaacttgacgagttggaattagaagctaaaatacaaggtttgtttgtacttctttaaaatctgaagcgctgtggttcttttgtaatctaattgtctactcttaattaggaacaaaaacatctaatgtccgtgtccaggttgctgaaaatggtcagagtgagtcactctactggtaagctcaaatctcttatgttactaccagctactatgtcgccatcagctacatataggctagtaacagtttaataggttttctcccttggctttgtgttattttgtacagagtaaagtgtaacctgggtccttgaa

SEQ ID NO: 2917 - DNA, 608 bp, Zea mays
  misc_feature (525)..(525): n is a, c, g, or t
cttttagcaaccctggtgcatctagaaagtattaggtgaggcagcaagtggatctgaatatctggacatattgacagtcacaaatgaacttctcgtatatggcactctctctctctctcttctagaatatagttcaaggcattcttttacagaattgcaaacttttttttgtaatttcaggcctctaactcttgttgatcacaagtcatacctttgatcatttgaaaaccacagcggctctttctgattatgtcaactagccgagtggatggaagacccaaaaaatgctttggaagtaatatctttttacttaacactatacatttgttttttgtttctttatttctatagatgcaataaccctggactgtattgtaaattgatgatcacttgcttcctttggttgacaaggaaggtctcacaattatggataataaggcgtccattatcataaaggcaacaaaggaaattgaaatcagaaggaaacctgccagtccaggttcttatatgccaaattcagcagtngatacgcactcctggtctctcaccattaacttgaatctgcagccaacgagattgaattgaacacttctcgtgacattacgtgc

SEQ ID NO: 2918 - DNA, 1107 bp, Zea mays
cttctctagaatagatctccaagattcccaaccacttccaccaccaccaaatatatcagatttgggtggaatgccaacaccataccacaaacggcttcggtacttccaactttctccaagatcagttatgcagctcccataagacacaaatgcatgcttgacagaatcataaggttcagctgctgttgctgctgtaagacgttccatcacggcagcagagatttgtccatttgaatcagccatagaagtaagcaactgcttcaatcacagcagacaaaaataaagacagtattcataagaataaagttcaaccatatgttggcaaatagaatatcagcataagccatgaatgcatgaaggaacagtcaaaagctaattattttaactttcactaggtagtaggtaccaagatatgtacaattaaaagcttttttcaaatccaggaattagatgattagattgtccaccaacaccttttgatttcgaagtatttcacactgtaacatttatgcatttaggactttattgctgagttcctttccaaagaagaggcatgtatggtataatctgttgaccgaagtaccaaacaccaacttaccctagagtccatttattttgccaataatttgttcacacctcattcgatgaactagcaagaccaggtagtccaagcgattaaggtaaataagagttctactgaaatattatggcatgattacccagataacaattatgaaaaactggtaaaaataagccataaacaaggaacatggtacaagaacgaaaatcatgacagacagtgaaacaacttttgtagtgacataacacataagcaatggctagaaaaaatagcaaaatgttatttctctcaaacacaaacaagaaaatacaagacgaatataatgcatatataactgctcaaatttgaagaatggtttgacagttacaattactttatgaagttaatattcataactgataaaatgcaatgacatatagccgccatgtgttacatacatccagaggaaggccaccagcatcactggacaaagatgcccgtcttgagaccccagcagccatgggttctttaccagctgtgctcaaaga

SEQ ID NO: 2919 - DNA, 795 bp, Zea mays
gcatgtcttatgataaaggtattattgttacaaatttgcatcattagtataaattgttgatatgtctaactaagaactcagttggcatgtactaagtactatcgtcctaatcatccaaatcaatagggaaaaataatgcctagcagtagaaccatgcacatttgcttcttaaatgtgctgactcggttttattttatcccattactgccgcatttgatgttcccatggctttgtggactttttttctgtcaatatagttgaagatctttgttgctattgcaatccatagcattgggctatctataagtatttttggtagctcacttttctcaattctaattgttttgtgcatctcaacagccaattccacgcagttaccatctgctggtagctcactaggtgctgaaaaaaagaagaaaacccctgtactttctgaagaagtacctgtggagaggatagctctgttggcttccgatggttttcagtcaaagggtaaccagaatagcggggctagcagttcttcgcagaatgacaatgtgatccagaaactctcttctgacgtaggccagctaaatgtaaacaagaacaatgtgaatgttacgaaatcttgtttgcctgatgagtataagcctgagaagtggatgttagctgatctggagtcaagggcgttgagccaactgaaccttgcaatagtaggtcaccacccaacttattttgtaaatacagtatctattatttggcattgttcttctacatgtccgatactctgatgtctaaagggaagtaacttgaaca

SEQ ID NO: 2920 - DNA, 370 bp, Zea mays
cgttgctcgcaacggtgtatcgagtttcctcgtcgagtctcgctgtgtgtcctgtttcctgttcgccagcgcgccttctcggctcgctcggctttaatttccatcgcgtcatcgacctcgccaattgtgtttgtcgcttggccctgtgtcgttaggctcatcaaccgggttcgctatcgcgtgcgcttgttcctaatgcgcagtgcgtagtagttgggtctcgcgcgtgtggttttgaagctatgcgcgttcgtcgtgccgcatcgtgtgccgatattctcttccggcagacctcgccgtcgaccatgttcaagtaattgttcggctcctcgcatcctgcctattcgataaaacacccaaatccatagac

SEQ ID NO: 2921 - DNA, 989 bp, Zea mays
ggctgtgagggtgtcttccatgtagccagtcctgtcctttcccatcgaccctccaaccctgaggtgaatttgtcaagaacatctatttaatatttaatttcccgaaattttgaggtcccaatcaggaagtattgatggttgaatgtagttacagtatttcagagatttgctggcaaggcttttgattctagacatgtgggattttcttaagatatggaaatttgccagaattctctcaaactatcattagctcttacaagagatgctatctagaaacaggcgtgagatgtgtatcattttgaccattccttcagggtactatgtttaactactccttccgttcttttttatttgtcgcggtttagttcaaaaatgaactagcgggcgacacggaggtagtattattcaattagtggcaacagacaatgatctcttctgctctgcaccatctctgtggtttacatatctggtcctatgcccatggcacctgtcatgtattatttgtttttctttgtccagtgttactattatgtaattacataaaaagtttggtaaatttattaatgtacacatcatacgatagttatcccttttgtgcctttcaccaaatattttttatttacaggtggaggtcatagctcccgctgtaataggtacaaccaatgtgttaaaggcttgctatgaggcaaaagttaggcgagttgtggtggtgtcttcatgtggagctgtgtatgctaatcctatttatccgaagggtaaggtgtttgatgaagactgctggtcagatgaggattactgcaggaagaaggaggtgatacagttttccttcagtaaagcaatgatgttgcttgactcggtggtttatgtttgttcatcataaacttcctggtatagcttgcctaaataagtactatatcctatcctgcaggattggtatttagtttccaaaacactgtcggaacgagaagctcttgctttgcagcaaaaac

SEQ ID NO: 2922 - DNA, 378 bp, Zea mays
tcgtggtcgccgccgccgtctaggctctccgaggtagtgatgtgcatcgtggggaagctggtcggcgtcgggagggacaaggggggttcgttctgtctcaacaggctgctgaagaccaagcaggtggtggtggacgacaatgtcaccctgtgcctggtgaaggagatagacgacatagccaccgccgctcgccagccgcgcgatgagcagaagcagcagcagtggtggtgcctcgggcagctgctactggaggcaacgcagcggcggcaggagctggccaacgattttgtccgccttgtatcctggctgcacgcatgcacggagaccctcctgtgtcaggctgcggatgcggcggcggccaacaaggaaatcagcatc

SEQ ID NO: 2923 - DNA, 466 bp, Zea mays
cagtgcaaacagaagagttacataatatttttgaattatttgtttggcttgctttatgtatcaataagtttgactacaatttcatatatgttgcagcttcgcagagaaaaaatttcagataggatgaaaaatctacaagatcttgtcccgaattctaataaggtacatttctttgggggtttaacttgtttggtgcattttcatattgcaactggagctgcaactgcagttattaaaactgatcatcgagctcattatcaaaactttgctgcttatatatgcaacgggaacatgtatttcttagttgtggcttgaaatctgcaagtgacacaatagaattgagtatttattaaatttaaggttcttttttgggggttcacaatttcaagtcttcaactctacaaatacgctggagtgaatgttggatttctttgtgccaacaatagtcattacctgtttagccttt

SEQ ID NO: 2924 - DNA, 452 bp, Zea mays
gctaactaactaactaaagttgttgttgctttgcttggcgtggcgtttccacaaaacagattatttcattattttgctgtccttgtatgcagttcgcgtgaatggatttgcctgcaaagatgcgaaggacgtggtggccgaggacttcttcctctcgggccttcacaaggccggcaacaccagcaaccggcagggctccgccgtgaccgcagccaacgtggcgcagatcccggggctgaacacgatggggatctccatggtccgcatcgactacgctcccaagggactcaacccgcctcacacgcacccccgcgccaccgagatgctggccgtgctcgagggatcgctctacgttggcttcgtcacctccaatccgaacaacacgctcgtctccaaggttctcagcaagggcgatgtgttcgttttccccaagggccttgtccacttccagt

SEQ ID NO: 2925 - DNA, 369 bp, Zea mays
aggacccgatgaaggacatgaggtagccgaagaatggaactgttgaggccaccaccgccgtgctgacaaccaccacggtgctgacggacaccctcgccggcgcgcttccagcaggaagatagaacctctcctcgaccgccgccgttatcggcgcgaccagcagcgcgtacttggccagcgggttgatcagggtcgtcactatggcgaccttggtgtagagctttcccgagggcaggttcagcgtgacctgcgactgcacgtcctcgccatagatcatgtagcccaggactgcggtcagcccgtagttgacgctgcacagcaccgacgagatgagcagcaccttggagaagtgcctgttgttcctcatgg

SEQ ID NO: 2926 - DNA, 684 bp, Zea mays
ctgttttgatcctattttagcttgataatctttctcaacatcatgcaaagatatgacagtcggtttccgttcaagattagtagctgctctgcatcgacggtgctcctccgaatgcattttttatttacacaatttctagcttggtaatcttctcaacaccatgcaaagatatgacagctggtttccgttcaagattagtagctgctctgcttcgacagtgctccttcgaatgcattttttatttacacaaatgttcttatttgaaacttcccaaatgtatgttactatgtctcagaagtgcatgtctggccttttcaggtacatgtcatatataaatggacatgggcaggcactcccgctgagggtgcttcttggcttcgtctgtagaggcttgctgatatttggcataggatattgttaatttgtgggtatgatgcatggattatttgagatctttgagcagataaagcaatcattatcatctcaaagggagggtattgatttcatggccgtgattccccctctcccagtcaaagccatccaagccgcaattacttcagggacagggtgttcactggggctagaaggattctgtttttattgcacgacacatgacaacatatccaagtagtccttgattgatttagcagcagggagtaagcgtcttgctaaaagtggctccac

SEQ ID NO: 2927 - DNA, 353 bp, Zea mays
agtgcagtgaaggagaaagttcttagcgagaatgccaccgccacaaatgctgccccagtgcttgctgctaggcgcaaggagattgctcacgaagatatgaagtccttggttgccacaaacctcaatgcctttgaaatcatcgcgttatcagcagggttggacctttctggtctgtttatcaaggagtgcaggaaggagacaaggttcacttcagataagcctgcattggccatcatctcaaagcttgaagatgtcgcgaaagcactgaatctcaggataaggaagaaggacaacaacactgtcatcattcaagggaggaaggaggggggcaatggtgtccttcagtttgacac

SEQ ID NO: 2928 - DNA, 791 bp, Zea mays
acatgtcagtctatgcttggacgtgtattgttagtatggagcctcagatacccagagtttggttacagacaaggtaaattattgtcgtctttttcagtcgctgcaagctatttatctcctgaaaaaatggttgataccaactacgtatagccacaacatgatatgcctaagtgcacatcaaccaagtggttcctaatcttatgcctattcaatgtttgtcactatgtggaaccaaaactttacttctaaaatggctacctagttctttgtgtaattattaacctaactttagttgagtacttctacattgcatattgaagcaaaatttgtctggcctattttaggtgactaaacattattttctgccaaaatttgtaacaacatgccaaaacctttttgaacaacttaacaagggtccaaatcagtaggtgtataacttctgttttctgatgagaataaccattcatctgtcctcatcgtatgcatttgtcaacataaatcactttcctcctacaggaatgcatgaactcttagctcctcttctctatgtacttcacgctgatgtgcagcacttcagacaagtcagggaccttcatgaagagcttttgggtgatgattttgatggtcaaacttttccagatcgttcaaagctgaacagaagtgacaggaaaaacagtgttgagggtagaacaggtaaaattagaagtttggctgaccttgatcctgatactagagatcttttcttgatcaatgatgcatacggagcagagggtgaactgggtattatttta

SEQ ID NO: 2929 - DNA, 870 bp, Zea mays
  misc_feature (737)..(739): n is a, c, g, or t
  misc_feature (760)..(768): n is a, c, g, or t
  misc_feature (770)..(775): n is a, c, g, or t
  misc_feature (797)..(799): n is a, c, g, or t
  misc_feature (816)..(820): n is a, c, g, or t
  misc_feature (828)..(866): n is a, c, g, or t
cagcagcaggcgccgttctttcctggagggttcccttcgaaccccaatcagtttgcgcctttcgcgggtggccccccgcctgtcggtttcaatggcggcggggcgtttcgaccgggcggtgcttggatttgtgggccgcggccacccagtcccatgatgagccctgcggggaacggttccaacaacaacaacatcgctggaagcggtggagcgtcgaggccgattttcaacgttgggaggaaggaccacaacaatatagctggcagcggtggcatgccgaggccgattctcgacgctgggaggaaggaccgggatagcagtgctggcggcaacggcgaggtgattgaatcatgtgccattatttgttgaaattgatatatgggtatgaaactatgaactaactctaagcatttgcattgtcatagctttgtcttctgcagagcttttcacgggtattagtaggagttgatattaagatggccactccatatgcttaagattccaaccattgtgccggatttcaagcatgattttcagtagagataaaccatgctgtattgcaatcaaacaataaatgtctagcctaacattgctaagtcaccggattgcccatcaaagttttgaccctatgagtaggactaactctattcttgatgccctttgttcatttgcacattagttgtttgaaccttttggtggtctagttctattcctattacgctctataacttttcttnnnttggttccttattcttttttnnnnnnnnntnnnnnntcatatgttattatcatttgtnnntaattgtgttcgataannnnnacatcacnnnnnnnnnnnnnnnnnnnnnnnnnnnnnnnnnnnnnnnccat

SEQ ID NO: 2930 - DNA, 375 bp, Zea mays
  misc_feature (148)..(148): n is a, c, g, or t
gtgagggctctctgactctgagtagaggcaccaaaagaactagagcgtccaactcacaagaactgaaaagtacactagacttcattattcagaacacgtacacctgaaaacccccttccagaagatgaaggccgcctcgaacaagcangcaaaatctatgttcataggaattttgtggggaaaactctcgcattctagacgacgaacaagcatcaagcacgcaggctactagctgcagtcttgtaaaggtcgtcgccacgtcccagcagcgtcgctgctgctgacgacacggacggttcgggcttcttctttgttagttaacgggcgcgcggttatttactgctagcaggagcagcagcagtgattttgtgtctg

SEQ ID NO: 2931 - DNA, 1040 bp, Zea mays
  misc_feature (1029)..(1033): n is a, c, g, or t
cgaatggagaccagatagtttctatgagaagattcagaacaatcgccagcttgggctgcacacactttgcctgcttggtttgtgactcttgatcgacctttctggattcttcgttatcaagaattaggcaattgatctaatatttgtagccataggtaatgtgtcttatagtttaaccattgtacagggtatactgaacttaagtagacactgattattgcaagcaaatacaatgaatgttcaaactattagactgccccagtgttaagatatagtgttgttcagtccctaatatatgttgtttgaagccaagatctttgtcataatattcatttccacttttaaatgatatatgcattgtaccaaagcatggataacagaagttgttttacttcatgatggctgatttaatgtattgttcgatgtatgtagatatccgtgtcaaggagccaacatgggaatctttagccaggtaaaattagcatcatttaaattcttattctcaataccttgcagtgcagaattgccatctcacttgctaagtgttcagtttgatgcaaacagctcttagtagttattttttatatttacattggatagatgatgataaatccatctttttcctatgtatttatgcagaggaaagaaagtctatgaaccaccaagattcatgactgtaaacactgcaataagtcagctttttgaggtggaggaagcacgtgggggatatggtatttaaacttcttttgaggacctgcctttcttttaaaaaaatcattttgtatcaaacaatagcttcttatgcttatcgaagttagaattgttttaaaaaacaattcatgattcttgctcataccatagatattgttaggttttcctttattgttccaggtgcttcatatatccaaccatctagtattaccgtggtatcaaatttaaagatcattttcttccagcatatcgcagggaaacattgtgcataggagtggcacgacttggaagtgatgatcagaagattgttgctgggcnnnnnagaagct

SEQ ID NO: 2932 - DNA, 367 bp, Zea mays
tgttctttcactgccattgggaattatcctcgttcttggtttgaatgaaatggagtaccttttgcagacgtaggctattgattcaatcttcactatttctatataccataaacctaatagactacacgcaaactgctgagatatccatttatgcatcaatagtcatttttcaatgacttgtcaagtagttaggcttcttctgaatatttacacgttgaatcctccattttgtggttatgtatttgtgactgaatctgcagatcactcttaaggatgcccgagttttggctggtcatcactgccagtggagttttggggcttggaatcagctttacatcgatgtggtttctccatcagacgagtgcaa

SEQ ID NO: 2933 - DNA, 790 bp, Zea mays
  misc_feature (747)..(755): n is a, c, g, or t
attggctgccaaactcaaggttctggagtttgactcgttgacattatcctttcgaaaggatttggacatatgattcgtcaactgcatcatccagaaatgctactatatactgtgggtctgaagtcagtgcactttcatgggaatgcagatctgacagattggtatgcctatattggatttgatggcactactatctttccattactctaaatttggttaaactaaacttgttgaagatttctgttttgtcacccatttctcttgaccatagctgctcataggcacagctaatggaggaattaaagcttggaatgctgatgcaaagagagttgtttgcgacctgagtacatctagaaactttccaaggttataatctatagtctgcttgttccttgctgagaatgttttgttaacaaagtttttctatttcttgcagcatcttagatttgaaatgcagccctgttgaacctgtgtttgtctctgcagctgcatcaagacggtattgtctagatttcatacttcatgtgcatgataagaagtccatagctttgttaactccacatacttttctctctagtagcatcgttttattatacttagtttgaacttatacatcttttcaggcatggatcaactacatttgagagaacaggatttgccaacttgacagtgtggcatatgaaaacatggaagccattggtagttcatttgctttcatcctctcttgaacttgtatgtggatttgtnnnnnnnnncttttctaaaggcttccccccctttttttcttcta

SEQ ID NO: 2934 - DNA, 371 bp, Zea mays
ttcacagcgagaaccccggcatcgtgcgcatcccggcgaccgtgttcgggtccgggatcaaggacgccgtcctcgagagggcgttcggcctcgagccggaggagctccgccggctccagaagaggttcgggcctcctcccaagaccaagacggcggagatggacgattgatcggaagatcaggcaggcgatcgggcttcggggcatgattaattgattagttatattaagagcagcagactttgtgatctctggaatatatctccttccatttgttaatgtctgtatgaattatttggcggtggacggtggttatcatggaccgataatgccggtacgtacagatgggatgggcatgtggggttaggtgtc

SEQ ID NO: 2935 - DNA, 418 bp, Zea mays
acgatgttgctgccccagaatctgagaataaaggagacggcaagccagctgaatccgaatcagctccccttgcatttgttgatgaagcagcgccccatgtaatcgttggtgaagagaaaactgaggacagtcaggcagctgaatctgcggtgccttccctggcgtcttcagagggagagaagaaagagaacggtggtgccactgaaccagcagctccgcttgtggttgagacaaaggcagatgcacctcctccagctgatgcagacaagggcgcggagaattcaggccaggtgaacaccgccccccaagaaccgacggcagcgaactgcgacaaggggcagatccaacctggtgcctctgctgtcaggtgcacataagggagcttggtctccgatgagagaccgttgctttgtgtgtt

SEQ ID NO: 2936 - DNA, 572 bp, Zea mays
cttggtctcaggagcgataacgccatgctctgggtacctccatatgtttcgtcgccgagaagagggatccctatgtactttgcatgcgcccggatctgatcatcaccgactccaaagtcagtacataagtcatcgtatttaggagagtttcccaagcttaatgacagacatgtgtggagaccaaaatgtaactatcaccaatgctcattagtattagggtatgtacaactctgagacagtggttcggttttccaagtacaagagacagttaagagactctgagactgcaacagtggtttggttttccaagtacaagagacagttaagagactgtataatacaaccctgagacactagaccataaatacaattaagagttatggagaatcctcgagagaccccatattaaatggggttgtgcatacccttagcgctactcttcaataaacaagagagtaatccagatgacatgcacattatgacattaataaatagtttagaaagacgaaatcttttacattcttgtataagaacattactaggtgttgatggttctcttccaaaaaaaaaaa

SEQ ID NO: 2937 - DNA, 386 bp, Zea mays
tcatgatgagttttgtgttcaggtgcttcatgagttcgctcagacctttgatttccaggagatgaacctggatacagctctgcgtctatttttggagactttccggcttcctggtgaatctcagaagatacagagggttcttgaggccttctcagacagatactatgagcagtcccctcagtctttcgcaaacaaggacactgctctactgctgtcatattccattataatgctgaacactgatcagcataacatgcaagtgaagaagaagatgactgaggacgacttcatcaagaacaatagaaacataaatgggggcagtgatctcccacgtgagatgttgtctgagctatatcactcaatctgccgaaatgagattaagacaa

SEQ ID NO: 2938 - DNA, 563 bp, Zea mays
  misc_feature (497)..(502): n is a, c, g, or t
  misc_feature (526)..(527): n is a, c, g, or t
  misc_feature (536)..(539): n is a, c, g, or t
tgggagcatgtttctgatagacagctaattatttggcttcagttgagtattacgattatttactgtaccgaatggaaatactggatgggaatggatgtttctaacagtccgttaaccctcctcttcagttcaagattgtgatgatttgtagtaatgaattggaggcttcgatccactgcaatttatgtggtacaagggttttgtttgagaaggcgaatgagattctaatggaggaaagaaatattcaggtttgctattttgatcactttgacttaatattaccagcaattccattctatgaccatttgagatatcatcttgtttggataaaatacataacaaactgaattgtactttgtgaattagtattgaatgacaatgtcaggtccagcatatatatgaactatacattaaaaaggatgttattaaactcatattatgtatttatgtctgcatgatactaggaatgtagtacttatagtatgggtacaagagtnnnnnnatcggtgatgaagtgatatcgtcnnttgattatnnnngagaaacttagtgtcatctgattt

SEQ ID NO: 2939 - DNA, 357 bp, Zea mays
tcctcactgcagaactccaagtcatgaccatcttgagattcacagcatggtcctggcccggagctgttggtgtctgtattaacctctatgtggtcaatgcctatactgtctagctactgtttgttgcactccgctacgttactgcctccgtgctctacctcaaggcccatcactacagcatcatcatcaccctgcatatgcctttgctttgtgcttggtatgtcacccactccactccagtgacctattcaatggaacaccacgccaggctgtgccatggtcgtagagacaagtgaaatgaccattatcttgcttcatctttgacgtcagtggtctatgggggtcacttgatggttc

SEQ ID NO: 2940 - DNA, 612 bp, Zea mays
catactttgaccgcccattcatccccaaaaggtgatgaccgagttagattttgactcatttacaggcctgataagttaccttttattctttttttactgttggtttgctacctcgatacttgagagatgtattgtcatttacagaactaaccttttttcatccgttttatcggcataggtccacaaaacctcctacagttcccatggaaccgaaattctacctcaggccagaaaagttatcctggtgagcttttacttccaaaaaatataactaagttgacatatttatgcgcaaaactactttcccgaaccctgaatttatttatctgtgcaaagcatgctcaccatgcttggttacgtgttaatggtggctgacagttactatcgacagcaatgtatggaacttggaaagctgaatccacaacatcagtgccaacatccgctgtggcaatcgagaaatgcagagcatcgacacacatgatccaacaactgtttccatttcctggcatcgtcttattcattcttgattcgtcttcttccatgtgcgaagaaattgctatcaagcgtgtttttgtagctttgcttggatcgccttgcctccaagttctgtta

SEQ ID NO: 2941 - DNA, 381 bp, Zea mays
atggtgtgggtggtagctacagtattaattagtagtagcgtgttataatagtatcttaatggtgattagcctcgtagagagacgacgacaagctggtagctggtcgatcggttttgcttgggggggaaggtcttggtggccttgtgatccgtctagcagctcgctaggaccaaccatggccgccgcgccatctcatgagactttagagagagagagagagagagagagggtcatgggggaggtagaggggggagagacggttgtaaaagcagttcccattgttacaggcaccaggtagtaactggtcagtggggcccacttctgcaggcggtggggcccatacgatcgaagtggctaccaattttgtatttgatgtaccaa

SEQ ID NO: 2942 - DNA, 400 bp, Zea mays
aatctgttgcttccgagtattggaaacctcaacccaattcattgctgaaatcactaccatcgttggcaaatataagtaatccaagcaatgtttacagtcccaacaatattctacaaggcaggattggtcctgtgttgagggttgccagtgatagcggtgccgctggtcgtgatggaagaatttctacaagcaacccaattgcaacaagtagtatcatgcatggctctcccgagtcagatgattcttcccaacactcagattcaggcatattactgagggggaatgcaagtaatggtggtttcagctacactagatcgaggcctgttgataatgtcatttattctcaatttatatcaactatgtattctgtttctaaagatcctgacccaacaattgcaac

SEQ ID NO: 2943 - DNA, 369 bp, Zea mays
  misc_feature (364)..(364): n is a, c, g, or t
agtgagcttgtctctgggactgaagacagagtgaatctgcacaacaagttccgtggtgccatcgagacagctcacccgggcatgatcaagcggctcgagcttgaggctcagcagaaggccgctgctcggaagaagaaagcgtcgttctgggattctgctgtcgatgccaagaatggaggattcaagttctccttttgagtttcacaacaaccaggtctctgattttcatgtttggttggatccagttttcttggtagttaagcaattttgtatgcccatttttccttgagcagtctgcagtaccttcccggtggacaatgatcatgggccctctgattggcacggcgctcactgggaatccagntaact

SEQ ID NO: 2944 - DNA, 357 bp, Zea mays
caactgtagtctacagtctgaattgaattatttctgtctctgttatgaagacatgctcaagttcatgtatttcacatacctgtttatgtagcatctctaacaaactactggaatttatacaaatggtattttattgttgaatattaaatgtttttctatctgtcagctattctctatgatgaatacatacatgtctatgtgatgaagacatgctgcagttgtgttagccaactgaacgcgaggtacggtgtccagtgttgtacgtagaacgggggtttaggctaactccaaatccccaacaataccatctatttctagggactcattcgaagaacggagcatatgaagtattgtgcg

SEQ ID NO: 2945 - DNA, 664 bp, Zea mays
  misc_feature (593)..(598): n is a, c, g, or t
  misc_feature (601)..(607): n is a, c, g, or t
  misc_feature (619)..(632): n is a, c, g, or t
  misc_feature (635)..(643): n is a, c, g, or t
cgactgtcttttgaagtaatgctagctgccgttgtggtgtgtgggcagtgatggcgggcgtggagaggttcgcgaacaagggggtggggtcgaacctggtgacgtacctcaccagcgtcgtgggcatgagcacggcggcggcggccaagagcgtcatcgcctggaacggcgtcagcttcatgctgccgctcgtcagcgccgtcctggctgactccgcccactgggaccgctactgcaccatcgccgcctcctccttgctctacgtcttggtaactccatcatcgtcgtagcctcttaattaattcattcattacatgttcgataatctttatgacatattattagctgtctggcttagagtgcatgccaatcaggagttctggaacaagtatgaaatctagaattaatggctcctatgtccgtttctgaacattgtaataattaattacggtggaaccaaaatgagcaaatgcgatgcgatccttaaaaacacttctgaacctctgtttttttcatagcaaaacggaggtgaagcccactttgagggctagtttggaaactctatttttctaaaaaaaaaatctattttttcnnnnnnaannnnnnnatctttaaaaannnnnnnnnnnnnncannnnnnnnntattattactttgtctaaaaa

SEQ ID NO: 2946 - DNA, 399 bp, Zea mays
  misc_feature (389)..(396): n is a, c, g, or t
tcctcctcctcctcctcctcgcgcagctctcgtgcttcgcctgttcgttcggggacggtcgtgcgtggcgccagcggcgtcggagttcgatttccggtgagcgcttttcgcaggaaaggttgggtcttgtcggttgggattactcactcgaccgtcgctacgggaaaccgtgtcccatctctgcagcggattggtttctgtccgtgctgcgaggttggtgtggtggtttgtctgtgcttccactgtcggaccgaagattccgtcatcgtttcgtgcagtaaccggagcggtgtttagtggggagaagatttggctggaaggcttggtgcttgcaaataaacaccacacaagaatcgaatgcgccgcaccagtgccgattgacgagattnnnnnnnngga

SEQ ID NO: 2947 - DNA, 366 bp, Zea mays
aagcttcatcaacatgcctctttaacttccgaatctcatctctgcgcccattcctttcatatatgtgggccataacaatcaacaagttgacttcaggcttcacccctatcctaggcattagttcgagaagctgctcagcttttcttgtagtgccaaacacgagggaagcggtcaaaactatgttgaatgtaaatgaattgggtttcattgatagcaaaggacggttactcttcttccgtggatcaactctattattttggaaaagataaccaagctccattacaaggtctgcaccgagaaatgcaccagtgttagtttgacacatatgagctaaaattgccgaccatgctgcaacaggtgggtatg

SEQ ID NO: 2948 - DNA, 710 bp, Zea mays
  misc_feature (640)..(645): n is a, c, g, or t
  misc_feature (658)..(660): n is a, c, g, or t
  misc_feature (667)..(672): n is a, c, g, or t
  misc_feature (682)..(691): n is a, c, g, or t
ttcttgcctgccccggctgcttgcttggtgccgaggaagaacggggaggagaacgttggggggttcttggatgcattcacggcgttcaggctatgaactaagctgagcagcttcttgcgttttaattgagctctcttgttcttgctcccgcgtcccctgcatttcaggtcagaagcgcaaaatttcttgctgcatttgaattatgaacttcgtttctcccctgcgctattttggttccacatgactgtgtgccttctctgctctgtactacggtgtgattctgtttgcagacactcttttttttctttctaatttcccttctttttccgccttgtttttaagttcatatgctctgagagtcttctcgctgcaaatctgagttgcttccgttttcgggcactcatagtttcctatatctccaaaggtgctttaaatcagtgtcctaaataggacgcaattcataaaaaaacagctctaatagtaccttattttacaaaattttataaaaaataatacggtataccatgaaataactcaaatatattacacctagattagtgtcatatccatgttttctaggtcattctcaaacttttctttctaataatgtaatttatttcctaaactctattttttcccnnnnnngctgcatttcttnnnttttgannnnnnctgcgtttcnnnnnnnnnntcactgcaatccttgcttg

SEQ ID NO: 2949 - DNA, 570 bp, Zea mays
acctttactcctttaggatacttgcgccatgtctcgatgatactggtctatccatccctctatgatctcaacttcttgcctcctctgttctgtaacccagtccggatcctcatcggtcgcgaatctgaggtccagatgatgcgcccctgaccacaaaagcgatggcaagtaactgcacgtaagtgaacagcgaaaaatgccacaacgatcttacattttttttcttcttcttcttcttcctcctgaggtttccatgctcacctttctccgtgacaagggcgacgatgctggacgagatgttcttgaggaccctggttgtcgtagaacagtaaacccatacgccatcagagacagagaccgaaattatatatatatatgaagcgatggagaccgaaactgagacggacagatggacctacccgcctcggctccacgggtctcgcattccgttggagaagatgatgttgctcccgaacctcttgagcaccttgtcgattctctgcaggaagtttccagtgaagggcttgtacgtacactactgaaactctgaaaacgacgcttacatatccg

SEQ ID NO: 2950 - DNA, 356 bp, Zea mays
ctggtcttgtggaggaagggaaattctggtttgatcgcatgattaaggagtttggcattgaacctgcagaaaagcactatgtatgtatagttgatctcttagcacgttctggtcttgtggaagaagccaatgacatgcttgcatcaatgcaaactgaaccaaccattgcaatttgggtcattctgctttcaggttgcttgaataacaagaagctagagcttggagaaaccatagcgaaaaagatccttgagttgcgacctgaagacattggtgtccttgcactggtatcgaatctctatgctgctgcaaagaagtgggacaaggtcagggaaatcagaaagctaatgaaggatagc

SEQ ID NO: 2951 - DNA, 369 bp, Zea mays
atgactgcatctcaccatttcatatttgactaggtagcagccagtaaacatatcttgtgtagataacactttgtccacacttttgactgataagattatgtacacttttgactgataagattatgtacagttacatgggccatgtatgtaataattttactgtccaaataccaaactataaaaggagaggcacacgtctctcacacacaatttgtgtgcaaaaacaaagataaaatcccacaagagattctctcctgtagcaggatcattgtgttttttctttctgtttctgttcttatcctttttgtgtattatagacatgtctatctacaagtgcgtcactagcatgaccagaactgcacaaactaa

SEQ ID NO: 2952 - DNA, 522 bp, Zea mays
tgtcttcctcgacggactttcattggacggcacccttattgtcaatgctgtggatggagcagaggtattatgacattaagcactgtcaaacccagagtcctggcataacacagatgcatgcctcggttcggttactaattaacttaaccatggaatatttttctcatgctacaaactgttcatgacctgctgcttgcaggttaaagttactggtcatgtagaaaataagggctggactatccggcatgtggactacaaggacacctcggagaaggaagaggtcgggatccgtgggttcaagttcgacaagtctgagcagctagaggtgaactacaccgggccaggaaagcatagcttgagtgcgtcaaaagaaaacactcttgacttgcatgcttgacctgactagcttcgtacaaaaatagaaatagctcacatctgggtcgcctcccagattctgggagggaggccattgccagcgtagctgaaaccgttcttctccttcccccacgtacaacaaggagc

SEQ ID NO: 2953 - DNA, 354 bp, Zea mays
agcacaaatcaacaagtaaattggttatgtacaatccctcgaccctagttgatcccatcagtaggtgataaaatcttcgaacatccgtaggtcttgagaacttcactggacctagatagcacaagtttaacaagtaaactgagcagagcaaactaaaaaatgttggacatcaaaatactttaatcgtcgaactaaaaaatttacaacgaaggcaatattaaagcagtcatcctacggcatcctatggttgcccaacaatagaaaaaccacatacacgtcactagaagaaattttgcaaattgttcgagtttgcaatggggattgaagcaaatgttggacatcgggatgcacaca

SEQ ID NO: 2954 - DNA, 390 bp, Zea mays
tgatgattgtccttgattggaaaaatgatgtagaggcaacataggtgatgttttggacgtagattgaagctttgactgaactaacttcatggcatgctctcttttattggtactcttaaatttcttgtttcttatttctgggcgggtgttcttctccagcaactggattacagcaactggattgcatatggatggatttggggcctgatttggattctgcttctgcgtcagcaataataattctgaactattcagggttccctgtgtttgttcaataactaacctaccctgtcaaatgttctttgaaaatttagttccctcataaactatctactcctaaatttcttgttttttatatttgggctggtgtttctctccaacaactggagt

SEQ ID NO: 2955 - DNA, 195 bp, Zea mays
tagtagatagggccaatttaacttcacatctcactgcagcattacagagtccttgttatgccatttcttcccacagctttcttgaccttcttcggagatcagagagcgagaggcagagaatgaagaaagtgttcgtgtacacttttgagagagagagagagagaggttcaaagaagctatacggcccttctaaga

SEQ ID NO: 2956 - DNA, 841 bp, Zea mays
tgctgacgtccccgttccgctccctcctcgcactcgaggaccccaggtcctccgccgcctcgtcctcctacaggatcctgcttgctctcctcgcgctccttctcgccgctgtgattttctgcgcgcccttgttctggtcccgcctcgtgagctcctggcccctcccgtatctttccaatgccattcaattttgtcaggattccgactgaccactgacattctgttgatgttgttgttgtcgtcctagaacactccgttcttgtgccacaaggaggggatcacgctccactgccctgaggtgaagtgtgcttcgttgctccaagggttttgggacccgtgttcgcttcataaacatttggtctgaagaatttcttctttgggtgcagacgaaggaacccccatctctatgggaaaatccacgtgctgccacgatgtcctggaagccctgtgcagagcgatgcagcaatgagccctcaggcgagtctacctttcacgtttgttaaagacagcaatatagcatatattgtatccctactttatacattaccccaatcactttgaggtcagtaacctccattgtgcaaatttcgatctcccagagctagtctttattgatctagtgcaaaaactgaatttcgtatgtctcaggaacctgcccaattgttatgtgtagtttcatgttagatgatagatttatgaaacagcacatctaacatctgttttcattcatgaatgggacctgctaagtgatgataccgtaaatttctatatcatgcagatgtcccatcagtgaatgaaacctctgggtatatttttatccatgccgagggaggactaaacc

SEQ ID NO: 2957 - DNA, 367 bp, Zea mays
tcgtacttgcaagccatgcaatatgctatttttgttattgccctttataatctgtgattggactatactgtgtatttaaagcggtatgccacttcttctaaatactatccaaccacagattgttattgccctttatatcaaacgatttttatattgataattagtacttcattgattcttcatttaattggaattcaaacaaggatttcggtaaataatgagtgtcaacttttgacaggaagtattcttgttgattgtcaatgcaattgttatgttcatactctttggtactttgttaacttggaatgctttataggaagaggaatagctgggctatgggacttctcataggcaacccagttatgag

SEQ ID NO: 2958 - DNA, 370 bp, Zea mays
acattacaatttcctcctgcgccctgatcatgaatgctgatgataggattgctctctcccatttctgcacatgccctgactacgcgatacaatttctgtgccatctcagcatctccacgctgtactgcgttgaaatcaagttctgcatcattctggccactaaccatactcgaggcagcaccaccgcccataccaattctgtatgctggaccaccaatcttcacaactagcatgccaatttctgggtcaccctttgatatgtgtgcatggtcaatttgccctatagctccactgaacattataggcttcaaccattcacgccgctccccatttagcaacctcatcccaaatgttctggtatatccctgaa

SEQ ID NO: 2959 - DNA, 349 bp, Zea mays
tcgagtcaagtcattacctactgttcaaagcaatatgttagtggtgtctgatcaacttgagaagtcagaagttgtaggggagtcaaaattattgagatccacggaagacttaaaccttaccatggtcagaagtgcagaaagaactgattgtcaaaaggaacctttgtgctatattggatcatcgaaatgtttgaatgcaagtttgaagaggttttacaggtcaaggaatatccctgttcctagacctcttccatcgcttgtcaaacttatggagtccactaaacgggtcaaaatacaaccaaatactaattatactttgttgaactcacgacacagcttaccctaatga

SEQ ID NO: 2960 - DNA, 308 bp, Zea mays
cttagctgggatggcggcgccgctgctcttctacgacctcggcctcctcgtgtcctcatcctccggtgatggacgcgatggcaactcctcctcctcccgcctccaactcttagccaccacggcgcgcgctctcgagcttggctacgccggcgtcgctctcgaccaccaccaccgcggcctcctcgccgactcccacgtctgccgcaccgacactttcgcgcccctctcctctctcccgctcccatcctctgccgctctccatcgccgccgcctcgcctctcccgcctccgaggccttccgccagtaaa

SEQ ID NO: 2961 - DNA, 393 bp, Zea mays
tgcttgtgctcaatgcctgtgccaactcagaggccatcgaggaggcgctcctttactttgatgccatgtccagggaccatggcattgagcctggtgtggagcactatgttgggatcattgaggtcttggggaagtcagggcatctcaacgaggctctggagttcattgagaagctgcctttcgagcccaatgccatggtgtgggagtcactcttgaacctggcccggatgaatggagacattgaccttgaggaccgggcagaggagttgttggtgtcgcttgatccatccaaggcaaatcctaagaagctcccaaccccacctcccaagaggcgcctgggaattaacatgcttgatgggaggaacaagctagtagagtacaggctgccaccaa

SEQ ID NO: 2962 - DNA, 348 bp, Zea mays
  misc_feature (342)..(342): n is a, c, g, or t
atttagtgcgtatgtgaatatgtattaccattgacgctgttatttccacaaatcattgtcccctccacaggaggctgacgttgacacgtagtccaaggcctcttctttctcttcagactgctgaatcacctgcagtgccggattggagtagttattagctgaatccttattaggggtgatgtctccgtggctaagctgggacgccatgaacttgtcgagagctcgccaatctgtgtccccgccagtcgccagatagagaggctcggcctgaagctcctgcagggtgtagcgaggggcaccatgctcctgtgtaaggccgcatgctggctggagagtagtgtntacttg

SEQ ID NO: 2963 - DNA, 692 bp, Zea mays
  misc_feature (369)..(376): n is a, c, g, or t
  misc_feature (381)..(382): n is a, c, g, or t
  misc_feature (398)..(399): n is a, c, g, or t
  misc_feature (404)..(404): n is a, c, g, or t
  misc_feature (455)..(457): n is a, c, g, or t
  misc_feature (635)..(639): n is a, c, g, or t
  misc_feature (662)..(689): n is a, c, g, or t
tgtctttcggttgaacttgtttgaagccctgcccaacctggacattttttagtttaggtctaaaaagagaaaccctagggttgtttgaaagggcttgtttctaggcttggcatttttgggtcagtgaagcaattagtatggttgtggatttgcatttggtactcggcattaggtcttatttttcgcgagcgctaactctaattgtattgctgaaacttaagtgttgcttatatattccgttggtaacggatactattctgcttcaattcccttctacattgtagattcgctacaggcttggctcttggctagccaagcctgcagtttaggactttgccaaaactgcatttgccatttaacaggcttctnnnnnnnncattnnctctggaggtctaggnngtggnagacgtcgcagcaggagcaggagccgcagtcgcagccctagataccgcagnnntccgagctataatagaaggtaaccatttttttgacttcttagatttcatcagttgtaaattaactctcaaattttgtcgctcaacctcaaatgctgcttatatctttccttggtaactgatactattctgctttaatgcccttctattgtcgattcattatgggctttacttttggcnnnnnaagcctgcaatttgctactttgnnnnnnnnnnnnnnnnnnnnnnnnnnnnttc

SEQ ID NO: 2964 - DNA, 238 bp, Zea mays
tgcagggccgcgcgctcaccaacgccgtcggcaacctcggcatcaccggggcatatgcggaggccgtgaagaagttcggctacgagctcgaggccctcgcggggcaggtgagctctcttaagagtgcttccgcccacaaactggagtatggtttgttaaggctaccttatagtagtatacctgacactgattatttaaatgggatggtgatttgtttgactgcgacgttgtttaatga

SEQ ID NO: 2965 - DNA, 388 bp, Zea mays
aaaatccgtacaccggcagacagactaaggtcctgttccaaacctctaaaactaatagttggcatctataattaactgaaaggtttaaaacggatcagataatggacccactaattgttagctatacctctcaaatagtcattagctgttagctgcctcaacccagctaaaaccatctaacaacttattagttggctaacaattagctttagaggttttaaacagggtctaactttaggaaagaaaaaacacacactttgaaattataaatatattgcgcaagggatactgatagagcaaatggaaaggcaaatgcttccagatgcctaattccatcccgaccatgctggttgatcacacaaaacgatgtgtggccgccattactttg

SEQ ID NO: 2966 - DNA, 290 bp, Zea mays
caaggtacgaagcctgacgacgacgaagccagccggtggccggcggcgatagaggaacgacacgccgcggcgcatgcatgccgcatgcatgcatcgtcaccgcgtagaccgccgaccgatcactcgaacgcgccggggtgctccctctgcatcttgatgacctgcctccacgagtcgcgggtggagatcttgtcgtaccacctggcgacgtgcttcctggcggtgaagagcttcctgcccctgtcggaggagttgacgatgtagtgggagttgggcaggtgggagaggtc

SEQ ID NO: 2967 - DNA, 403 bp, Zea mays
cacaggccgtggctgaggatcttgatggcaatggcgctcccgatgacctcctggatgtcagcgctgaccaaggcgacctcggccatcaaccagagcgcgcggcgcgcccaatccgggtactcgtcacggcacagctcagcaaggtgcctccctgtggccaccccgaggcgcgcggcgtgaagctgcacgagtaggcccatggccgtcgcccacacgagcacccagagcagcgtgccgcccgctgtggcaccggcctgcaggtcgccctcgatgttccccgggtctacgaacgcgatgctcatcagaaagccgggccccgagaatgcccacagcttgcgccacgagaagggcggcatgcagccccccgaggcgtagaaggcgcgctcttcgctagcatcgcctt

SEQ ID NO: 2968 - DNA, 367 bp, Zea mays
agttctttctttggttggcaataagaaacaaatgttggacagctgacagattacagttgaggggactgccacacccagatgtttgcccaatgtgtgatcaagcccaagagacaattcagcacctccttactgcgtgcatttttgcccggcaattttggcatacaattcttgctgctattggcttggggcatctcactccgactgctgatgagggaaatttttcagaatggtggggaaaggtgagccttagagttaccaagacaaggaaaaaaggacttaactctctgatcatcctgggggcttggtgcctatggcttcagagaaacagagcagtgtttcatggggagtctccttcattgcccaggat

SEQ ID NO: 2969 - DNA, 642 bp, Zea mays
  misc_feature (268)..(269): n is a, c, g, or t
  misc_feature (292)..(294): n is a, c, g, or t
  misc_feature (296)..(296): n is a, c, g, or t
  misc_feature (308)..(308): n is a, c, g, or t
  misc_feature (310)..(312): n is a, c, g, or t
  misc_feature (531)..(531): n is a, c, g, or t
  misc_feature (596)..(596): n is a, c, g, or t
  misc_feature (598)..(598): n is a, c, g, or t
  misc_feature (612)..(612): n is a, c, g, or t
  misc_feature (619)..(620): n is a, c, g, or t
ttgcccgtgctgctcgtgtcgaacccctctattgtatgcgtgaagttctctgctcgccacggcgcgtcgagctcccacgccgaatccttttctagctcgccgtgacgctcggcgtcctgcctgctttgctcacccacgtcggctactcggtggtgctccaactcatcagctgtcgttgtcctatccacgtcagcacgcgaccgtggtcgtgttcgttgagtttgccaacgctatgttgccgattcgactgtcgtcactggtgtaaaanngcgggggtccacgtgatgctggnnncnatacggggcgtnannngatcctctgttgcgcacgtgaagtgctctgctcgccacggagtgtcgagctttctcgccggattctttttcagctggtccgtgacgcacgcataatgaacttgatgtagtcgctgcgtgtgtttgtgtccgagcccgcccggtcgcaacctcgctttgctcttcgcgtcgctgttcgccgggtcaagccccatattgccgcgtccctgtttcagtttgncgtgccacaccgtcatcgcttctgtcgcaagctcgttagccactgttatcttgaccgcgccagcncncgactgtggtggtnttcatcnnattctccaacgctcctgttgcc

SEQ ID NO: 2970 - DNA, 343 bp, Zea mays
tggcgtgatggcttcccagatccatggtgatgatccctcggtgggatccatgccacctgttattggaaatgagctgctgatggcagctgatgtcttggccaaaaatgacgaacctcgtatgggcatggaattcgagtctgatgccgctgctcgcgcattctacaatgcatatgctttatgctttgggtttgggattcgtgttgcccgatcccgtagtgagcgaagaaagggcgtcgaggtgctcgtcatgaagcgttttgtgtgcttgaaagagggacatcacaggaagaagaagccagttgagcctagcaataagaaaaagaggaaacgactctctatacgg

SEQ ID NO: 2971 - DNA, 208 bp, Zea mays
ctcctcctgctcgtccctgtctctggcgcgcgcgctgctcagctacgatgagctctcctgtcaacggcaggggctacggcgagctccgtcaactgcgttgaacatggaagacaaagagcagggaaacatttgatgtttgtatctgaacatttgctagttgaaactgaacatttgctgctagttgaaaatgaacatttgttgttgcatg

SEQ ID NO: 2972 - DNA, 569 bp, Zea mays
  misc_feature (565)..(566): n is a, c, g, or t
tggtgtactatcggggccgagctccacatggttctcgcaccgattgggtcatgcacgagtaccgcctcgacgagagggaatgcgagactgacactggcttacaggtgcaactttgctattgctaccgatgagtaaatctatttatgtgtactccatacagttgttgttaaaccctaaaccttgcagctagcatgcatgaaacatctatcatactgctgggtgactgatatgtagctgtgtttctgttcactgcaggatgcatacgctttatgccgagtgttcaagaagacagcgcctgggccaaaaatcatagagcattatggcgcagtgcaccatcccatcgaacaccctcagtggatggcagaggcaggcagtgttgaccgccactccccaacgctggacttgtccagtgacgctagaggtgacgacttcgagagcagcagcttctcgttcccgacggaggcgcccagcatggactccatgcacgggatgcagatgagcgcaccccacgaggatggcaaatggatgcagttcctgagcgaagacgccttcaacgccaccaatnnccc

SEQ ID NO: 2973 - DNA, 334 bp, Zea mays
tcaaccgagaagaatcttttgcttattctgtggtgagaacaaaggtcataccaccaggatgtgccatgttaccatccagaagcaaaaagaaatagccgaagcgacagcacaacaggctcagccgaagcaggtcatgcacactgcttcgtatcattcgccttacatcccagagtatgtaggcaatcaccctgcagtttctgttgcttcggcgagtcaacctcaggcttcctggcaacaacctccgcctccaccaccgctgcaacaaggccagcagccagaagggagccaatatgctccacaccaaagggacttcagagagcagtttatcatgcaa

SEQ ID NO: 2974 - DNA, 439 bp, Zea mays
ctatctggagattcaaggaattctgtgaatgttggtggcttttggttgaaggatttaatagctgcttcgcactctggtttttggagttactttctgcatcgagtgaatccagttcctgtttacgctggctgtctgagcttgcttggctgctggtgttcccagagatttataaaaacagggttttcctccgtcattccgccgcagctagttcagatccagagcctatataaagaacagcgaccgctgagaacataaagatggttcttggttgttcatgtactgtgtagctgtatataatagaaacattgcaggatcagtgagtaattctgtggccgagtaaagtgcagtggtggaaccgtggaaggcatgtgttacctactggatataaatatgatgatgtgaatgttcagttgaaaaacttgggtgacatgaactgatg

SEQ ID NO: 2975 - DNA, 828 bp, Zea mays
tgggtcttagaagtatgtctttggcactcactttctttggaatttgctggacaaatcctctttactttatgcataacatcctttgactcttccttttgctttttaaggagcacagaagaagtttcattacagcaaaggactttgatttcctgtcttgccacggaattaatactgtgagaattcctgtcggatggtggataacacaagatccttatccaccttctccatttgttggagggtctttggcagccctggacctagcattttcatgggcacagtatgttgtgcctccaaactcttctttgcagtatttaatatccctgacctttcctgatgctatatttacttctgttggattagatcttatggtttgaaatgtataatcgatcttcatgctgctcctggttctcaaaatggaatggaacatagtgcgagcagggatggttccgtggcctggccctcgcctgaatatatctcacaaacattggaagtcattgacttcctggcgacaaggtattcgttcacctatcatttcagcttaaaccgtttgaatggtactacctccgttctcgaatattcgtcgcccgctagttcatttttgaactaaaccgcgacaaattaaaaagaacggagggagtaattacctgcaattctcctgagctggttatgtcagcgattgcatcttctctcactgagcatgaaaactgcatttgctagtagcttctgatgttcttagatatcctagtctgtccttggaatgttataggcgactttcctggacttgtgttttgcaggtatggaggccatccttcccttttgggtattgag

SEQ ID NO: 2976 - DNA, 903 bp, Zea mays
  misc_feature (841)..(847): n is a, c, g, or t
  misc_feature (890)..(892): n is a, c, g, or t
  misc_feature (899)..(900): n is a, c, g, or t
catcgcgccgcaggtagtttaatttcttagaaatgagattcactctttcgtgctgtatgtatgatggttctcgagggctatccgtttctctgaactcatttcgggagcatttctgcagatttggtggaacaaacggagcaccagtcatggcagctggttgcgcagacctgtactacggctgctactggagaggtatgatgtctcttcccagttgtatgcctgttctttcattgcagcatgttctaaatcaaatatctcgaatatccaaattgccaacaaattttcaatctagtcttatctgctttcatttgcttgtagttagtttgattgggcatttgaaatcatttcatttttgtttccctttataggccatctgcgcaaaataatagttccataatgcttactggtttttattagtaggcctgtcacaatttcggagtggtgtggtacatcagtagagtaaatgacatgggagatagcttgaagtgaattttgggcctctcaatcttcaaggcatcattttctttcttgtttttggttgacactagctgagttgaaattcatagttgtaatgctcaagcctcaaatactaattgggacacacattttaacaaggataatgatgataaaatatttctgcagtgttttcacatccatattagtttgttgttcacatctaacatgttttgtcatatcctactcaggtacatttggaggttatgcaaaagttgcaggataggcttcccagtctcggcacatttctcggtgattttcagcacaaacttgaccagcctcttagaggtgacgatggcttggttattgggaacatgtctttagcacnnnnnnnacaggtttttcagattgcccttgttctgtcaatcttcctccannnggatgcnnaga

SEQ ID NO: 2977 - DNA, 1129 bp, Zea mays
gttttgttgagagatacaaaaatttgagttccttcaacgaaactgaggtagtgttccaaataaaagctttatcttcgctgatcagcatagaatatgttggttttctgttaatcgaaagtcgaaacccataacttcttttgctggttttcttatagctcgcgaatctgcataaggaattgaggcctcatattctacggcgggttataaaagatgttgagaagtctttacctcctaaaatcgagaggattctacgtgttgagatgtcacccctccagaaacagtgagtactccgggctaattttcttgaaccaatcttttttgacaagttttcttattagtttggatggaatcggaacccgcattcttaaatctttttttccaagctccaaaccctccctggaccttggagctgccaaacatgcccttattgtacactgaggctaattttttggtttttactaggtactacaagtggattttagagcggaattttcagaatctgaataaaggtgttcgtgggaatcaggttttcgttacatcttgttcttctaatcaagttcttatgttttatattttccgtgcctttagttatttcagttggcacatcttggaattgaatgcaatttggctgtctcagtatgtagcaaattgaaccttatgtctcagtatgtatatataccgttgctgctagtctaagaccatttttcttgctaaatgctgtggtgcttgccaggatcttgattggaacaatgttactattctttctcacctactattgctaggtcaagcagttcctcacctgctattgctagctcaagaagtttctcacctggccgtgcattacctatcaaactggagcatgggcaaggccacaaggcaagacttggctgttgtgagccaaatctgctctcccatgtgggcaatgattgattgtttataacttcatgtctgatctactaaattcaaataattagtgtgcttggtaacaattgttcttaaggcacatccaaatctgccctccaaaaaattagtgtcctgctatcatgttttatgtgactgacttgttaatgacatgcaggtatcacttcttaacattgttgttgaattgaagaaatgctgcaaccatcca

SEQ ID NO: 2978 - DNA, 532 bp, Zea mays
gcagtccggctggcacttgcgccgcaggtatttgcaccctgcgcacggcccgcctttgccgccgcctgtgatacctgcagagaccgtcgatccaccacccgtgggcggcgaggccacagtgaccacggatcccatggtgacaaccggcggcaccgatgatgctgacgggtcggccatctgtgcctacgcgaggaactgattaagagatccatctcagcgtgagaacccaatagagatgagagcgtgagaacccaaaaccctaaacccaagagaaatataatggcagaatgagaagcatatcaagcgcgcgttcggatccgatgttgaggagttagagggaggttcgtacctttaattttgttttcctccggcgaagatgcgaggccggccggccgcccgccgctccggttcaaccccggctccgagagtagccttttgctcctcgtttgaataggctttggttttttaactccccgcctaataacctggcgtttcgggtgtttgttacggagagagaacggatagatatgaa

SEQ ID NO: 2979 - DNA, 481 bp, Zea mays
tcggttcctgtggggcgcggacgccgaggagttcaggccggagaggtggctggacgacgccggcgtcttcgtccccgagagccccttcaagttcacggctttccaggtgaaatctcacgttcgattcgaccctgttctgtgctgttgctgtccactcgttttctcagtttacttgatgagctcttgtttgactgttgcgtaggcgggccctcgcgtctgcttgggaaaggaattcgcgtacaggcagatgaagatcttcgcggctgtgcttctctacctgttcaggtttgagatgtgggatgccaacgctaccgtgggttaccgggccatgctcaccctcaaaatcgatcgcccgctgtatcttcgtacgtcgctccggcgatgaggtgaggcgggcggcatgcctcaatgtcaaacggtcagacacgtctgtgagtgtagtgtaggaaaacaacatctccaaacatcagcatagtcttcg

SEQ ID NO: 2980 - DNA, 354 bp, Zea mays
agtatgaacgggactagaataatttttccaaggttagaaaaacaattttccactagaaccatatccattttttacaaaacatgattaacctagacagacttaaccataaatagcacggttgccacacaaaaaacgtaaaggcagataaggatgatcaaaggttgcaaaggcgctccaaagggttaaaaacataaagcaacctactgtcaaaatcgagctagcttattggacatccaagcccacctgcaaaactggacaaatattcaaggctcctgatccagcggaaaaaatttgtagggcagcttgcttcagcaagttgtaagagctaatgatgcttgtaaggacacgattcca

SEQ ID NO: 2981 - DNA, 354 bp, Zea mays; identical to SEQ ID NO: 2980

SEQ ID NO: 2982 - DNA, 236 bp, Zea mays
cgccgagcctggtcacatattaaacactgatcggtgggctctgccgtggggggtaagataatggaaggctttgagcttattggaggagattatcgccaaggaccgcatttgtccctgatcagctgctgtacaatgtgatcatcggtgggttctgtagactccggcaggtggataagtctcgcacaatctttggaattttgaggaagaacgaatgtgagcccagtgccttcaattaa

SEQ ID NO: 2983 - DNA, 649 bp, Zea mays
  misc_feature (539)..(539): n is a, c, g, or t
  misc_feature (575)..(578): n is a, c, g, or t
  misc_feature (598)..(603): n is a, c, g, or t
  misc_feature (612)..(619): n is a, c, g, or t
  misc_feature (629)..(636): n is a, c, g, or t
tgtaaaataattgccacttggtcatgctaataggaccaacttcaaggtttaagggcaattcctccacagtctcgttgagcgctattaatttatccttcaatagccaaaactcattgaagaatactgtaggataataatcgcccgtaactggatccacattcagatctgtcaagctattgtaaaggaaaaccaaaaccattctcaaaacatgtaacttttctatattccagctttcaacattagttggattcaaagttcaaacaatgaaatttttgaagaaaaaaacagtaagccagtaagaacaatatctatgctgtaagtgtaaaagtggaactattcaactatcacaaaacaaaaatgatatatgttactatctgttacaatttaaggatacatggagcaacaatgggaggtacattattgttgggatacctgtaaaatgtgaacggggcaatgtcaatcatatgcagagacgatggacagattaaagaggacgcataacatagagaagatgtacagagcaaagaggagacagcgtngagaggatgtacagaacaacaagaacacataaacannnnagctgatgctatatacaacnnnnnnaacaacaannnnnnnncatatgatcnnnnnnnncatatgctaaaaa

SEQ ID NO: 2984 - DNA, 352 bp, Zea mays
cggcttgatagcaagggagatatcagtaccagtgacaatcactgatcttttgttttacacctaaattttgatttctgaaatcagttttcatgtgtctgctagttgtatggagtacttatgctgagcccatgtcttgtccgagacagataattctgtgtgctgttaactttcccttctgtttttttgctgctccagtgattagattgacttactaaaaaggtgtgcatttttgtgaggttgctaatgcttctctagagcattacttgcataaatatgtcaaggctttgttgacgtggttattacgtagaatttgttggattagaatgcaaaatgaatgataatatgctcctat

SEQ ID NO: 2985 - DNA, 870 bp, Zea mays
ggaatgaagtaggcagaacagataacaagatgtgagaacaactagtagtccaacgagtaaccggcacatcatgttatatgtacatggatcatggatgaacgggatctttagttgaggatggtttgtttgtttgtttgtttgttgaaattgagaatggtttgaacaagacggtagcggtgactcaacgacatgcttcagcttctaccggtgacctatcgccttgtattctttatttgctatcgattgaccagacgattaccgttgccatatgcaagtagcgataattcgtcgcgagcgaagcatgaactgatctgttagaagcagtgagcaaccaaaagcagaaaccagaaagcgaaagactgtgggtatagtaccttgtgggtggaagcagtgtcgtcctcccagagcgggcggagggacatgtcggagtggcggtggacaatcccgcgcggcaaggagtgggcgccgttcctgtcggggccccagcgaatgcgattgcggctgcggatcgcgttattctcttgcgtggcagaggcaaagccggccttgccgagatccacctgaagataagatacagcagcatgtgtattatccccgggttgagagcagcgggcgagggtgaagaaataagcgagagagagagagagagagctaaaaatggaaagacgggcgtggacggaggagggagggagggaagagggcgaccttgaggtggtggtactggatctggaggcaggcgaggaggacgagtgcgacgaccgccgccacgacgccccagcggcgcggcggctggtgcttcatgtcgtcaagggcggggccggcggagagcttcggggctggtctggtctgggctggtcttcaaggtctgga

SEQ ID NO: 2986 - DNA, 763 bp, Zea mays
acgcacagcttgtgcagcagaactttcaggctcccagggggtacccgatgcctaggagggaggaggggccagagaaatggatggaggcagagctggggatgaagattgcctgtgggttcgagatgatgtatcaggagaggaaacggcagggcgaggaaggtaaatgtagcacgtgggatgtttacaggaagagtttggaggcaactgggtgctttgacgggctgtatcctgggtcaattgagtataagagggtcattgaagatgcaatgcaatattacaagagctctaatttgtattcccgaacaaggtgcttctagtcactctttctagccatgtggattcacctatctgctttgttactatgcgaaagaatgtcatcctgcaaccatcccatgcataaaatgtctaatttctagttcactaccgtttaaaaaatctacctggtttgatgtgcattatttgttctttttgaagaacgctatagccattgtctctattaaatataactatataagtacaaagtagtgtcatttcaataattcttgaggctaccaggatttctttaccatactgtgtgaagaacacctaatttacaaacagatgttttcttttgaacttgattaatgcaaatcccttagtgttttaatactcttgcaaattgcaatacgtcacagggagatactgagtgaaccagtgcggcgaattgatgaaatcctatcaatgctgtactcaactgatgaatttaaaggcactgatcttcctt

SEQ ID NO: 2987 - DNA, 375 bp, Zea mays
tgctgttctatgggactggaaacgccaactgcgcaacgctgcctcccaccagcaggagcagcacggacgacatgctctccctgctcgacttcagaaaggaaatcagcagtgatccaggaggtttcctcagatcctggaacactagtggtagtagcgccgccgactactgcagctggaatggcgtcacatgcagcagaacgcacccaaggcgggtcattgaactcaaactcagcagccaaagcttgcaaggccgaatctctccatctcttggtaacctaaccttccttagaacgctgaacctgtcctacagcagcttctttggccagctgccccttcttagtcgccttgtcaggcttcaggaccttgttctaaaca

SEQ ID NO: 2988 - DNA, 273 bp, Zea mays
  misc_feature (263)..(266): n is a, c, g, or t
ttgagatagcgaagcaataaaagtgaaaccttttattctcttttacgattgacttgataaaaaattaaattcggaaatgaactttatgctagccgctacactggtgaggtaagcatggacgccagcaaaaattgacaggagatataattggtagagaacagcaccatgtgtgggtctgaaattttcaacagctcagtatatatatatatatctccttcatttccctatgaagtcgtgatttttcagcaccatctgactctgannnnccggatt

SEQ ID NO: 2989 - DNA, 681 bp, Zea mays
ccgaaagaacaggagccacactttggtatagtgcaaactaaaacttctccctgcgaatgatgtggactgccatggtaagcttactgtctttcttcttcagttcgaatagacagatgtcacccacacgcaggccattgccgcgagcaaaattgggccaacctccattcagaaaccaccttctaccattatgaaacatcaattttgccttccatgtcgtccccccgcactggagcaatatggtttgccctttagttgggagatataccgaaccatatcgtgaacctaattcctgatgcattaagatcagtagttagcaacacactacaggttagttcaaaaactctctgaataatctagaaaacttctaggggttataatggcggattgtattcgtaattttgtatgttgacggttatagagaaaatattacattttgatgatttgatagcaaagagtttgttcatatgaaggcaggtgaatcggtgagctctcaggtgacaaaaaaatgcccacttaaacaaaatattaaacaaaataaggttaaggtgatagagaagcaaccttgtgggtaaaaatttacaattcaagactaaacagaaaacgaattgagcttactagcatccaacgttgagcgacaccaacattgttgttcttcattactgccacacaaatgggaatttc

SEQ ID NO: 2990 - DNA, 368 bp, Zea mays
tgatgcagctgatgagaaggggagtgaaaagaagaagaagaagaagagcaaggaaggaagtgatgctgatccagagagtgctcagaatggagatgatggcacacatgctgagagaagtgagaagaaaaaggagaagaaaaagaagaagaaccgagatacagaggggacacaatagttgtagtttatgttggctggttacctttatttaaagttgtcggggaagattgaaatacttttcttgcttcccttgtgtctgctgtgcctaatgtaccatccttaggtagttaggttattgctattctactgctttgaattgctatgccaagtggtgatattttcattggaactcttgaacgatggctcataca

SEQ ID NO: 2991 - DNA, 475 bp, Zea mays
catgcgagttcctctgcccgtttctcagtagaaattgaggtctgtgtacccatagtgatcgatctccgtgtacccatacgagtacggcagcagttcctctatgtccagctgggagctccaagaactcatcttctggatctggctgtggttgatcgattccacctctgcaatgaacatgctgtagacaggtctgtggtccgagaagcgcgactctccccggacgtaggagagctggctgagcccccttccgtaccacaagatgcggtcgcacctggaatggataaacgggttgccaatttttccttagctaactaactgtgacaaaatttgacaaatgaactggcgaattcaagaattgttattgcagttacgtatatatatataggtaccatgctggagtccgcttcttctccttctggttcaggtcttctcccgcgtatttgtcggagttgttggagtatttataggtcggtgg

SEQ ID NO: 2992 - DNA, 648 bp, Zea mays
tcagcaggatgttggtgagctgcacacagcaaacgatcgacgacgggccggggagatgagatcgacaagttgagatgaatcgccttgacgacgtacgagtacgatacgagactagattattaattctgcctgcagattcgattctgatcgaccagcgtaccttgatgtctctgtggacgatgcatccgtcagggtgcgtgtggaggaacctcaggacggatgcgcagtccctcaggatcttcacccttgtttcccatgggagcacggagtcactccctgcatgccaacgtacacgtaaccatcaagaacagaccagcagaacagaacgtaaaatagattatttctcgcttactgagtaggttctgggcaaggttcccattggcgcagtactcgtacaccaggtactggtcgccctcctcgtcgcagtagccgaagaggcacaccaggttggggtgcctgaccttgcacagctgctccacctccctggtgaaggacccggacatggccgtcctgtggatgtgcttgacggcgacgagctgcccgctggggagcaccccctggtacacctgccccgcgctgccggagccgaggtagatcctgctgctcgcgtagtcgacggccctctcgatctcctccctggtgaacctg

SEQ ID NO: 2993 - DNA, 781 bp, Zea mays
  misc_feature (727)..(730): n is a, c, g, or t
acatgattccagtaataatatacaagcacaaatcagacgacggagtaggctgcctgaccctattgagaaagagaaagggatcagtctctggtccattattaaagatagcgttggaaaggatttgacacgagtttgtcttccagtttacttcaatgaaccactctcatcccttcagaagtgctttgaggatttggagtattcatacctcttggatcaggcatatcaacatggaaaagtggtaagatcacttttacatctttaacattgcacatgtccgaggaatttcatctgctttccatgagtgccatagattaatgaaatcatttccaatccattttcttattcatcacggcatcagagttcaaatcagcaaactcaatcttcaaatgtggttctgatgcaagctagacgtgtcgtatctgctgatcagaatcagattacatatcagtatcttttgtgaacccatgatagttatgatgtatagtatatcatatcactattgttcaagcagtatactctgctagtaagcatggcagtttactcatccttagaaaatgaaaggtgttttcagagtattatagttgtatctgtaagttttgttcaggtatgatgtacaatatcatttgtgagctagggaaatactgcatttctgtgtatatagcatgtttctaatagcatgcatgttgctatcttacaagaacttttgctcatttatatattttttatnnnntagggggacagcctcatgagacatcctcaaagtagctgcttttgcggcctc

SEQ ID NO: 2994 - DNA, 591 bp, Zea mays
  misc_feature (586)..(587): n is a, c, g, or t
ttcgtcggtttttgctcactgaattcacctctaagaacactcgcagccctttgaatcgcacggcagactttccacacttcatgctgcattgccacctcctgttccttgtcactcagattggcggaccgtgagatggcgtcagcgatcccagggaagaacgacagcttgctttcgtagtcctccggaggcgagtacaactggtgaaaaacaagttttagtttaaaggaaaataatatacaagtcgtcaagtccgctgaaatgcgtttctcaccagatgcttaaaccatcctcttccttggagcccttcaggttgcaggaagcttctttcagcaagtaggaggcgatcgttcaacaatcgccttctcatcctggtgtgttcatcatataaatccatctgctgtagtttctgtattttgaatccgaacatacaacggagcacgtcatcagccagtttcaaacaccacttataaatcgaaaaaaagaatattccattgacaaccagattgtgaaaatagaccgaccctaaaatccatgaaatcagaagcacggcataaattgataccttcatctccttcagaacttcatnngctg

SEQ ID NO: 2995 - DNA, 635 bp, Zea mays
ctctgccttgagctatgccccagttggtagcaagataccagaatcagaagttattgttgatcctcagaaacagcgcctaattgcatatctcaggaccggaaagaactatctgagaaaccaagctcctgacaaggcatttcctgagtttaaggcagctcttgatcttgcacgatctttaggtgatcatgttgaagagaagaaggcagcacgaggattaggtctgttcattcttttgtgaattatagttgtatggtttatttttgcagatagttccatggaattgtgagaatctttaaataggttcctttttgtttttaatttggttaaatggtacatgatatgcaagataacgagggaaaatgttttccttgaagttctttttccccttgcgttacagcaaaaaatgaaaccacaacacagtctgacgtctttgtgaaaagtaacgaaattgctttgcattctccaggggcatccttgcaaagacaaggcaagtacaaggaagccataaattatcattccatggtgctaaacatctccaaggtgaccggagaggatgcgggtgtcactgaagcatacggagcaatagcggattgctacaccgagcttggtgagctcgagaaggcaggcaagttcta

SEQ ID NO: 2996 - DNA, 279 bp, Zea mays
gaatcccacaacggccactccgcccaattgtggcgcatgccaagggatggctcgcccagcacctcgggaagactttcgccttgactgagcaggggctttgatctcgataagcgccacagtgaatctcgacgtcatcccgcgcaaggacgctgacgcactcataaacaacctttagcccatactcgggcactgttacaataactacggcatggggagccactcgcctcgtgggctccggtgtatggacaatccctcggtctctgcctctgctactgatct

SEQ ID NO: 2997 - DNA, 405 bp, Zea mays
gcgacctacgtttcccttccagaggaacagcatgatctcatcttgagcgacaagattcagctgggccagttcatccatgtagaccgtctagaggctgccactcctgttcccatccttagaggagttcgcccagttccgggtcgccatgcttgcgttggcacccctgaggatcttgtggtgaccagctcctccagttttcatggcagcaagaaagcgcaaccatcaaatggaacgaaggatgccagcatcttgtcgctagaaaaggaaacgagcaaattggagaaaataaatgcttcacgtaagcttaccgggacggaaaataagaagccgatgctcaccaaatcaaactcttcactgtcaagacaagctttgaatgtgattggtgataagaaggaagcggttaaa

SEQ ID NO: 2998 - DNA, 207 bp, Zea mays
  misc_feature (196)..(199): n is a, c, g, or t
cgatgagtgcatgatgtgcaggaacccatcaatgccttcccaagaaatcgagaaggaaaaaacgtaggaaagctagaactttctcctttttatttatttttcaagtttttgttcatattaattttgactcctctgccctaccttctctgggttttaggagaattcaattgataagttcattgttaatagtaagcannnngtgcatcg

SEQ ID NO: 2999 - DNA, 656 bp, Zea mays
cagcctcagtagtatgtaagtatgtacccatttccatcccagctgaagtgagcccgaggtatatatggacggtcacctcgcgttgcagcactgcgcgacgcctcgccgtagcttctcccagaggcacaccatctgcgccggcgactggtagtgcgcggtgaggtagccagcgacgcagccggactggcagaacccggcgctgtggacgtacgccacggcgctccccggccccgagcggttgaagttgaactgccccacccacatccccatgctcacgtcctccatcttgaacagctgaggaagaaacgcaatcatttgttgttgtttattcccttgacgactcaatatgtaatcatttgttaagcgcccgtgcactgctgcatggtgatgggcacggcttttgactttgggtaaatcttttcagggtcaggcatgactgggggttcgtgttttttattatttttttctttttctgttctcatcaagagtggcatcatccacgggaaccgaagttaaagcagcaggtggggttcttgagtgctagtgtggatcccatttggtttgcaggatgcagctaatgttaccctctgatgcgaaaggagtagagggatcttacatttagtcggccgttctccatttcagatgcgacgaagttt

SEQ ID NO: 3000 - DNA, 397 bp, Zea mays
actgcctcgtgctgccgaggcggcggctacccgtaggaaggacgatgtcatcacaacaaccaccagcagcagccgtggatcatcctcaccgtcgtcgtcaccctccccaggagcagcagcagagaagaaggagaagcccaagggcggtggcggcgcgacgtccgcgaagaagccgtcgccgccggccaagtgcgtgacgagcaaggactgccacctcaagcggctggtgtgcgccaagaagtgcaccatggccgcacacaacaagtgcgccgccaagtgttcccactcttgcaacgccctccccatctgcacctagctgacatgcatgctatgtaacccccagtaaaaatattatttatttaataaaatggaccacatgtctgtagttcaatccgag

SEQ ID NO: 3001 - DNA, 906 bp, Zea mays
ggcgcgtcggcatcacgatctcgtgaaagatcgtgaggttagtcgtctatccatgctctcgctcccaccgtgaaaggttgccctgcgcgtttattattagggctagagatttccgccgagatagtttcgttttcgaataatcaatccttttctcttcatatgtttttctgtgcaaactaaaattgtcgaacaaaaaaaagattgatttgatctgttcttctcggactattcgccattgaatcattgatcgattttgttgatctctattacaattacaactacggtaatggatcatgatctaaatatttctttataagttgttaaatatctaaattattttttattcaaaaataaatagaaatatgatccgatcctaattcgattcgattcttaaattttatagattttatagtgtaaatatgatcattgtccctcctaattacaacatgcttgttctcaaattcatgttctctactttattttaggcattctcctgaagttattaggctcagttggactgtgaacagatgtcgagcaagtctgacaacggaaccaatgtaagttaaaagatatatatatatcacctctgggcaaattatttgtagcacgactcatttcaagaaaaaaaaattcacgatcttatcgtaagttcagttcatcgcaaagattattatcggcaaagattattatagtacatacgagcagatgccgccattacacctcaattaatttttagcagatcgcattttctctaatcaatgctattgatttccaaaatggatgttaccaggagcaattggtgaacgaatattatgaccaagacgaggacgacctaggtgacttcattgtgtatagcgacgacgacgatgagtcgtgaagcacaagcagcaccagcaggagtgagag

SEQ ID NO: 3002 - DNA, 519 bp, Zea mays
ctccgtctcaatttcaactgcctaaatgcattttgggggtatttttggtattaattctgaaacatctcattcaataactgcacagctcaatgttcttcagacagaaaagaaacacttaatgtctgttgtgatgatttctagtgataaccttgagagctccagtttcctcatatgatgaactcatattcatattggtttaattgttatagagaagaagcttcagtacaaaagtcagatagatttaagaattaggaaaaagaagtcaggccagaagaagataactggcttccaggtaatatagcacagagtgtccattttccgaccaactttttttgttaagaaagacacattcttgttttggatgccagaaggcaaacaccattctgacacatccaacctccaacgtgatactgttgtataccactgagttaaatatctgtgttccttgtgacagtttgctcctggaagctcctcggaagttctgattacttctgcggattcgagaatacgagttgttaa

SEQ ID NO: 3003 - DNA, 380 bp, Zea mays
acagaacctcttcttctcgcaggtggacatgaagctggtggcgcgggtgctgaggatgccgaggatcaccagcgagcagcttcagtggtgcaaggccaagctcgacaagatcgtcctggtagataggaagatccacagggaggcttcatttttgttgttcccctgttgagagagtacgtatatatatatgttttcttatttttcttttcgatcgcgtttgctcgataaaaaaagggaatatattcacccatgtaatcagtccacggctgtaggaattttttttagcgttttggtaattcagtccttcacgcaggttcgtaattgtaattgtaacttgataaacaggccacagtttacggagctcatggcgcttccatgat

SEQ ID NO: 3004 - DNA, 420 bp, Zea mays
ctactccgtgttctcgccgcccacgttcctctacggcccgcacggcggcgagctgtgattccaaccgtacatgtatgtatgtatgtgtagatgtgtatcgcattaattctagctagatccaacgagcatcatgtgtatcgtatgtgcatgcgctgcaggctcggtagcacgcaagtgtaatacgtaattaggattgatttctgcacgctagctagctagcaacgcaaatctctgttatgctgccaccggccggcaaagtagtggtacactaatataatgccctcccggtttgatgggtggtgcttgtggtgtgtgggagccacgtaatctttgcttggaagggaattgcgttgtacaatgatgaaatgggccgggtaatgcatgggactctggtcaagtattttgagttaacaattccct

SEQ ID NO: 3005 - DNA, 455 bp, Zea mays
cgacgacgacccgtaccgccaccaccggcagctcaccgccgacgacgacgcgccgagccacgctaggatgatggacatcaactagcggccggccggcgcccggccatctcgtactcgtacgtcatgcatgcaacatttctttccctcctccagtcctccttcctccccagctcgccgcccatgcatgcactcctttctggctagcaggcatggacgagaggccgtgatggatggatcatggatgtgcgatgtggtagcagctgcttggtggtggtggtctctgactagatgtggtgatagtgcagactgctagtctagactctcacggccggcggccggcggggagtcatgcttgagcgcaaaagtgaagctagtagctaattacgacgtgcatggaatctttcgcttgtttgcttgctgttggactttcttacaataacatttgttcgatcgat

SEQ ID NO: 3006 - DNA, 380 bp, Zea mays
tttcagatagtcaaggaagatcaccaatagtgatgcacttgtgtagcagaggtacagaggggaattaacagaggtaggaggtaaccttttgcctaaatcacaaacttttatggggggaaaggaattctcaacttacaagctacatgtttagcagcaaatacgacggctcttactgagtcatggcaccacctgtttatgttccagtatctcatggcatgagcatgacaccggaacatctaaaagctagctgttttcctgttctaggagagcacgagatcgttgtcaccaagatgtgggggcctcatgcacacctgaacttcatgctcctctggtccaacccggtgcttggggaccatgatttccagcccagttcctgtctc

SEQ ID NO: 3007 - DNA, 533 bp, Zea mays
gcgagtacaaggagggcgagatgctgcgggtgatgccagagtgcaggcacaggttccacctcacgtgcctcgacgcgtggctgcgtcgtagcgcgtcgtgccccgtctgccgttcgtcgcccatcccgacccccgtcgccacgccgctctctaccccactctcggagcttgtcccgctgtcgcagtatgccgccgaccgtcgccggagcaggtgatgacgcttggcatttttctcatctcccattctttccctttggtctctttgattgataccgcttttatcgactctgggataccaatctgattgttccgtttgtttttggacaggtttgggtgattgatggttgatggagatgtgaactgttcggctagagctaccataactaggacaaaagtttttgcttgacagcagtacattattggacccaggaggaagacatgcagtgtacatacattgttcttctgttctaagatagtgtctatcaagtgaggttacctgtgatcttatagttgtacgcggaagattgttctat

SEQ ID NO: 3008 - DNA, 554 bp, Zea mays
aataatgaacacacacagagagaggagcagccgaggatgccaaaccaactggattggtactatccacagcagaggagacatgctttggctgctcctgctcatttgtttgatattgtgatccagggaaaatgacttgaacactgatatctgcgcaggatgaacaaggagaaaagtttttgaaactgaacaaggatggacaaggtaccaaactgcaactgaaattaacaagttacgaagtccaaactggacaaggatgaactagaatgaacaaggtaccaaactgaaactgaacaaggtaacaaactgaaactgaacaaggtaccaaaccaaactgaaacttgatcacggtaccttcagatgaagtactcatcttcttgtctgcctgagtcgctggagttgataaccagagttggctcttgttcttgatcagcaattcaacgcagtagttggtcggggtctcggggaggaggaggaggaggagccagggatcagctcagggaggactggagggaggaccggaggagtcgttcctcgttcaccaggaaggagaagac

SEQ ID NO: 3009 - DNA, 396 bp, Zea mays
tgatatgaacactggtagcacgcaataccctgaaggttggtactcagacgatgacgacgggcagctctcatggttcaacgctggggtcagagttggcgtaggcatcggcctgggagtctgtgttggtgtaggcataggcgtcgggctcctcctgcgctcctaccaagcaacaaccagaagcttgaagaggcggttcttctgacagttgcagctggtgtagctaccaatgatgaccagagcagagttctgcctcacatacttgtatagttcatgtgtttgttgtgcaggagttttgttttgtttttaggggaaagtgtagatgctgtgttaatgtggttgtgtacatggctctcgccgtttcttgtatggcatggcatgcatgtaaactgtgaagtt

SEQ ID NO: 3010 - DNA, 406 bp, Zea mays
tcaaggtcaaccgtactcaacagacatttcatggttagctggcctatctttgttggagtatcttgacatgagtgaggtaaacctcagcacagttgctgattgggctcatgtggtcaacatgattccttccctgaaggtcctccatcttagttcttgttcacttctaagtgcaaaccaaacactcccacgtattaaccttacagaccttgaaacacttgatctgtctggtaatatttttgaccacccaatgtcatccagctggctttggaatttgacaagcctccaatatctcaatcttgaggctaatcatttttacggtcaagttcctgatgcgctaggggatatggcatctctccaagtcctcgatttgtctggtaatcggcacatgggtactatgacaacaagc

SEQ ID NO: 3011 - DNA, 378 bp, Zea mays
gagagctcccgccggggctcggaaaggagacgccggtgctgagagatatccagatcgacgacaacaacttttccgggccaataccggcggggatctgtgagcacaaccagctgtgggtgctcaccgcccccggtaaccgcttgaacggctcaataccgaccggtcttgccaactgctcgagtctcatatggttgttcctcggaggtaaccagctgtccggcgaggtgccggccgctctatggacggtgccgaagcttctgaccgtgtcgttggagaacaatggacggttgggcgggagcctgccggagaagctgtactggaacctgtcgaggcttagcatcgacaacaaccagttcaccggaccgattcctgcatcgg

SEQ ID NO: 3012 - DNA, 364 bp, Zea mays
cggtcttgtgaatgttacaagcaattgcccaaggattcttgatgcagtggaaccacatgattgtgaagtggagaacatggaaggcaacgtcatttctgaggtcctgagtggaaatggtgctgtttacgagaatggagctaaggattgtgcaacagaagtttgtggaagtaagaatgacaggagggaagaaggtcttttccttctaaatgatcccattataagtcctagtacagatgaagttagcatgactcatagcaaggataaccatgaaaaggagggtatgattctgatcggtgcaagtgaaacgtgtgctgcttctgtaggccaacctgaggaaaattccaagatagcagaagctgctgta

SEQ ID NO: 3013 - DNA, 960 bp, Zea mays
gggcgatttcgatgggttcctttccatctgggctttgcaaaggttggggcaccgccaccgccagcaagcatcgtgggtggtgcgtcccctgtcccagcatcagcaccagtcagcaatcaggaggatggtgccgtgattggaaacggcgagggggtggacagtgctagtggtacacaacagcaggcacagaaattgcctgcccggttgcttaacattcctttgtcgaatgtggagcgtctgcggtctacgctttctgcagtttcactgacggagctcattgaattagtcccgctgctggtgagcagatcatcgacatcggcagatgcacatcctgacaagaagaagcttttctcagtgcaagatttcttcagatatgcagaaattgaaggtaacatcattttttcattttccaacagagaagtgtcttcatttctacttcttcagtatgtagactcatggtctgcaattgccaatcatgtattcattttaccatatggcaccagtagggaaatcatcaaattagatcagtcattattagtcctccacagaaggctcaaatgccagttttacagtcgaagtaattatattatgtacaatttaatctctagagttcttcaaatattcagattcaggatatgccattcatatctacaatttacagcataaaatctggtatgatgttatccattattttaccaccatatctagaaaattttggtgagctactatcaaagatatgcctaccagacattttaatttacccatgcaacaacagggggtaccatcctgttatttttcctgctagtacattttttagtcaagctacgctctatccatcatacgatcttcaaactacagttctaattggtacctcagcaattcagattctgcataacataatgcaatgatacttttgaaaaggttgctatttttatgtattagttggatcataaggtgata

SEQ ID NO: 3014 - DNA, 440 bp, Zea mays
ggtggatataatggaggatatggatatggaggtgggtatggtggtggatatggaaaaccgggctatggtggtggatatggtggaggatacaggcccaaatatggcaggggctacaggtccggatatggatacggtggcgggtatggtggaggatacggtggcggttatggtgggggatatggtggcggtggtggctatggggaaggtggaggctttggaggtgggcatggtggtggtcgctatcctggtggtggagggcaccgtggtggtggagggcaccatggtggatggaattaagaagcattgctacataaagtttctctatgtccgataacaataaatggcgacgataaatttgaatgctacatgtagttccgtgatgaaaatcttatgtattttgtataaaacatggtacatggactgttacgtatgttgcatga

SEQ ID NO: 3015 - DNA, 1313 bp, Zea mays
  misc_feature (1241)..(1243): n is a, c, g, or t
  misc_feature (1245)..(1246): n is a, c, g, or t
  misc_feature (1304)..(1306): n is a, c, g, or t
  misc_feature (1308)..(1310): n is a, c, g, or t
acatctagtgattccacagataagagatctaataattctccaggaaatgaatctgactggaagccattgaggccactaaccccgtggatcactgacatattgctagccgcacctttgggcattcgaagtgactattttcgatggtaagtaatattagttgtatttgatcttttatgtttttttttaaaaaaaaactccagcttatgttttttatgaacaatgagtatatcatggacaatgtatacaaggaattcaataaacagctagccatgataacacaagagtaagggaagggattcattatccagtccatactgcaatcatgtctgcaatactgatttcaagcatgccgctaggaatagtatgaggatacatagttaaaaaataaccggttactgtgatgtactgatgtgatgcggatacacaataattgtttgttctctgctgtgagatgcttttcagcttgtttgctgctcaatgttaattgtttgctcgaatacactttctactttgtaagaggctaagcactttattttttatttcgcatatatcaggtgtggcggtgtaatgggaaaatatgctgctggtggagagttgaagcctccaactactggtcggtaaaatcaaccaccatctttgtgcataatagtaaaaataaaaatcccattttcctatatgtagctacgaatttggattctcaatttctgcagcggaactgttctattttaaaaccccacagggataaactattatgagatcttcatctaatgcatgggtacattgcaggcagtttttttttcttttttgttggcggtgtgtgtgggaccagggtggggggcttccttatgtatgcattctttacctactcttgagcctggagtttggaggactgttttctcatatattttttcatcccttaatatagtttgttctaaatcattagtatgttagttttgtcctaagttaaactatgttagttttgaccaaattataggagaaaatattgatatttaggacaccaaattagtataattaggccagttatgaaatgattttcaccatccagttatttgatgctttatattttaaccatttttctataaacttcgtccaagttagtttgacttaggacaaacccagaagtagctattattttgggatgtaggtagtacttgataatgtttgttgtgtatggaaaaaagttctaacatatccctgtgtgattagcttgcagccgaggnnnanngaagcacccacagcttatgccttccacccccagatgggctgtgccaatgagcggagtnnnannnccc

SEQ ID NO: 3016 - DNA, 395 bp, Zea mays
tcacagtcacagatcgcgcatcaccatcagccacgccaagcaaaaaaactgcaatcgtactcgtacatgcatcgctccaggccagaacataggaggagccctctaggtgaacgactgtaccacggaggaagtggtgacgaggccggagaggaggccgaccagggtgccactgttgtaggtgctggactccgtctgcacggcgttgtcacgggagtccacgaaggtgtcgttctggaatggcccacccaccagggcgcccgtagccacgtttgggttcgggctgggcgagtggagatactcgaaccctttgcagcctgttttcgcatccgcggggatcgacgcccctctgtggtgtacttgctttgggtagctgctcccatatcccacaaggtagc

SEQ ID NO: 3017 - DNA, 701 bp, Zea mays
aggttatctgcatagtcacaacaagaagtacaatcgccttggcggtgggcagcaagaggtgagatatttatctgtttgcatttttttccttcttgcaagaatcctggtgctatggtgagagctgtctcattgagtcaccaggtggaagaaccctctccgcatttgttgggaggcttgtctagatttatcactttcctagatcttactcttgtgagcctccgacgcgtagtctgtcctacaagaatcaaaagtttcaacagtaaattgacaatcatagaggccttaggtcattctactactgatgtaaattatcttataccattatttcattgctatcttatccatgaattctatcaaataaatatttctatatgatttcattttacttgctgccatgaatgcaactgaataccgttcggatatgtcttggtgcaggtctgcggtgtccgagagaagcgagctgagaacatttggttgacagcagagggtgtttatctcccagttaacgggagcaagtgaaaaagcactttctagcatttactatttttaatgttaatcagtataggatcagatattttgccagctttcattcgtccttgtcttaagaaaaacgaacatgggacctgaccccctagtgatatgtttaagttggaatgttggatatcgatgatgtcgacaagaccaggacagcgcatgctgta

SEQ ID NO: 3018 - DNA, 372 bp, Zea mays
cctggacaaagcaaaggtgcgcgcggtgcatgcgttcattcatgattcatgcatggtttgatgcaatcgttcaagctcatgcatgtttgatgtttgatttggattgctgatgatgcccatgcatatgaacagtataatccagcaatcttgtggtatttggatctgaaattctgttggcagattggtgaaggctgggatcatagcctgcagtccaaggagcagatggaaacggtgcagaagatgaagcaggaagctgctacaaggcggcaaagggccttgtcatacgcattctctcaacaggtaaatttaagcctagcctttttcttcttaggttgatatctgtgtcgtttcatgatctctctctcaagtcac

SEQ ID NO: 3019 - DNA, 434 bp, Zea mays
ggcgacgatgccgccgcgaacggtgtccgatgggggagacgacaacggcaccgacgttgctagccgaacgtcgtcgcaccgccgcacggagcacgggcatgggtacaaagtcggcgtcccaccggagaagaacctcctcgccgagatctctgacgcggtgaaggagacgttcttcgccgacgacccgctgcggcagtacaaggaccagcccaggtccaagaagatctggctcggcctgcagcacatcttcccggtgctcgactggagcaggcattactccctcggcaagttcaagggtgacttcatcgctgggctcaccattgccagcctctgcataccccaggtcagttgagctaggtgccccagcagcagcacagttcgtgcactaacgctatctatggcctaacgacaggacatcgggtattctaagcttg

SEQ ID NO: 3020 - DNA, 494 bp, Zea mays
acgtcacgtaccaggtttgttcatccttcatgtagggagacgctacatgacactaagagtgacgcctgaatctgacggcctccgcttcgcttcgtcgatccggcaggagatcatgccggacacgagcgccgagacggcggaggagacgctgcaccggtggctgatgaagaaggacgtgaacacggcgctggacagcctgagcccgcgcgagaagcaggtgatgcggtaccggttcggcatcgagggcgggcgggccaggaccctgcacgacatcgggcagctcatgggggtcagccgggagcggatccggcagatcgagctgggcgcgttccggaagctgcggagcaagaacaggttgcagtcgctgcagcactacctgcggccggcggagagctggtagccatgtcaggtcaggtgctgcgctacgactacgatacgacttcgacgagaccataacccgcatcgttgcacatggctttccatgatgtatgtat

SEQ ID NO: 3021 - DNA, 506 bp, Zea mays
gcgagcgcgacgacgacgtcccggcagccgacagccggaggctactcagcattgaggaaggcaccccacagtgggtgaacggaccagagaggcggctgctcaaaggcaacttccaggccaaactcaagcccaacgtggtggtggccaaggacggcagcggcaagttcaagaccatcaacgacgcgctcggtgccatgcccaagcagtacacgggaaggtgtccgcgcgcgcacgcgcctgaacgcatgtttttttttctctctcatcgaaaccagcaatggatcgagattgcgcatgcatgcgccgatgaccttttcgtgctcgagacaggtacctgatctacgtgaagcaaggggtgtacgaggagtacgtgacgatcaccagggcgatggagaacgtgaccatgtacggcgacggagccatgaagaccgtcatcagcggcagcaggaacttcgtcgacggcctcaccacctacaaaaccgcaaccttcagtaagacgaaagcaa

SEQ ID NO: 3022 - DNA, 346 bp, Zea mays
agagaacgggcggaagctgttagaggaagagagattgcgcgacgggactggggtcatgatgatgatgatgatggggattttcagcgtagcaggcgctgcggcaaccgccatcatcgcagcttgtctggttgggcgcgctcgtcgcgatgtcgagggggcatggacgactgttacagttccaatgacaagcagcggcacttaactccctttcgtcgccatggctgggagtcgaagctgtcttctcgctgggtacccaaggtgaaggtccgatctgtttcttttgcagaccccatcgttaccgctgtttggccgcaggaggataaatgtgggcaagctgaggatattg

SEQ ID NO: 3023 - DNA, 739 bp, Zea mays
  misc_feature (695)..(697): n is a, c, g, or t
cctgcacggtgagttcttttcttggcgcgcgcatgcgtatgctatgcatggatgttggatatgatatgatatgttgttgatcttgatccgcgcgcaggaaaagggctgcccgtgatggattggccgaagcggatgaggattgcgatcggagcggcgcgtgggctgacgtacctccacgaagactgtaagtgaggacaggacgatgcttgtgtagttgtgtgcttgtctgtccgtactggatcactagcttgtctcttacctgcaggccatcctaggatcatacacagggacatcaagtcggccaacatactcctggacgacgccttcgaggccaaggtcaactactctgcagcacagaaacacgcgcggtgcaccatagagtagtatatccaaacgcttactgtataattattatgtgcttactggtggcgatttaatctggggaggaacaggttgcagatttcggcctcgctaaactgacaaacgactcgctgactcatatctccacgcgcgtaatgggcacgttcgggtacgtaattaagctagcagcgcgttgtctgcgtaattaagctagcagcgcgttctttataccagtaacattctatttctattgctctccacacaggtacatggcacccgagtacgcacagagcgggaagctgacggacaggtccgacgtgttctcgttcggggtnnngctcctggagctcatcaccgggcggaagcccgtagacgcatc

SEQ ID NO: 3024 - DNA, 317 bp, Zea mays
acagagagaccgcgagagcttggccaagaggaggtccaagctttctgccgcttccaaggcttccgctgccatcgccgcttaagaatgttcgatgctttgagatgtttcaagacctatcttgttacagcttaaataccttatgctactctgattgtgttgcaacttgcaactgcccctgtacttgatagatttgtattagatgctcaagctacagagggtaggttcctaattatgaccatatgactatgtactaaattatatatctgttgctaagttacaatacatacaaaataagtttactccgccctcttgtagaa

SEQ ID NO: 3025 - DNA, 570 bp, Zea mays
cgagtccacgagatccatggctctgtcgtctatccacaagctccatgccttgatgatgagccgacgtgatcagatcttacaggaattaatcacaaagcttatgtatgaaaacaaacaaaatttattaggccggcatagcaccaccgcgcgtgcacttacataagctagcaggttagggaagccattgcaatgggttaaaccgatcttcaggccacttatgatctccaagactatgacgccgaaactgtacgtgtctgacttgacagaaaacacgccgtccattgcatattcaggtgacatgtaaccgctgctcaaaaaaacaaacaaacaaacaaattaaacaatatgagaatgctcaaaaaaattcagtttgaaaatccaagtctatgatgactactcactacgtcccaacaactcgattggtgttcgcttcatgctggtttccaccaaagattcttgccatgccgaaatccgatatcttggggctcatatctgcgtccagcagtatgttgctcgtcttcaggtctctgtggattattgtcagccttgagtcctggtggagataaagga

SEQ ID NO: 3026 - DNA, 339 bp, Zea mays
  misc_feature (335)..(335): n is a, c, g, or t
tgagcttagtccctatgtgtccgagtttgtgcttcttgaatccaactcaacctttactggcataaaaaagcccctccacttcaaggaaaacaagcaccgttttgggttcgctaaatcacggctgacatatggtaatattgggggaaggttcgtgaagggggagaacccatttgttgaggagtcatatcagagggttgccctggaccggcttcttaagcttgcaagaatagaagacgatgacctgctgatcatgtcggacgttgatgaaatcccgagcggccacacaattgatctcttaaggtggtgcgacggcattccagacatacttcaccttnagct

SEQ ID NO: 3027 - DNA, 707 bp, Zea mays
  misc_feature (557)..(564): n is a, c, g, or t
gatcatggtggaccctctagactatataaaaaattctatgatatgcagcagagcagattagcactttgtaggtaaatgatgatttgcattgaaattagttttaaaaatacctaagacactaaataatatacatcggtactctgatcatggtggaccctctagactataaaaaaaattctatattatacaatagagcatattaatacttcgtaaataaatgatcatgtatattgaaattggttttttaaaaatctaagaagctagataatatacatcggtacaaattagcacttcgcaggttgaaaaataagaacgacgatagctgaataacctaaattctgattgctcgaccatgcgtgtctggaggctagcgcagtggtgctagctccgtggaatcctagagggttggatcgacgagatggcgaacgacgatcacgtggagggtgtggtctcatagacgctcggggacatgagcgtgacgactagtcagtggggcaatacgtgccacattgtccgtgtgcgcggggcgtcagtgtgtccagccctaccgccatgtnnnnnnnnatacaaacatttggatcattatccattaccacccctaacaacgacgtgagcatgacgactgggcagtgggcaacgtgtgccccgtggtccgtgtgtgtcgagcgttttgtgtgcccagccctaccgccatgttggctacctat

SEQ ID NO: 3028 - DNA, 898 bp, Zea mays
gtgctattttgggaggaagattcggtttgtactttcaggtggagcacctctatctggagatactcagagatttatcaatatatgccttgggtaagattatgtatgcctcatttctgttgtttgatggcaattatcttgaaatcctatgttcccattgcatgcatttaatacgataaatatgttatgacttcctcactgtgtttgcagtctgacattgataaggtttatgcaatttcagggctccaatagggcaaggttatggtctgactgaaacttgtgctggagggacattttcagagtatgatgacacatctgtcggtcgtgttggtgctccactaccttgttcgtatattaaggtcagcttcatttcttaactacataccgatgatatggatacaattttttgtagcaaagctgtttttatcacgatgttatctgtgtggatctattttgtattttttatgcctaacaatgtttgtatgttgaaatcttccttagttattggttgttcttagcttcaagattatttacatgcacccgcttagattttttttgggtcttgttcaacttctttcctcactgggtcactgggatatcttatctattcttgtgacagtgaatgagttcttactgttgacctcccacagttcctgacttcctgacatatcagccactgtatttttagttgattgactggcctgagggtggatacttgactgctgatttaccaatgcctcggggagaaattgtcattgggggtccaaatataactaaaggctatttcaagaatgaagctaaaacaaatgaagtctacaaggtatggtgttctcctaccagtatattcatagattgtttcaggcattgaactttaacttcttcacactttctgtaacaataa

SEQ ID NO: 3029 - DNA, 411 bp, Zea mays
  misc_feature (161)..(162): n is a, c, g, or t
tgaaccaccatcagagattgcagaggagcacgatggtttagagagtgttttagtgcctatgcaggggattgtggttaatgggaaaagtacttcagagctattgagtggctctgtatcattgaggtcagctgaggtggggatggcaagcatgatgtgtcttnnttttttccttttttgcaagtttttcagaaaaataatttcaattttcctatacatttttaggtggttggatcacctgttggacgaattgtgaagtgtgaggagtttctgaaggctgcaggacctgttatggtatgtaatatatgcatattgttcgatctacattttatatcttgtgcaatgccgatggatattaaaatgtcggttgtatttatagcctgtgttagggtagtgtcaaccccaagaaggatt

SEQ ID NO: 3030 - DNA, 308 bp, Zea mays
caccagtgaaagagtcatatgagattgcccgtgccaccctcaagatagcagatgagcttacgctatcagccagagtatgtgtaatgtggccacgaggttcgactgatgctgaagtggaagagagcagatccgagttgacaccctggacaaactacatcgatgtcgaggaagtgcctagggtgtcgggtggttcatggtgggagatgtgtcgtattagtaggaagagtgtccttttggttaggcctgatgagcacatagcatggctaacagaactggacagggtgagggatgctgagtcagaaattagg

SEQ ID NO: 3031 - DNA, 643 bp, Zea mays
tttgcgtcgttcatggtttggctgacgcatacagagacactgactgaaggaaaaacaatacattgcaggaagggacacgcacctgatcgacaagatcctcgacccgtcaaccctcgacgggatggtcagcacgttcagcgacctccagcggctgctcaagtccacggggacgtcggctgtcgcgtgggtcggggaagccggaggcgcctacaacagcggccgccacctcgtcacggacgcgttcgtgttcagcttctggtacgctgacgagctgtccggtgtgtcggggttctgtggctgttcttggatatgtgtttgttttgagtgtttttttttcttcttttttgcaaggtttttagatcagcttgggatggcagcgaggttcgacaccaagagctactgcaggcagagtttggtcggcggcaactacggcctgctaaacaccacgacgttccagcctaaccctgactattacaggtaagaacaagtatatagtacgtataaacacttgacgaaaaaaacctagccttgtaacaccgacgaaatggacttgtcttgtttcaaatgacacaactcctcccgattttctctgcagtgctctactgtggcatcgcctcatggggaccgaagttctagcagtaac

SEQ ID NO: 3032 - DNA, 389 bp, Zea mays
cttttcttttctctcgggttttcagtgatggagaacagttgcattcagaatcaagtcctgacatactttgtgtgtgtgtgtgttttcattcgagttccaggataactgcaaaggcgccataccaacaagtcaacagctctgttgttggcgtcgaggcgtccaagcaggcggctggagctggggtggaaaaaccttggctggggctgggccaagaagcgacaacagcgaagctggagatgtgatgaatgttgcccgacaagaaggtgcagtgcacgagattcacggatggtgcaggtcgtagcttcaggttaaggtgaaggataacttaccgtcgggtactctactcactttactgctctactactactactgctggtgacgaagttagc

SEQ ID NO: 3033 - DNA, 353 bp, Zea mays
caccgtcggcctaccgctgcgcggcggggagggacgtggacctgggcaaggtgtcgccatacatcagacgctgcgtcgacgttaagtacggcataaatcttgtcaatgaaagcagcggacagtggtaacatttgtctaacaaaaatggctacatcatagcgcttagttgcaaaaagattctcaaaatttaagcactggtattttccaaaacaggagtcgacaggtgattcaaatgtcaggaatccaaagttctttgagacattgcttgtgatggattaggcaagaatttaatagctacatcattccaatttctaacaaaccagcatctgttgatgcagtgaaatctcagaagc

SEQ ID NO: 3034 - DNA, 770 bp, Zea mays
tgttatctgtgaaaaatgttatccacgttatttaaaaaaactattactactgatatttaatggtttcccttattcattcctaaatgcagcatacctttttcacttgaggatattacaaagacattgccagtcattgaggttgccgatacgactttctacatttcatccataaaaacctaggctttgcgtttttattgcaaagaggggagtagttaatttctttctcatcatggtgacttcacccacctgtggataagtcggattccagctagctcagcactgaccccttcctcgtatcatgtgtttacacacgcctgactctcctgttgttaagctagaccaaacccgtctcttgtaggtcctgttggtgctgaggatcctctaaaacaacatgtcatcgtctcagttcgagcctgtggtaagataaggagcgctggtagcctgatagctctccattctctgaagctaaagcttccttttagctcattgtgtatttgctctgctttcaagagaaggttgttgtcaatgtatggtctgacaagagctttgtctagccaattgtagagcttgataccttgagacaacctggcaagtgagttgcagctaacacacatggatggacattttattcaagtgtatcataaaatttattatatattgtgtagaacttttttgcttatggtgatgttttacactgctgccacactaatagtcatgtccttgattctttaaattctttgaccaaagcatgtacaagccgctgctactat

SEQ ID NO: 3035 - DNA, 250 bp, Zea mays
ctctcttctctgatgagaaagagatgatgagagagggtgatgcacgtgttacgcttctaagaagcaagctccatggcctggtcgaaaggaaccgagatctggaagaggaaaataagcaattgagacaccaagtgagccaattaaaaggtcagatctcctctctcgaaggccaggaaactaataagaggatgctgtggaagaagctggagaattctgcaaccggcatcagctactccaaggaaaagcagtt

SEQ ID NO: 3036 - DNA, 396 bp, Zea mays
tgaggttcgtctttccaattggttgtggaaaaataggatattataaaaagtacttcactactaccatgattctgaggtggcgtataacatattagtgtctgaaatctgaacgcaaagaataattctgcgtgttaaattaaaatgacgaagggctatgattttaatttttggaagtttcttttcggcacatattgtcatttcattggccagtggcattactaacaccacgagtccctttaagtttctgttagtgtactctttgttagattctagcattttctttattgaaagtgttatcctaaacggtaaacagaaacagtcagccatttaccgtttagccattatttggcgtaaatggccatataaagttaggtggtttgagtagtacttatccgg

SEQ ID NO: 3037 - DNA, 359 bp, Zea mays
gagtgggcgagggcagaggagggactgtatgatgaagacgaagaagaggagatgagggccaagaaggagctgttgtactgcgcggcgtgcaataaaaagttcaaatcggacaaacagtggaagaaccacgagcagtcgaagaagcataggaataagattgctgaactgaggaaggcctttagggaggaggagtctttgaaaaaggcagaggagggggaaggtgattggaatgaagttgatatggggttcgattttaagcctacacaggagtcagatgatgcgagtgcattttcagatgctgcagaagagttagctgaagaatttgaaagtaattatgctggcaatgggcatcatggtaa

SEQ ID NO: 3038 - DNA, 939 bp, Zea mays
  misc_feature (477)..(481): n is a, c, g, or t
  misc_feature (501)..(507): n is a, c, g, or t
  misc_feature (516)..(517): n is a, c, g, or t
  misc_feature (559)..(559): n is a, c, g, or t
  misc_feature (573)..(575): n is a, c, g, or t
  misc_feature (604)..(606): n is a, c, g, or t
  misc_feature (647)..(652): n is a, c, g, or t
tcacactgtctgcttaaagtttgcatagcggtgtcgtttattaatcataacccattatggcaatgttgaaaactattgaactacgctctgttttaaactggttctattgtacttaggggtgacaatgtgctctaaattttacacaataagatttaaagataataagatttaaagatcggataggatcgggccatatttttattcatttttgaactaaaatttatttagggccctactattttgtgaaaagcatttggatcgcaatccattaccacccctaattgtactcaatgcagaactgttctgttttattaagatgatgtgattttttttggttctatgttgatttttccagcaagtggttgtggttatgttgtcattttagttcaatgcttgaatgtttgttcatataccatttcacttttgaacccctcccactgacactatcaactataatggactagtaaaagaggcatnnnnntgaattattgaaatgtttcnnnnnnnactgaaaannaaatctaagatgtttcacaagatgtgaccgaaaccaacttcntaggacagtacatnnntatccatcttataaatgatatttgttgtnnncgcttaccggtaattttcttgtccactagcttatcttgatnnnnnntgttcttctcagtgtaattagggtttactgggtttcgtgggtcagcctctaagaagtaagaacacatggtattgtgattttcaggatcaagctcccctctggtgctaagaagattgtcccaagtagctgccgtgccatgattgggcaggtcgctggtggtggcaggactgagaagccaatgctgaaggctggcaatgcctaccacaagtaccgcgtcaagaggaacagctggcctaaggtgcgtggtgtggccatgaaccctgttgagcatcctcatggaggaggta

SEQ ID NO: 3039 - DNA, 388 bp, Zea mays
tcacgaccgcaccgggtaattttctttctgccgccgctaccctaccaaatcacaaagaatctgcaaatttccatctcgtgcgctctgttacgcccagttgtagtaattgtttccgttatggtggcaaaatattgaagtgtcaacatcagtgtgaaggatataaccgtctgattgttgtgagttgtgtttaacgccgtcaggcgcccatccatgagctgattcagagatatatatttttttctgaacttatgattcagagatagttaaaacctgtaataaggatgaaccttattgtgagagaaagtaaagctaatttattttgactttgattgataccagcaaggtattgtttattttgacctagattgataccagcaaggtgttgatg

SEQ ID NO: 3040 - DNA, 330 bp, Zea mays
atcaagccaaccctctcccttgtagggatacaacaatatcttacgctttgggacaccctgggtgagatcgtgctcactcttcaggaggatcaccatgtgtggagattcgagtcttcgggccttttctcttctaggtcctgctacaaggttctgtttttgggctccatcaccttcgaaccttggaaaagactttggaaatcttgggctcctcctaagtgtaagacctttttatggttagccatgcagaataagtgttggacagctgacaggctgcaaaaaagaggtcttccccatccggaagcatgccctttctgtgaacaagagcaagaa

SEQ ID NO: 3041 - DNA, 342 bp, Zea mays
cacccgcttcaaggccttcgtcgttgtcggcgatggcgacggccacgtcggcctgggagtcaagtgcgccaaggaggtggccaccgccatccgcggcgccatcatcctagccaagctctccgtcgtccccgtcaggagggggtactgggggaacaagatcggacagccccacaccgtgccctgcaaggtcaccggcaagtgtggctccgtcaccgtgcgcatggtgcccgcgcccaggggttctggcatcgtcgccgcgcgcgtgcccaagaaggtgctgcagttcgctggcattgaggatgtcttcacctcgtcccgtggctccactaagacccttggcaa

SEQ ID NO: 3042 - DNA, 367 bp, Zea mays
taacgaatcaacgtggctattgacagaatcgacggtcgacgatgccgaccaccagagccgaccataacgagcacgacatccagggcacggcaggggatgacagcgttgtggtgaacaggaaatcgacgacgggcacaaaaggcatgacgctgggcataatgaaacgacagcgtgcccagatctcgtgtcgcccgaccatgcccgcaaccaatacccaccacgcttccgctgcgcacagtgatgcgacgaccagggccatggcgaacaaggagctgggcaggttcgatggccacagacgagcgcagatcggcgcgacagagacgaagaccaggcgtggcagcaggaagggcgcgccggtgagcagaga

SEQ ID NO: 3043 - DNA, 370 bp, Zea mays
tctatgaagaatgaaacattatgtctaaactaacataaaatgcttttgtgtagtgcataaaaatgatcttttcctctgatggggtgaagttcttttcctactatattggtccatgagttgaggttcttttcgtctcatgttctaacctacaaaaaagggaaaacacattaaagaacttgagtaggaataaccaaacaagtaaaaaaccatatggattacttgcattacataatctaaaatacacctgctaagtacttagtccctccagtgtccgcagtacaaccataagtgttgaaacactaacaagtcacagaagttcgaagtcataagtgctgaaacactagaagacaaccataatccgttaacactg

SEQ ID NO: 3044 - DNA, 748 bp, Zea mays
tccactgcctcaactagtgttaccacctatggttcattgttgtgtctgcttcttgtagcactgttggtctacaaacattcatatttctctcaacatctggcacaggtaagcccataagccctaaccctagatctccatatttagttatttcagttcttgatgagcaaatatgaaactaaatcagtttgctaataagaaatttaactacttttcctcttgaagacctcctatccctatatgaacccacatccaaaacccctctagcaaagtgtggctagctttcccatgccatgaaccttcaacaatgatagtatcagtaatgcacttccataaaagggttcatatttaattttagtttttatttttggtgttttaattaagctttgagacttgatttgaagtattaaataaacccttcaaatttctttctaactttgataatacactattcaatgacaatgcacttccttaaatccctatacttcacagcatgccgccttccaaagcacgccgaaagaggtcacttcgtgatatcactgccaccgttgccactgggactgttgccaactcgaaacctggctcatcatcgacgaacgaggggaagcaacaggacaagaaaaaggagggtccacaggaaccggacatcccaccattaccgccggtggtggtgaatatagtcccacgacaaggattaggatgtgaagtagtggaagggctactcgtgcctagtcggaagcgagagtacaag

SEQ ID NO: 3045 - DNA, 306 bp, Zea mays
aatccgagacatgacgctaaggtcaaggaattgcttgtttcagtgtgcaatgctgcggttgagactttggtgaagaccactcaccatgccctgtacagtactaatggcaacttgggtgcaaatggtagtgtcagtggcaatgccaatggagctggggaagggtgggtggagacggtgtcgagcacgttggcagttcctagcaacaggaagtttgtgcttgatgttacagggagggtcacatttgagacagtgcggtcatttctggagtttgttctttggaagctgcaggatggggcaaggaagggc

SEQ ID NO: 3046 - DNA, 716 bp, Zea mays
aaaagaaatagcatagaagcaactatgtttggtgccatatatatcactatggccaatatgtacaaagatggctgattctgaccatcaccaagccaactttttattgttcttgcaagtccagtaggattctcccaagtgtacgcgtaagtcacaggtaaaatcacaacccatgcagcagcacatattaacttcaagatatatcgcagcttgactgcaaatgacatgtttcttcttgctttccaaccaaatatgaggtctaggattgctgtcacatacataatagattcattagcattaattaaatccttcctcagcattaagacacatatatgcaaatggaagaaaatgataattatttcggaaacaacgatgaacaaagtttttttaaggttcatggctttatggcagtcacccagccaatatttctctggagtaaaagcaaaagataggcaaaaaactgagtagggttcagggtatttcaatgagcaggacaacttaataaggtacatgatgttgtgcacaatgcacaaagaccactagagagtaaaaagtgtaacaagattgccatgtagggctctgttacaagtagcaactactgagatcccaactagggagtgatatggcaaatatgtaaacagggagatgaacggaatgacgggagtgtcaaataccttgacccaacttcaaaattgcagcagtaataaatatgctcaaaa

SEQ ID NO: 3047 - DNA, 486 bp, Zea mays
cgatcgagttacccttagttattagacagacatggcttcgttccggaccagctggcattgcttgctcgccgcctgcctgttcctgctcgcttcggcggcgcacgggcagcagctctcgtcgtccttctacgcggcgacatgcccgacgctggagctcatcgtgcggaccaccatgctcacggcgctcctcgccgagcgtcggatgggcgcgtccctcgtcaggctcttcttccacgactgctttgtccaagtacgtacacgccattaacctatatatatataccagcatgatatgcagtcgtgaatgaatgaatcattcgcatatataatataactacgtatatatatactggcacgccaccatatatatataccagggctgcgacggctccattcttctggacgacgtcggcagcttcgtcggcgagaagggcgccggccccaacgtcaactctctccgcggcttcgacgtgatcgaccagatca

SEQ ID NO: 3048 - DNA, 380 bp, Zea mays
gaagcttttgcctgagcagtggtgataacttgtcacaacctgtcaatggctccaatgacggaaccactcctttcttcaccagcaccccaaacgcactcctcacacagcgtgcaatcgcctccttcctctgcacatcatagttgtcaatcagaagaaacaagaactcaagcagcatgttcgtgatatcagcgtactgagacactgaattcaccatcaggagcatagcaggttcaatattcatgacactacccatcccgtcctcgaagaacaaccagtcatagaacagcgccagcttcacattcgccacaacataacccttgctgcaactcgtcagcagccaacctacaaccgcccagcgagcaatgacaccagatttcatg

SEQ ID NO: 3049 - DNA, 293 bp, Zea mays
tcctgttcttccgctccttctccccacctcgttttggctgatcaaagttcttgttcgcgaacactttcctctgcctgacactctgagttcttggttaatgagcctgtatagacccatcggccatcaccagttcactactcgccaatcgacatgtcaggacagagctcaagctcctatggtgacactgatcctggcacagacagggcatacagcaccacctccagcagcatccggtggggtccgcacggccgcggcatgacggcctgcctcgtcgtcgtcaatgtcgtgctcgt

SEQ ID NO: 3050 - DNA, 463 bp, Zea mays
ctgcacctcctgtagctgtagcaccagcggcagagcattccgacggcctactgttcgacggccttgctctgggccacggcgacgacgtcgacgataaggccgaggcggaccgcgacgacgcagcgaccgtgaagctggagtggctgaggtcgcagatcatcggcgcggaagcagagttcgcgtcgccgttcgggacccgacgcatcacgtacgcggaccacacggcgtccggccgctgcctgcggttcgtcgaggagttcgtgcttcggaacgtcctgcctttctacggtgagtacacagctcctgttttttgtttccttggacaaacgaatacgcctcggtgctcatacgtgcgtgtgggtcggcgattggctctggagcgctgcagggaacacccacacgacggacagctacgtaggcatgcacacgagcaagctggccggggacgcggcgcggtacgtga

SEQ ID NO: 3051 - DNA, 202 bp, Zea mays
  misc_feature (178)..(191): n is a, c, g, or t
cgacggctccgcgcgctgccggcttgctgttttgttgcgcagtgagcagcacgccgtgatgcccgtcggtggtttgctgtttttgcgcagccccgtcgtcgtcatcgttcaccccggggagaccgcgtaaatccttgttcgattccgcatcgacattatttttctatgattaattatnnnnnnnnnnnnnnttgttttgttt

SEQ ID NO: 3052 - DNA, 473 bp, Zea mays
gttgtggccgaatatggtgatgtgtttgatggcgtaagctcactgcttgatgttggaggaggggatggtagcacagcgaggacaattagaaaagctttcccacatatcaagtgctcggtgttggatctcccaaatgttatcattgacatacaaccaggtgatggcatggttgactatattgcgggtgatatgtttagctcaatcccaccaactgatgctattatgctcaaggtttgtattttatagctattcaacaatactggaataaagggttaggatctattttcttcatgttaatatatctgagtacctaattggttgattcttactcttaccacagtatgtgctgcatgactggaacgatgatgattgtgtcaagatcctacaacaatgcaaaaaggctatatgttcctgcaaaccagccggaggaaaagttttaatcatagatgtagtcgttggatctccattgaaag

SEQ ID NO: 3053 - DNA, 932 bp, Zea mays
gagagtttggtggaagagatgcacacctgaatgtaagttactactaatatactgcaaattaatattcagtatctgcttttcctgttagttgattgattccagttgctccaattttatgtgctgttcattgatcttttttgagctcacacctgtaattttgtgaatggcatattggcatatgccatttagcacccacaatccgctttcttttggatataccacttgaacttccttaactaaagaaaaaatattttgaccttcagctgacaatttttttaaaaaaacaatattagacaattcattatgacctgcatgcctcaatgcatacactccccagatccagttttgattcttctgcgctatttcatgtgccaaatttttctatggagtttgtctaaaatggcaacatgctggttcccagttatacattggtcttaggctcttagcatatcattgatccttttgtgtaataagaaattagggaatctactttcacatttagattacaccaaatttatggaagctttcctttacctcaacatcgtcccagaaattcttttcccagcgatatacatgggtttcgtctatatgcgctaagtcactgttatgttcctttcagctgttgcgttagccctttgccagtcagacccggtactgaatgatgggcatggtggcagcgattcatctcggggcaatgtcttcgaaggtgttcgcaggaagttcatagagaaggttgtggcccagcatgaagagcgggaagaagaggacagtgactaagctaatacttgtgtttgttttccgcagctggcggatccaatttggttccaatgtttactgatcttatgtgatttttgtgggtgaaatttgccagagttttctgatacctggctgtgcggctgaagtttttgaaagttcacgggtcttattgccta

SEQ ID NO: 3054 - DNA, 388 bp, Zea mays
cttctgttgcagccattccaggtcttgcattgggtggtggcctagagttgactatgagttgtcaggctcaaatacctactcatgttgctcacaccatctgctcgcttgttaacaacgttatggcatcgcaggctcatgtcgtcggacaagggatcgtagaccgcgccgcgttcagtggcgatcaccaatggatcgtccaaggtactgccaatggtcacgggctctcctccaaggttgctgctgaggtgaacaatcagtttagagttggtattcagactactgcgattattcatgtgctgccaaggggtgtcctacagtttggctctactggtttggctttgggaaacaaaaaaattgtgatgtttgcaaagacgttgtgttctcagct

SEQ ID NO: 3055 - DNA, 367 bp, Zea mays
atcagcaacaaagttggcaaattggctgggaattcagacccccaaaataatagcaaaggaacactggacacccatattctggccagcaaaagtaatagcttaacatatttctagtaaggatccaaaatagtcaacagcatttgcaataatgtaagtaaataaaacaaataaagaaatggttagcattccaatgaggtcagaggaagaatacaagaaatccttgcttcaattagttgttcactgcatgtactgcttagctgcaacagaagaaattttactatagtcacaaactgtcagtagataaactcagattatctacacaatacccagtatctttaagtgaccaaaactatgtagcagcaactgc

SEQ ID NO: 3056 - DNA, 421 bp, Zea mays
atgcgatatgatatatgaagacgctaagcagccttcatattcattcctttggtcttattatggtatggcttgtttttgccatgcatgcatatgcgccagcccagcttcacgtacatggtggacagtaacagtagtggtccttgactccttgttgcagcatcgacgatcgatcgagaggagccgccattgcagtcggcggtgtcgctagctgccgagctcatcatcggcggcggcagggtagtgcagcagggtctgcgtgcacaacagccttggcgccgccgaggacgaacctctccatggcgtcgatgacgtgccgtccatgcgcgtacctcgccaggctcgccgcgttgctacttgccacctccagcagcaacctcacctgccgctcctccgccgtcaccaccatcttctggatcacaaa

SEQ ID NO: 3057 - DNA, 776 bp, Zea mays
ttgcatggtgagaatgtttgcccattttttcacggtgaacctttgctgacttttcattcatgattatttacatttcaatttatagcagtgatattgaagatgccggtgattgcaatgataaccttgtgaaagcaccttcatcaaacaacgtaacaggtaatcactcagtaatgaagcagtcatattgtcaatgcataaacaccaatgtttctgagactatctgtgtaagatcttgaaatccttttgaagacgccttacctgattggacaaaatcttgtaaaagtcactcataagttaaagctaaaaataatagtggttctgaccagcagtcttgaataattaaattgctagtccaattctgcatgacacttctattctgttgatataatgttacttgctggtgaaaaggttttgttcctaattttgcgaaggatctttgtccattccatgtttgtatttattgcattaatccagttctctacatttatgtagccaactttaagaaaaagggtaagagaacactggagttggtgaatttgcagaatagctcagatttaactgatgttgtcacaaaagataacgtaagtcgagcgaacaatgcatgatttcatttgtatcatagaattatatataattttgcttttgcacaggttcgacagattagagcaaggaaggtgccagtgtaaacagctactcacatatgatcttggtatttatgtaatttccgtccgatgtaaataaatacttagttctgaaatcatttatacatgcatatc

SEQ ID NO: 3058 - DNA, 314 bp, Zea mays
ctcgccgacgagtgacgacgaccatcccccaaccccacgccgcggagccgcaccaaatctcaccccgcatcctttagggttagggttctgcccgcacctgtgaattccgttgcgaaatctctcatctcctgagtcgagaatcgcagtttcccgctcggctcgtttggggaaatcggttattttcgtccggccgcgtgggctctctgaagcgtttgggctgtcggctatttgccccgagttttcaggtaagaaatcgcgttcggtctggaatttagttttttttgctgacttctgacaagaaagctgcgtttttt

SEQ ID NO: 3059 - DNA, 957 bp, Zea mays
  misc_feature (473)..(484): n is a, c, g, or t
  misc_feature (493)..(495): n is a, c, g, or t
  misc_feature (500)..(507): n is a, c, g, or t
  misc_feature (515)..(533): n is a, c, g, or t
  misc_feature (546)..(954): n is a, c, g, or t
tggatggtactttgtttgacaacgctaacatcatgctgtccagaagggaattctattccacagctgatgttctgcaaatattccagcaggtcagttatttgaggagaccagaaggctattatatcatcgaacaagtttcttggtgatgtcattactatttttgacatttagttaatggttgctttcatgcaacaacgctatttgctgagatcaatgtttagttttttttactgtgaaataggttatcatcaagtccctcgtaatatttctaaactcaaaactgttggcgggaaaactacgatgtaaaataattattagagttgtgatttcccatattgatttatgttgggctaatagtaactttgttgattattagatcacatgtttcatttttttcttcgagtcgaatctagcccattggtagcaacgtgatgtctgaatgttaaactgggatgcctctggaaattgtacannnnnnnnnnnntttattcannnttatnnnnnnnntataggcnnnnnnnnnnnnnnnnnnncttggaacattgnnnnnnnnnnnnnnnnnnnnnnnnnnnnnnnnnnnnnnnnnnnnnnnnnnnnnnnnnnnnnnnnnnnnnnnnnnnnnnnnnnnnnnnnnnnnnnnnnnnnnnnnnnnnnnnnnnnnnnnnnnnnnnnnnnnnnnnnnnnnnnnnnnnnnnnnnnnnnnnnnnnnnnnnnnnnnnnnnnnnnnnnnnnnnnnnnnnnnnnnnnnnnnnnnnnnnnnnnnnnnnnnnnnnnnnnnnnnnnnnnnnnnnnnnnnnnnnnnnnnnnnnnnnnnnnnnnnnnnnnnnnnnnnnnnnnnnnnnnnnnnnnnnnnnnnnnnnnnnnnnnnnnnnnnnnnnnnnnnnnnnnnnnnnnnnnnnnnnnnnnnnnnnnnnnnnnnnnnnnnnnnnnnnnnnnnnnnnnnnnnnnnnnnnnttt

SEQ ID NO: 3060 - DNA, 187 bp, Zea mays
tcaagaaaattataagtagcacggttgctgagtacgttcaaaaggtatatgttattccacaactctctgaagctaaaatgtaaaattgttggttatgcttctttgacgaatgtttgtatggggttcggtattatgtggtgttatgcaagggtagtttctattgccatttttttggtttggggggggg

SEQ ID NO: 3061 - DNA, 366 bp, Zea mays
ggcacagccagtgataactgtcaacagtcagtctatttaccgcgtctgctgcctgctggctgctgcctcgccccgcgtgaatcaataatcattgaatccattctaccgctgctcctcctccttgctctgccgagaagccggcgatgaggggccgcaagaggcagcaggtgagcgccagctcggccgccgcgctggtgaaggggagggagagcaccaagcagaaggagaaagaagctaggaaggagaaggaggcgagggaggccggcagggagccggcggcgaaggagaggcagatgaggcgcaaggccgggaaggagaaggagacggagacgggcggagaggggaaggagccagccaaggagaagg

SEQ ID NO: 3062 - DNA, 862 bp, Zea mays
gatttcagcgtcaaacaaaatgctaaaggtatgttcagtgtatttgaactttgaaacaaagcggtataaaagagttcttatcatttttgttcaattatcatacaattttaacgtctttgtctcaggaagagtgccaaagggtatcgacagagggacagaacatgcgtacggaattgtctgaaaaatttgatcatgccataaaggttgacagctcaaaatagaaaatacatcatctgattatgatatatgatagatatgtacaagttcctttttttttgcttgtatgtctaagttttagttttagctcttatttatcaaattgtcatgatatttctgtagggtgtcagtgccaaacttgaggagcagagagttgagcgcatttctcagctagaagagaacaatacgtaagatactaaccttatttatattttgaatattaggagtccaaccaattagtccattttgttagcaactcattgtcaaagtgccttttgacatttctagtccggtacactgacagttgttgcttttgtaggttgagaagtaaactgaaagaccttgctgatcaatataacattactcagcagaaatatgctcaccaagtatgctatttattcctatgtattaatagatcttgaggtctcattaatatttgtataacaatattgctcttacagtcttactagttttaaatgttatttgttgcgctcttggttaacttgttatggcatgtgtagttgaaagagaaaatgctggaacttgagcttgctgatctgagacttcaacaacatcaagagaaggctgctcaggaacatacacaaatgcagttgtatgctgagcaagtttctcagcttatgactac

SEQ ID NO: 3063 - DNA, 812 bp, Zea mays
acactggtactctgaaagttcctcacatgatgaccagccaatcacagaatctgcactccaggatctatctttgggtgacaaacaaggagacagagaacctgacaaggtgctgcgctatcattctatctagtcattcaaaattgttagttgagatatgtgacttctttgacacctaatcataagtatctaaaccacttgcaattcttttcaagatggactacattcaattttcatgctagtagattctgatgcgtgcatttttttatttaaaaatatggaacctttgttattcttttcaagatggattacattcagttttcatgctagtagaatctgatgcgtgcatttttttatttaaaaatatggaacctttgttattgcacccttttgatgagaaaccttgttatgtgcagccacagagaagctcaatgcgagttgcagataaaaagcgcagtgcatctgaaaagaactttagtctggatgttcttcgcaaatacttctctgggagcctgagggatgctgcaatgagccttggtggtgagccctactgtattgttacgaagtctctgttaaatctagatttgctgtgacattcacagtactgattactgaagataatgccatcattgtagaagaatttcttagattaggagattatggaatgaactgcttcttctgacacttgcctataaacaccattgcagtttgtccaacgacattgaaacgaatatgcagacaacatggaatttcccgatggccatctcgaaagataaacaaggtcaatcgttcattgaagaagatagagaaggtca

SEQ ID NO: 3064 - DNA, 577 bp, Zea mays
tctttcaaagaaaatttgatctttacggaagcaagaagatccaaaaacaaaaatgatattgctggatcgatcctgtattcagttaactaatataaatgtatgcttggcaggtgcgctgatttcggctctctcccctgtagcaaatcttgttctgaagagcgtgccccgggttagtgaatccgagcacccagctagtaaccctctaaagcatagtcagtgtcatgatcataataagaatatcatctgatggacactgtttgtagggggctgcaactacttgttacttggcattgcaccctaatgtcaaaggtgtatctggtaaatacttcgctgattgcaatgaagcaacaccgactgctgtcgcgagagactcagagctggcgaagaggctatggtcgttcagcgaagaacttgtcaagatctatgctgatatgtcacagacgacacaggcaagcgaagaagaggaaaccacggttacgaaagacgttttccaagacaagtagcgtaatatatgttgctgcgttttctacgttttgtacctgtcctctgggcccgaatggccagtgactgtaatagc

SEQ ID NO: 3065 - DNA, 343 bp, Zea mays
gctgctcttcttcctcagccttgctcttccgctgcagcctatggtcgtccgagctgctccgtcctcgtcctcgccccgccgtgactgcccgagcaagtgtggcgacgtgagcatcgagtacccgttcgggatcggccctggctgcgcgatggagaaggggtttgagcttcactgcaacgagtctcggtctcaggacggccgccgaagcagcaccgcgtacttctctgacggcgacctgccggtactggccgacatactgctgctccacggccaggtccgggtgatgagctccgtcgcctccatgtgccccaacaaccgctcgaccacgtacctcctgaacctc

SEQ ID NO: 3066 - DNA, 278 bp, Zea mays
gggggtgcgtttatctgcatttgatttgatgagcaatactcaagctgggtaaccatgctttttatctggctgtaataggagtagcgagtgagagaagtctggaatgatccatatgcttggtgggtaatgagtggtctgtgtagcttcaacagaaatgtttgtgaaagttacggtaagaattactgtgcacgcacgcgtggtggttaactggtttatctgggcgtgtgctatggagcctctcatgagtcatgaaacgaatcgttgtacattgaactagc

SEQ ID NO: 3067 - DNA, 346 bp, Zea mays
cagaagtatgttaccgaatattgaaccaatggaaggccttgttagagatgaattcctttgcagatctgcatgcatttatagtttcagtctttcagaagtaacattacaacataatgtcccaattaaatgtcatttgacacttagcatgtaaatgctggtaactcaattgaacaattaaggttactgaaaaatgtctgcttgcaggattcaacactcaacttctcaatacggcaacagtgtcatatgctgttaaggattaagggggcaaacctgaaatttttattgctttcaccgcatcgaagtttttgtacgtataccccacaaagctcagatctttggagttcag

SEQ ID NO: 3068 - DNA, 392 bp, Zea mays
gccacccgcaagcacccaaccagtcgagtctgctgccgctgctgtagacgttgattcggtcgagaaaggcccaggtacgacaccagagcaaccggcgaagcgaagggcacccaacgttcgacgaggacagagaagggtgctgcgaagcgcaacgagagaaggaagagcgacgtaggggggggatattgttgctgtatactaaatattaacggcccaaattaaagggggcaacacatgatccctagctaggttaactagagctatagcaatgactggccgtttccacgcgtacgagatgcgtagtgtgcatcatcaacctgtatccatgttgtattatcgtaggagtcgtaggccttacagtgaccacgcgtactggttagagttggtcgttc

SEQ ID NO: 3069 - DNA, 359 bp, Zea mays
tgatacaccaaacatgtttcccataaattctaagtttaaattagatcattcaatcattcatcagtataaagaaatttgggtgagctttatgagacacagcatgaaatttgcatttggtagttttatgcaccaaggtgaagtgcagcataagtatgaaaaagcaccatatttgatgtacagtatcaataatttagggctgtgattaagcatattaggtggcagaacaaggaaaacatcacatgttgatggcatattggacaatccttagtagtaagtagtaacgaattactgagagtaggaagggaatataatgacgacaaacatttatgtagttggaactccaaataagcaccaacacc

SEQ ID NO: 3070 - DNA, 380 bp, Zea mays
  misc_feature (234)..(236): n is a, c, g, or t
  misc_feature (296)..(298): n is a, c, g, or t
gataccggcgagtttctccgagctcaagaacctgacgctgcttaacctgttccggaacaagttgcgcggcgacatccccgacttcgtcggcgacctgcccagcctcgaggtgctgcagctgtgggagaataacttcaccggcggtgtgccacgccgcctcggccgcaacggccgcctccaggtgctcgacctctcgtcgaacaagctcaccggcacgcttccgtcggagctctnnncggggggcaagctggagactctcatcgctctcggcaacttcttgttcggtgccatcccannntcactcggccaatgcaagtccttgagccgcgtccgcctcggggagaactacctgaatggctcaattccgaagggtctattcg

SEQ ID NO: 3071 - DNA, 500 bp, Zea mays
gcatactctacagggtatcttcgatcatcatggactagggtgttagcttgcctgagagatgatgggcttccgcacacgatgggttcatcaagcacactcaaagccgcattgaaggatagattcaaaaactttaacttggccttcgaggagttgcacaggacacagacatcatggagggttgtggatcctcagttaagagaagagctgaagatctcaatctccgagaaggttcttccagcataccgttcatttgttggaagatttcggggacaactagagggagggaggggttctgcaagatatataaagtacaaccctgatgatttggagaaccatgtctcagaattttttgaagggagaaagtcaaatgcttgatgaacccatcgtgtgcggaagcccatcatctctcaggcaagctaacaccctagtccatgatgatcgaagataccctgtagagtattgcctaatctgaccacgacgcttgcgaatccagttatcac

SEQ ID NO: 3072 - DNA, 422 bp, Zea mays
ctctccgtcacctatctcaaccgcactgccgacgccaccttctcgctgcctcgcagcgacgacaccaagcacatcaacatccgcctaccgcctggacctgcagcctgatctcatgcatgggatcggtccgtcgagtagaaatgtactactagaatttaagaactaaatatactgtggtgcatcagctgtgttaattggtacgtgtcactaaaaaataagtccgtggattgatacaactactactatacgcgcgcaactatctcctgcttgacctcttatgatgaaactagtgcaatgagtgtgttgtgatggtacacaaattattcgtgttagtgcacctagcgcgtagtatctttaaaaactctgttgtagtcaaccatgcttgtacatgaaagaacccaagaaacgaaggatgatgttta

SEQ ID NO: 3073 - DNA, 382 bp, Zea mays
cccgttaccgcatcgccctgggtgttgcccgcgccatcgcctacctccacgaggagtgcctggagtgggttctccactgcgacatcaagcccgagaacatcctgctggaggacgacttctgccccaaggtgtccgacttcggtctgtccaagctgacgagcaagaaggagaaggtgaccatgtcgcgcatccgcggcacccgcgggtacatggcgcccgagtgggtgatccaccgcgagcccatcacggccaaggccgacgtgtacagcttcggcatggtcctgctggagatcgtgtccggccgccgcaactacgggttccggcaggagtcggtgggcagtgaggactggtacttccccaagtgggcgtacgagaaggtgta

SEQ ID NO: 3074 - DNA, 383 bp, Zea mays
tcttctctcgtcctcgagcagccccaacctcgtccagcagctggtagagaaatcgtctgatatgttaagatccgtgctgaccccacctaactttctcggccgattacataacttagccccctgataagagggtgcctaatttacgagaagcctggaaacaaatcaaagctgccatggcaattcaatgactgaagtgttgttgatgaggctgttttcagtgcaccgctataggtctgggtatccatggccatgctgtggtttcaagaccagagttggcggatagttacgtacacaggcggcaaatgtgtctcttagccgctgtttaagtgcaccgctgtaagtttgggtgtccatgtccatgctgtggtttcaagatcagagtt

SEQ ID NO: 3075 - DNA, 358 bp, Zea mays
actcacttgcacctgcttgtacatctggtgcctcaaccgaggtatcctctatagtcctctccgctggagcatcctcatttagtgcttcaattgtggcaccaatagcagttttttcggcgttggtggtatttgcatctggtggcgcgacaatcgcatccttcagagtattctcaactgtagtcgaattctcatgtgccacaactgtggcattctctacaggtttctcagctgctgtagatttatcatctagcaccttaacatcttctaccatgtcctcagctgttctagcttcttcaactggttctccagctgcagtttgaccttcagttgtctccccgattacaggttcagcagtaac

SEQ ID NO: 3076 - DNA, 362 bp, Zea mays
  misc_feature (18)..(19): n is a, c, g, or t
gtggcggggtctccgcanngcacccgcaccgtctcccgcaagatccgcagcgcgttcatcgcgcggcagacacaccccgcctcccttctatcctcgcccgagggaggggaccacctcgtcgagccgccgccatcgcgggaccggttgcccggccggcctgcgccaggggcttcttggagaagagcatagacaggccgtcgtcgcggtcagggttgccctcgcgggagttgccgaggctgttgattagcgatgacgcgttggacaacggcgcgtgctgcgccaagaccatggtggtggcctcgccggcgtcgacggaggtggccaccctcgtgcagcacagagaagacctcgtcgtggatgtt

SEQ ID NO: 3077 - DNA, 722 bp, Zea mays
gacttttctgctagttttgcgtttttctcttttatttttgtcatctcctgttgtagcattggaattttaagtatttccccttaagttatgtgtatcttctagacttttgtgttcagcatcacactctttgcaaactcgatagcaagtggaccatgccatcttgttaaccatctgaaacagaatgaagaagacccagaaactaaccttctttatagcactgtcagtgtcagattgtgttggaaatatatatttcttagaaatctttatgcaaaggaatttatgccattatgtgaaacagtagcgatatccttatccatcggcaatactgtccaaactaaattagtttgtaaaattggcacatgtttaattccatcattctttttgctctgcactcagctgaaacaagcgaaaaaggaaatcgtgaccgcatgcaaagcagcctcaacatttttgaccggcacatcgtcaagcgcctcttcaaatgcggaggatacgggtggctcaacctcgacaggaaattccctcttcgagggggcatggatccgaagtatcatcggtatgacaatgaagccgtcgaagagcctagtctgtgtagatagttcagatagcgacagctccgggagcgaatcagaatcagatggcgatcggcccaacagcgatgacaacgctgagcgacaagctaaaggcgtgaagcaggagcgaggcacgaaaaaaaagaataa

SEQ ID NO: 3078 - DNA, 380 bp, Zea mays
cacgggtgaacgggtcgacgcagaggcggtccgcagcgccagttcacggcgtcgctgcactgttccaggcagcacacaatagtagagctagaacaggcaactctgtaagcttcactgacctttggagaacgtggaacaaggattacacgggcaatcgggcatgcgactccctggaaatctctggccacggcgaggtgggtgaatcggctgcgtggtcaccagacaaagggaaaacaccacaggatacatgagctgaccaactaagtgattgaggagggaaactcaagcttgtaggcacaaccacaaagacacccgagagatcaactaagctcgaggataggagagcaacttcactgcaacctgccctatggtgactgaat

SEQ ID NO: 3079 - DNA, 364 bp, Zea mays
attccagcctgatgtttgcactttagcatgtggtttggtggctgataatctgctcgttcaaatttacagcaaaggtgttaaggtctgtttgcctacagtatacgctcaccctgaaggtgcccctttaacttctccaatttgcactgactggtatcctgctatcactatcagtgttggtgctgtaggacataatattgttgttgttgctacatctaatccttgttgcttatatgtccttggtgttagatcatcatcttcttaccagtacgagttgtatgcaacacatcatgtgcaattgcagtatgaagtatcatgcatatcaatcccacaagaggattgtatacatgataatgtatctttcagc

SEQ ID NO: 3080 - DNA, 356 bp, Zea mays
ctctttggtccattggagtttctggtaatcttttctcatggtttttccaaccaactacagcttacaaagataacttgcatgttttaatgttgttgctaatgtgaacctatcaatagtagtgtttaaatagttttatcaactagagaagtatcctaagactacgctaaagattttttttgatgtaagaactatgctaaaggttgccttcccaatcccgcattacttttatttcagaaattgacatcaagcgcattcatttctatgcccaaatcatcagctaatcctcgcaggcacagaccaccctcagcttttatagaacgccccaattgatatgaatagatttctggatttaggag

SEQ ID NO: 3081 - DNA, 347 bp, Zea mays
gaggaagaagaagacgatgtcatggctcagcacctgcttgttgcagcagacaggtataacttgccaagattgaagctcatatgtgaagataaattatgcaagtacattaatgtgggaacggtggcaaccatattggcactagccgagcagcaccattgccatggattgaagaaggcatgctttcgtttccttagctccccggagaatttgaaggtagccgtggcaagtgaaagcttcgatcatttgagcaagaattgcccctctgttatgaaggagttggttgccatgctcggcaccttacttgagtaaggctgggttttgtgtgttcttgtgttggtgtgtgctaa

SEQ ID NO: 3082 - DNA, 577 bp, Zea mays
gactgcagttttattttattggcgctcagtctccattcagtgatgctgacttgacctgagtctctaatgtaatttgtaccgagtttcaggaagcttttgagcggagagattcagcagcaactgctgcagctagcgccctgcaagaggcattgatctctgaatctgtgatcaggaacataaggtatttggggatatcttctcttttttttactcaatctaaaagccaaacccgtgcgtttcttcagcaggaaactggtgtgactggtattttgtttacttctccgcttacagcaagttctctgaaatctgcgcgtccgcaagggtctccaatccgttcccaacagtagatctcttccttgtcgtctgtgaggatgctctcaagtggaagaccatcgctgccgagtcggtggcgatcaacggggctgaagaggaggaactgctggagaagaaatcgacttggcactgggtcggcgctgcgttagccactgatctcgaggtcctcaagcttctgaacggtgccactgggcccttctcccggacgcggagcagcggcactaccaacaagccaaatgcatct

SEQ ID NO: 3083 - DNA, 387 bp, Zea mays
aagtatatctgctgctgctatctaccttgcatgtcagcttgaagacaaacgcaaaactcaggcagagatctgtaaggttacgggcctcacggaggtcacactacgcaaagtgtacaaagaactgttggagaattgggatgatttgctcccccctgactatacacctgccacaccaccagagaaagcttttcccatgaccaacatttactcagggcgctcagcgagtggcaaggatatgtatcaggataagatattcgagagtattaagcaaaaatgccctgagcctgcagagcctgaccacatggtcgtggtgaaagaagagggagacaagaaaacagctgctcttggccgtccgcctacaaaacttgaccatcctgagttaggcaa

SEQ ID NO: 3084 - DNA, 340 bp, Zea mays
agacagatgttggaacttggatggtgccatgcgtacatatgttggagctaatgcggtaatggaccgtcggccaaattcaatcgcctctaggtaccacaccggcgacggcgtcttcggcaaggcttgtagcagtagctcatgcaggtagtgatgacaagggactgttagcgaagaatgtcgacagtggccaatggtcatgtaaattgttcatcgtatagagaggtgcaagtgacaaatagccacggttttgtaattctgagctaggattagctattgagaccctgtaattcgtctgggcagacctcaaactagaggtcaacaacgtagcctggcctattgt

SEQ ID NO: 3085 - DNA, 343 bp, Zea mays
gagagcgctttcctgataagcactttgatcttgaaactgtccttcatgcaaagatccgtccactcacagttgctcacagtaagtcattcattgggtttttccatcctcaaggcactgaggatgtaactggattcgacttcctcgacggtgcaatgtcattcgataacatctgggacgagataagccgagcagcggagtgctcctccggaaagcctgccctctacattgtcagttggaacgaccacttctttgtcctcaaggttgacgccaatgctatttacatcattgacacgctcggtgagaggctgtctgaaggctgcaaccaggcatacatcttgaagtt

SEQ ID NO: 3086 - DNA, 610 bp, Zea mays
gttttctgtatgttttcagcatttatgttgtagattagttctaagaaccactgaataactcctgcagagtgctattggtgagggcatgacacgtcgagaccattcggatgtatctaatcaggtacctattatgagtccataggctttgttttcagacatgatgtgtaagatgaattgacatctactgttttctgttcagctttatgccaactatgctattggaaaggatgttcaggccatgaaggctgtcgttggagaggaggcactctcgtctgaggatctggtctgttgcgagtgaaataaattcgtaagttagttctttttcagacccccaaaacttaatgttctgttccttattgcacagctttacttagagttccttgacaagtttgagaggaagtttgtgacacaaggagcatatgacacacggaacatcttccagtcactcgatcttgcatggacattgcttcggatcttccctcgcgaacttctccaccgtattccagcaaagaccttggaccagtactatagcagagatgcttcccactgaatcactgatcgttgatcagtgttccaatattttggcaagtgcagctttgaataaattgaa

SEQ ID NO: 3087 - DNA, 393 bp, Zea mays
ctggctaacatgtccgaggtcttctgcaccgggatgccgccgtcgatgaacaacttccgggcatggatggagctgccggcgccggcaccggaggcgttcgacgccgggccgccgctcgcttctagggacaagatcgacctggagatggggcacaagggcggcgtgcaacaccatactggtgttccacccatcttgcaggggctgcattacgcgcaaatggagaagaattacagtgccagcgtccacatcaaggaccggcgatccgcggaggcgccggaccccttcatgatcccggaggcgccgcgacacgctgcagcaggagaagcttggcctccagctgtgtttcatgacgacggagtctaatgatgttacgagcagcgggcaagagtccgt

SEQ ID NO: 3088 - DNA, 424 bp, Zea mays
cggcgcctcacggtcgcaatttattgcttgcgcaccgcctcgccgctttggcgtggggcgtttgcctgtgtggcgcttcgcaggtgccgtggcttgccgcttccttcgccgtgctcactagtcaccagagagggaggaggctctggcgctctgcttctgctgccgcttcttcttcttctcctgctgctgctcttacggagataagcagggggggccgggccggggcagggggaggtgacagctgagctgactagctgagtgaagcatggggatggacgccggcggcggcaagctgccgtacagctacgccggccagcaggacggagggaagctggtgaagagcgtcagccgcgtggagccgcgcaggttcggcctgggcctcgtggcgggcttcctcctcgtcacctgcgcctacttctccacc

SEQ ID NO: 3089 - DNA, 788 bp, Zea mays
ctgatatttatgttctcgggtaatttttctctcagataaacctttttttctctctttcgggtgggttatacttaaacatgccgccgacttctaaagggaaaaaatcaataacgtaaaccttttatatatattttttgcaagaaaattgtccacgtacatatttatttttgaagaaattatgccttctcaattgaaattcatttaccaaacagatgcagctggacaagtatattaaaggtggcagttaagagagctgttactcatatactgtaggcccacatgctatttggttatgaaatttgacactacctttttatttttgaatcaacattaaaaagatgcagaactgcttcaattactaatattccttacaaattaaaaaaaagctccatttaccatgaaaactgccgctacctttcagatttcaagagattatcccactggaagtcgggtatatgattggaactgaagacactcgtccggtcgcagtatgggagcatatcatccacgaaactttgaacaagaagtgtccggataaatcgaagtccaaacgccacagtgactctcccccgccagcaaggtttaatccattagactatgttcttgccgtggagaatgagttgcataacgaatccaacagtgatagcgatggggagcttcatcggccgcacaatgcagaatcatccgattcagctcgacgccgtctccagccattggatttagcctgtggcgttcacaattataatggggataaaaggaaaaggctgcagtatgtacgggtaataagc

SEQ ID NO: 3090 - DNA, 612 bp, Zea mays
cctggtgggcaacaaggtcgacatggacgcgaagcgggtacgttacgcggctttctttacgatcacctgctgctgctgcctgccgccgctgctgggcggcacccccacgcggctggttttccttttttttctcttccccgtgccctaacaaactcccccggcccctgtcgttagcaggtggtgtccatggctcaaggccagaagcttgcagacgagtacgggatcaagtttttcgagacggtaagagtccgttgattaacaccagctcgcaggccggttgtcgtattaacaccctgctaagctggtgagtgtgtctgtatgcagagcgcgaaaacaaaccagaatgtggagcaggtcttcttcgccatggcgagggacgtgaagcgaaggctcaccgagaccgttgccgccgcggccgaggtagctccgtagctgtgttatccccatcccgttgattgattgccatgttaagtcgtcgcctctaataaatcttcacaaaaccatgcgcagcctccggctatccagatcagcaggccggactcgggccaggccggcgcagcctcgtcgacgaggtggtcatcgtcctgctgtagcacctgatctgccgccgcg

SEQ ID NO: 3091 - DNA, 377 bp, Zea mays
tcagaactacatagatccaggaagcaagcaagcaaatccttcctgccatggcggcctccatgtacatagatcccatgtttttattaatttcgtctagctgggggtgggggggcgtgcacctgccatggcggcctcctttatttagctttatataaggagtaggatgtaggatgtctaccatatgtgtgtagcttgggattaggctgcaagaagataagcctgcttgtacaaatatggcttcctggaacaatgacattttgggggcgcaacgcaagaaagatgaaagaacaatccaggaagcagcaggtgttttcttcttcttcttcttttgccccttccatgatattcgcgtgtcaaaggctctcctaaagcgagta

SEQ ID NO: 3092 - DNA, 668 bp, Zea mays
agggataaatcgactcgtcaagaaatcgtttcagttgccatgactccagtaggcaatatgattgttgcttgactacagttttgtcttccactacttagcttatttgtttgttttattcttacctcgcgattttatgatcaaatttggtatctgcacggtgcttaccccgggcttgtcggatgtacttgaagaaggaagccccaatgtctgtgctagatccactatgccattcagtgttgcaggccctgatgaattttgtgattggtctgtgtcaaatcactgccatcaatcaatcaaacgaatcatcaaaccaaacataataaagaaatggtctattacgaaaatttgtatccattgctttgacacagaccaatcacaaaattcatcagggcctgcaacactgaatggcatagtggatctagcacagacattggggcttccttcttcaagtacatccgacaagcccggggtaagcaccgtgcagataccaaattagatcttaaaatcgggagcgaggtaagaataaaacaaagaaaatacgggcgaggtaagaataaaacaaacaaataagctaagtagtggaagacaaaactgtagtcaagcaacaatcatattgcctactggagtcatggcaactgaaacgatttcttgacgagtcgatttatccc

SEQ ID NO: 3093 - DNA, 549 bp, Zea mays
  misc_feature (469)..(480): n is a, c, g, or t
  misc_feature (489)..(498): n is a, c, g, or t
  misc_feature (506)..(530): n is a, c, g, or t
  misc_feature (534)..(541): n is a, c, g, or t
ctgctttcgctgcacttcctcgagcaggggtgggatcttattgggggagtcgtgttcgcatgcttgctgtgctcgaagcacctgttcctcgtggcagcgccggtgtactttatgtatttgttccggcattattgctgtggccggggtgtcgtgaaggggctgggaaggctcgtgctgatgggttctggagtggctgctgtttttgccgcagcatttgtgcccttcgtgtactatggtcaggtgagtgaatctggttgcttaatttaattttggattcaacgacttgtttgtatcatggttgcttatctgtaaacgtctagtttctgatgaaagtaagaaactgagaaacgtggcttgtgatttgtgaacagttgagacttgatgttaatttggcattaaatccggtaaaggagagtaatgcatcgtgttgctgaatttattattataggagctcgagctgtttcagctnnnnnnnnnnnnctaatgagnnnnnnnnnnggttttgnnnnnnnnnnnnnnnnnnnnnnnnnaacnnnnnnnnaattttct

SEQ ID NO: 3094 - DNA, 484 bp, Zea mays
ccgctctacgtagctaccttcatgtccttcgtctacgtcgccggctacctgctcgtggagtgcttcttctaccacagcgtccatgcagccagtatcgctccgtactgcttcatcgcaggtacggtagcgaccctgtttatggctagtaaataaatgccttccgtcattagctctgactgatggcatgtagtatatatatctaactaaattttcctttttcatcgtcactgctgcagggacatccatggtttggatgctgcttcaatggaactcccatggccgtggccgccgtccccgtgaggctagcaagcagccctgatccaacctctctggttcttttgccatcgatgtgattggggcggtctactatacagacgatgaataaattatttatttacaaaaaattgtattatagatataagatgcacaccgagttccgtacgttgttgctgttgacttgttgaatgtaagaagtgacgactag

SEQ ID NO: 3095 - DNA, 374 bp, Zea mays
gcgacgagctgcgggtggcgcggcgcgtgaggcagtactcccgcgagctggaccgcaagtcccggatgctgcggcaggtcgagaagagctactacgactcgtacctgcccgggggcatgtcggtgtggcactgggggaggcaggcgcacgatgcgggcaacgaggtggcgcagcgcagggacgagatcgcggcttgccggaagatggtggaggacgagatgcggaggcatgccaaggccatagacgccacgaggacggccacggtcacggccgtgcaggggaagctgcctgccgtgttccagtcgatggccgcgttctcggcgtcgcttgcgaactcgctggaggccgcgtacagggttccacagcagaacaac

SEQ ID NO: 3096 - DNA, 384 bp, Zea mays
atccttagaagaagttaagccttcgtgccaccagaacgtggtgagagaccaaagcaccgactccagtgactcgccctatccaacccctctggtgctcaggggtgacatccagactcctggcaccgtatacgccgccgctcacaaggaggcttggaagcctgggaagcgcgcgagggcgttcatctaccctgtcctgcgccccatcgagaacaagatgcagtggatggaactgaaagccgccgagtctcctactgtgctatcacccaaccctccaaaaagaaggaacctgagcgcagcaggttccggcgacaaggctcaccagccgcctacacgttcagcgttcgccggatcttcagagcacggatccttcccaaatacttacag

SEQ ID NO: 3097 - DNA, 1026 bp, Zea mays
  misc_feature (65)..(66): n is a, c, g, or t
  misc_feature (959)..(961): n is a, c, g, or t
ctcaatcatctctgatcctggttcaaccaaagaaacaagttccattcgtcatgcaacaaaccatnnataaaacacttgaaaaccacccttccttctctaacccttcggatccagggaaaagggggggggggcacttacgtgcacaaggcaatgcaccatgcttgcatgaaatgctccatatgaggggccacgatgtctggacagacccaggtaagcctcccaagagtgatcgcactattttcaacaagtgacttgttcaaaccctgtcaatgtgaaggggggaaaactagccatttagttgaaattttaaatgaaacgtgacataacaaaccttaaaatcacccacctctggggattttaggatggtaatcaagcacgaaacaacggtgatcaccacaggtgctatttctttgccaatctggaaacaaataaaatatatatcacatatatgtacgaaacttcataaaataccaatcagtacctgtatgtcaaagacattactaagagcacacaataaaataagctctgctgtggcctgtggggccagtgcactgcaactttataagtgacataccacggggaaacccatgccaaacagtttcaactttaacagcagcaaaatgtaagttaaaccaaatggtatagaagtaggcactaaccttgattgctaattctccaatagcccaacaggcattgttagctactgataccgcatccttcacagactgagggttctgcagtgaaattgagtgagaaatgaatcaagataattataataacaacatatagaccacagaaatgcttaccagttgctttgctgcaacagtaagaaattcttgaagacgtggatgcaaatgtattgggcaaacctagtacaacaaagagttattttttttgtagagtgaaaattatgtcaaaataatatgaactatggtggtacgcagtcaaccctagaaagnnntgcaagaagggcaagggcactttgtcgaacatcagctgcttcatccatgcagcatgcaaaagcag

SEQ ID NO: 3098 - DNA, 529 bp, Zea mays
tctccctggccatggttgtcgttgggcgcttcttggtcaagttgttcctgctcgaagttgctgcgtgggtgatgtttgccttcctagagacatacacgaggctgttctggtcgtcggagtccctgtactacaaccccgcctggcacgtgatcgtctcttcttgggaaaccgtcgtctacagccccgttcttgatcttgacaggtcaggaattctccctcccttcccaactctacgctgtcgctgcccatgcatggcatctctctatctactgtctgctgctatactactgtgatgttagtcatgttacccttatatgctgcggttcgatctacctgcacagatgggcgttcccgatctgcgctgtcctgttgtttttggcgttttattggcgttgcctcggtggaaggaggggaattgcccggtcactgctacctctgtacaacggggcttattacagaagctccagtcgcacaagaacagactgatccctcgaaccatgcgcacaatcacaccattagcgtgcacata

SEQ ID NO: 3099 - DNA, 479 bp, Zea mays
ggtctatccaacatatgactttgcgtgcccatttgtcgatgcattggagggggtaacccatgctcttcgttccagtgaatatcatgacagaaatgcacaatattatcgaattcttcaagacatggggttgaggagagtggaaatttatgaattcagccgattgaatatggtttacactcttctaagcaagcgaaagcttctttggtttgtacaaaacaagaaggtcgaagattggacagacccacgttttcccactgtccaaggcatagtacgtcggggcttgaaggttgatgcattgatacagtttatactccaacaggtacacctttgtgctaatgtgctcttgctttaccttcatatttcctgattgtttattcctgatttcatatccatatttcatacccattttttattttttgaaactatatatttttttgttgttgaagggtgcttcaaaaaatctgaatctcatggagtgg

SEQ ID NO: 3100 - DNA, 722 bp, Zea mays
gttcgtctgcatgcatgcaaagaggaggaggaggaagaagaagaagatgcattttatttcggtttttcttttattattattattattcctcattgcggcaatgcggctgtgcatgctttgatcaacacttacaggcccaggcttagagaccagatgcagtactgcacggatcacccagaggaagtgagcaagctgtccagagtgaaggcccaggtggatcaggtgaaaagcatcatgatggaaaacatcgacaaggtaattaacaaccaaccttcgatagttacctgtgctttcattcatcagttatccaattctgggagagggaggggattcatttgatggaacaaatgtttcaggcctttgatcgcggacagcagatcgacgggcttgtcacaaggacggagcagctccacgacgaggtctgtacgcgttttttcttccagttctctctgttcgtatcgttgacagtaccgcctatcccttgagcaacttgccggtgtcgtcagtcagacgcaacaatagagaagaattgaaacaccaacaccggccggctctaattgtgtttgtggcaggccgttgatttcaggcggcaaggcgtgcagctgcggcgcaggatgtggtaccagaacatgaaggtgaagctcatcgtcctcggcgtcgtggtcgcgctcatccttatcatagtcctctcaatttgccatggcggatgcagcaagtgatta

SEQ ID NO: 3101 - DNA, 388 bp, Zea mays
ttcttcgagaggagatgtgatgtcgattcgagcatcgacacagcaatctcccttgcttcagccaacagcctgactatcttgcatccttcaatgtcagaggcagccttgctgctgatcttcttgaactgcttctgtgccttcttggccaagcgagcgtaagactgaaccttggcctgaagagacacgtcgtctcctctcttgagagccagctgcatctcctggacgctgaccctgagctctgcaaagttctcttgcatggcgttgcagaggtcaagcaggacaagggagcgatcgagctcctcctccactgccttcctctgctgacgttggttgccggccaaggatgtgagctcgtcaatgcagctgtagatgcccaccatcttgttga

SEQ ID NO: 3102 - DNA, 377 bp, Zea mays
ccaacagagtgctgccagaatgagaacggctgtacttctggaaagaatgcattcacaaagtcgaacggttgtggtgactctgagacctgtgcagaggggcatgtaggggatgcaccagccatggaatcccggtcccagagtcgcaagcaggcatcagatttggagcaggagacctgtcttgatgacagcaatttggtggcccgtgcagctaggctcttcgccccgaggttaggacagttagatgacaactacgagtactgcgtgaagattatccgttggttggaatgttcaggcctcattgagaaggatttcaggatgaaatttctaacatggttcagtttgagatcgacagagcaggagcgaagagttgttatcac

SEQ ID NO: 3103 - DNA, 575 bp, Zea mays
ttccctgtttttgtttcgaatacaaatttgtatgttttgaatgggattgctaaagtgatattacagttactttctgtcggtttaaagtctgatgataaatggagtgtggagtatggactactaccatttattcctactgcaaaatcatttaaaatggatatagttttggccatgttactacaattgcaacgatggataagttatccctgcttgttctttatgggtatgtgttctagattctagaagattaatgcttgaacccatctaacaatgttgtggctttaaccgatttcaggtgtggatctgatttgtaatggcttattaggatttaggccaggtgtgatctggtttgtaaatgaatctctttgccatgcattgagttgttttttctgtgctgtctcatggttacactctattggcattgtacagttcatcagactaggtgcaagtttttttcctgataaaacatcaaaaaggtctaaattacatgtatgattcaggcatgttttcttaattttatgacagtcactgatgttctgaataaaatactactattttgtgacaatcttatagca

SEQ ID NO: 3104 - DNA, 369 bp, Zea mays
tttcttgttaatggaaaaccacctagttctccaaggttgggaaatggggtgaattatcctttggaagtagagttatgtggttgacaagatcttgaaaaactgcatatatttttttttcatatgagcatgtgcatccattttctcatctcctgggaaattttctgacaataaatgcacgaaccacattaatgtttggtggtgcaatttaactaagtatcattcccaaatagcttcctatgtgtggtaaggcagtagggcactgctatttatagaatttgcactgagcacgtgtctacctttgctgttttacattagatgattctcattgtagtttatatcttgttaccaccattacctactgtcatccac

SEQ ID NO: 3105 - DNA, 369 bp, Zea mays
  misc_feature (109)..(110): n is a, c, g, or t
tttcttgttaatggaaaaccacctagttctccaaggttgggaaatggggtgaattatcctttggaagtagagttatgtggttgacaagatcttgaaaaactgcatatanntttttttcatatgagcatgtgcatccattttctcatctcctgggaaattttctgacaataaatgcacgaaccacattaatgtttggtggtgcaatttaactaagtatcattcccaaatagcttcctatgtgtggtaaggcagtagggcactgctatttatagaatttgcactgagcacgtgtctacctttgctgttttacattagatgattctcattgtagtttatatcttgttaccaccattacctactgtcatccac

SEQ ID NO: 3106 - DNA, 375 bp, Zea mays
ccgtcaccgtctggtccgccttcttcatgtggacgctgtcgtgagctcctcgaatcaggggccagggccggccgaggcaatcgcttctggccaacaggcactctggttagagacaactgcaggcaggcaggctgtgtgacaaaccagtttgaacagctcctcgcgtcagatgtctcagatctcgcaaaagaagcttaatcaattagacgaccaggccctagctagatcgccggcgtatcttctggggcttaattgatcagctgttttgattgaatgatgaatcagatcgttcgggcagttgcagttgcagctcgtacatgtttgtaaaacttgttgcattgatcgtcgctgtcactgcactaaatgaacacagga

SEQ ID NO: 3107 - DNA, 636 bp, Zea mays
cgaatacacttccgtcgcgggctttggtccagtgcacacgcgtgcaagatgggtaagatctagcgtaaaacacatctgagttgcgctgattcacagatatatatttctataccccgggtgtttgtttcgcacacgacatcttgcacaatgaagtttgataccactggcattgcatcatagtttaaagtctatagacatcatggtttctgtgacattgttttctggtgtcgtgtgcttctgaagtcacctcctagttaggctttactgctcatttggcacaccgagagctcagaactgcagactaagagatgttactttttcattgtgctcatcatgtccagttcaacgatatgatcaacgtggtgttctcctcgaaggcgcttgttggcggggcggtggcgtattttctggacaacaccctgcacaggcgcgatggcgtcgcgaggaaggaccggggccaccatttctgggacaggttcaggtccttcaagaccgacccgcgcagcgaggagttctactccctcccgttcaacctcaacaaattcttcccgtccttctgatccttgctggtgctggtaactgagagcagaaaaaatggctttggactgtgattttgttggcaatgccacgccgccc

SEQ ID NO: 3108 - DNA, 380 bp, Zea mays
  misc_feature (375)..(377): n is a, c, g, or t
ctataagggattattatagctactatgcacctggacagagccgtagtcccttatattttataggatgaagtgaaggcagtacatgttgtatggtagtagcaaatttgacgtgatgaaatccatcctaacataatctgggccgatatgagcaggaagggaagtgcatggagcctggagttgtgagcttggcggacatcttggggaccagggttgcggaccatgttcctcaaacgcccaacaagatatccgaggacatgatcagatgcatcgcggccatatacataaggctgagagacgtcccttccgccgccgcgcagcatgccttcttcccctcaccgtgctcgtccttctcttcagcaagcggactgtcttccnnntac

SEQ ID NO: 3109 - DNA, 353 bp, Zea mays
agtggaaaatggccagagcaaatgcgattattagggagcaggaagctgaggtggaggaggagagcgccaggagaaggactgcgaaggatggaaatcagaacgatgcaaacacagggctcttcttgagggccgctgttcggccattcacttacagaaatcttgtcaaggaaattgttctgatgagacaccacatcattgatggggaaatagtttagtttgcatgaggctgtattctcacatcattgatggggagatagtttagtttgcatgaggctgtattcagtttttcagattagggatttgcccatttcaatttacaaatgcagagcttgcatttcgaaggtctaaggcca

SEQ ID NO: 3110 - DNA, 380 bp, Zea mays
cgagcaggattcggacggatgctcgcccataatggttgctgccaagatgggaaacgtcgaggccttccgcgccctcgtattcgccggcgccaacgtgaagctgagcaacaagcgcggggagacggccatcgggctggcgcagcagagcaagaagagagacctcttcgagcaggtcatgctcgagctcgcgctggagaagggcatgcctggaggcttctacgcgcttcactgcgcctcccggcgcggcgacaccgcggcggtgcgccacctcgccagcacgggctgcgacgtcaatatccccgacggtgacggctacaccccgctgatgctcgcggccagggaaggccacgcgggcgtgtgcgagcttctcatctcctaca

SEQ ID NO: 3111 - DNA, 673 bp, Zea mays
  misc_feature (528)..(541): n is a, c, g, or t
  misc_feature (543)..(548): n is a, c, g, or t
  misc_feature (557)..(669): n is a, c, g, or t
ggcgagcatggttctttgttcaggtacttacatcagcttcatccagtgacgaagacaaatagttcaagatgaaatcgtctagatctccttctagaactgaatccgggtcagatacttcatagttcgtccggagatctttgaccatacggtatggctgacaaaacacaaaaagaacaattatttactgatatgatgtttgcacttaagatatccatctttactctatactataacacaatagaaagattatgacaaaaaaataatagaaaaatttatattctcttttttcaaaacatcattagttagaaagatcatgtcacaaaattttccagaaagtaatcactagtttgcagcttcttaatttttaaaaatcctgagatgagtatggaaacaaaacagaaacagaatgactaactatatagactagtagcttaaagggaacacagataatgctactgagaggtcacaatttataaaaactcgacctacggggggtaagacagcccccgagtattgtattaagaaggnnnnnnnnnnnnnnannnnnngaaaacccnnnnnnnnnnnnnnnnnnnnnnnnnnnnnnnnnnnnnnnnnnnnnnnnnnnnnnnnnnnnnnnnnnnnnnnnnnnnnnnnnnnnnnnnnnnnnnnnnnnnnnnnnnnnnnnnntttt

SEQ ID NO: 3112 - DNA, 796 bp, Zea mays
aaatatgttcgattgtgaaactgcaggacttttttttgctgatctgatacttgtgcagaaacgggatcatgattgtttgactgatggagaatggaaatgtgaaatttttgggggtagattatatgctgtagtttctcgtggtgttcttgatatgataccgggatattttgactccgatgaatattgagcaaaatgtcgattttggagctagtgagttagcttaatacagtatgtaggctctgtaggtaatctgcattctcatcttataattgaagtacaattccctgtctgccaaatgtgttacataagctcgaattcaacttggtgcatagagtagattcatacagaagttcatatccatattctcatatgtataaagttcaaacggaaacttttttttatccttgttctacattgcatataagtttgcatatttgtcttcctacaatgcaggtgccaattcctgctgaccaagttcatgccatcaatgatgaactgtcatccgagggggctgcaggggactacgaaactcgtttaaagcagcttgctaagaacggtgtgatcgaactgtcgccggtgtccgggttccccaagttcgaccttatgcttatggggatggggcctgatggccacgttgcctcactcttccctggccaccctgttgtcaatgaaaaccagaagtgggtcacctttgtcaaggactcaccgaagccgccgccggagagaataacgttcactttcccagtgatcaactcgtccgcacacatcgcacttgtggtcaccggtgctggcaaag

SEQ ID NO: 3113 - DNA, 384 bp, Zea mays
atggaggagccccatatggatcatcttgcagctgtgaagcagatcctgaggtacatagcagggacaagagattggggcctgttctattcaaggagaaatggagggagtgatgagctcttgggctatagtgacagtgatatggctggcgacttggatggcagaaagagcacatctgggatccttttctttcttgggaggagtccaatcagctggcaatcaactaagcagaaggtggtggcgctatcaagttgtgaggcggagtacatcgctgctgctactgctgcatgtcaagctgtttggctggcacgactgcttgctgaaatcaggaactcagagacaagcagacctttgctaagggtggacaacaagtccactatctcgctg

SEQ ID NO: 3114 - DNA, 458 bp, Zea mays
tcgacgccgcgagaatgtcaacatcgtagcagccagtttcccagcaggccttgtaggctgcaatccttgccatgggggctcctccccgccctcctccggtgcccagaccacctccgtagctcatgtccctgacaaaccttccggccgctatcgaggcagtgtggctgccatgccccgagctgtcccttggagatacgaacttgatggcgccaccctcttctgtttggtatccgctgaggtaatatctgcctcctattaccttcctatcgtgcatgttttgggggggtaaataatgggtggctttagaaaattccaatgctggaataccgtaccgtgggttggttttagagcgtgtgtacctgttgcaggtgaaatttgacggtgagttcgcgtctcctccttggcattgccctctccatcttttgggaaccggaggcatcccgtggtcactgaaacta

SEQ ID NO: 3115 - DNA, 711 bp, Zea mays
tccgctcctgagcgccgctgctggttctctgttcttggccaataaaggcgagccgatgacgatgcttgtccgttcgttcatgtacagtgacggggagacgctggtgtccgcggacgacgtgcggatcaacctgtggcacgcggaggtgacgcgccagtgcttcaacatcgtggacatgaagcccgcggacatggaggacctcgtaggtgatttcgttgtttttcttcttcttgtccttccttacccaccgatcgtacgtacgtaggactaggagtggtatactagcatatgctgtcctccagtttgtgaaagccgcagcgatcactggcacttacatgcattacattacatccgagattccgagtgttgtgttggctgggtgatgatgatgaagcagaggtgatcaccacggccgagttccacccgtcgtcctgcagcctgctggcctacggcagctccagcggcctcgtcaggctggtcgatctgcggcgatcggcgctgtgcgaccacagcgtgagaatgcgagtgacttctgtcttctgcaacaaccctccaattgaactctccacgcacggcgcaccacgcgtgtgtgcgctctttctttctttcatttttttaaactgtcgcttactgaatgaacaggttccaggaccgcgagaaccgcactcaccccagcacatttttcagtgagataatctcctgcatcaccga

SEQ ID NO: 3116 - DNA, 659 bp, Zea mays
  misc_feature (473)..(475): n is a, c, g, or t
  misc_feature (515)..(526): n is a, c, g, or t
  misc_feature (595)..(602): n is a, c, g, or t
  misc_feature (615)..(630): n is a, c, g, or t
  misc_feature (644)..(647): n is a, c, g, or t
ctgagttgaattagtgggtgaatatggcctgaggtgcaagcgtgagctgtggcgtgtgcagtatgccctcagccgcatccgaaatgctgcaagggagctgctcacccttgatgagaagaacccccgtcgtatctttgagggcgaggcactcctgcgccgcatgaaccgctatggtcttctcggtgagggccagaacaagcttgactatgtgcttgcactcaccgttgagaactttctgcagcgccgccttcagaccattgtcttcaagaatggcatggcgaagtccattcatcatgctcgtgtgctcatcaggcaacgccacattaggtacaaacaataagatttgttcccctgaagattatgtttttgtgatatgatggttaactagtaacacatttacttaaacaaagctaatgccatgggatgtgtagtatttacacctgtattttactggataactttttcttacaagnnngtgggtgtatataagtttgtgtgagcacactgttttatannnnnnnnnnnnaattaaactatctatcttcctgtttatgttctggggcatatgatgagaaactttatgcaactcacgacnnnnnnnngagacactttgtnnnnnnnnnnnnnnnnatattttctctgannnncccctttttctt

SEQ ID NO: 3117 - DNA, 377 bp, Zea mays
acgagctcctctgggccgcgctctggctccaccgcgccaccggacgcgccgagtacctggactacgtcgtcgacaacgccgacgacttcggcggcaccggctgggccatcaccgagttcagctgggacgtcaagtacgccggcgtccagatcctcgccgcaagggtacgcgtgctagctgcgtatatgctactgtttttttttcctttctttctttctttctaccctgaatatatataatatatattaaaaaacgaaaggacgtacatacaatacaagtgcttacgtgtcgtcgcgcgcgtgctttcatttcagctgctgctcagcggggagcactcgccgcggcacagggagacgctggagcagtacagggcgaag

SEQ ID NO: 3118 - DNA, 388 bp, Zea mays
gcttctcccaagggagtgccgagagccatgcagggtgatggggtacgacgtgcccaagggaactaccgtgttcgtgaatgtctgggcgatcagcagggatcccaagcactgggaggacgctgcgacgtttagaccggaacgattcgaggccgcgggtacggttgattttaagggcacggactttgaatacacgccgtttggggcgggccggaggatgtgccccggcatggcgtttgcgcaggcaagcatggagctcgtgcttgcagcgctcctgtaccatttcgactggaagctgcctggtgggatgctgccgagtgaattggacatggcggaggagatgggcatcactgcccgaaggaagcgcgacctttacctgcatccagtcgtt

SEQ ID NO: 3119 - DNA, 362 bp, Zea mays
atgtcgggctcaccgagttttcggtgcgctgtcgcggatgccgtcgcttagctcgtccaaatcctggccataattcccgtcacgacctatgtcggcatgctgactcgacgttgtcgtccttctttatcctcatcttcgcctcgacctcgcgtggtgctcggccgtgcacagctgctggtcgtcgacgtccctccgagttgtcggtcgtcgctcatgttcacctccgtgtgctgggtggcgtgggtggtaatgtctcggcgcgctgttcattggtggttcgaggatgtgcttgagttagagatgttccaagtggatactggacgaccttacaccgtggacacatcgaagatccatagcatact

SEQ ID NO: 3120 - DNA, 393 bp, Zea mays
gtcgggtagctgctgctgacgacgacgaggaggaggagttcgaggagaagcggccgcgtcggcgcactgcggacggactcgccatatactcggccgatgagctcgggttcggcaaggccgacgccggtggcaccccgatgtgcccgttcgactgcgactgctgcttctgagctctgagtttgtcggctgccgccttccctgccggaggtgatttgcacgaggctaattccagtgtagttgtacttgatgaattcggtggcgtgtccgcttacatctgtgctctgatgaaatggaaattttgatcctgaaattcagagtcaatgcttactgactggagcattaagaatttattatgttgacacatctagagcttgttgtttgttgatcagccgt

SEQ ID NO: 3121 - DNA, 357 bp, Zea mays
agcatttgtcaaaaccgcgacatgataagacccacaagcaacctccacaacaccgccacccccaagctgctcttcgaccaggcgaggataccttccatcattatttggattgccaagctgtccatacacagggcttccaacagtaaaaatgtgccctgaggtagtcaacccaatcgtaagagtatggccacatgcagccttatggaagttgtaatctatcaacgaagggacgcatgttggtttcagttttgaagacctatcaccatgacccaggcgatatttgtctccatcaccccaagtgaacaactttccagatgaagcatttgactgtgaaatgataacctcaacaacagcagc

SEQ ID NO: 3122 - DNA, 350 bp, Zea mays
tgatgttacgcacgtcgcactttatttcctgatgttgagcttgcagctgattgatcgtaaatgctgaggacgtgttctgtttttggtagttagtatgctgctgtttgtgggagatatgtgaggctgcacctgggaggcttggaacaacaactcttttggttatatccttgtattgagcattgaatttgtggatggactggtattgattgccttctgcatatacaaaacataaggatcaccaatctgttgccaaatcctgtacaacaagcatctttcttgctgagcagcagcacacatgatagtttgggttctggaggagcatgtgtgagtggaccagcgtcattagttgt

SEQ ID NO: 3123 - DNA, 285 bp, Zea mays
tctcaatgctctacttgctattcgtaaggaggtagacatgatggagcaggatgcactggagagcaaagcacggtctgacccagagaaggagaggatggaggaacaaattcaccttgctgagcctgcaaagacaaggcctagacaattcactttcaccccccttcctcaccagaattgtacgaggccagtgacaatgactcctacgactcggacaggtccactaggtatagcatttggaacctgtaatagtggtacctcgacctttgtcgtagtggtacaaatgca

SEQ ID NO: 3124 - DNA, 360 bp, Zea mays
gtcgagaccgacgccgaggccgaggggctgtttgatggcgagacgagggtggtcgacgagcaagccgccgcggggtggatgctcgtcagaggccacgacgtgctcgacggctccgcggctacgacgcagacgtacaggtatagcaacgaggcggggaggtatgagcgagccatcgacacactggatggtgcggtgctgagcgacaacgtgaccgagagctactgggcctcgggagacggcttggcttggcttgctgctggacccgcgggaggaggtgccatggaactgtgacggccagcagtttggacattactgctatgtaggagtccgtcgtcagactgggagttgagttgtccagac

SEQ ID NO: 3125 - DNA, 590 bp, Zea mays
  misc_feature (459)..(459): n is a, c, g, or t
  misc_feature (515)..(519): n is a, c, g, or t
  misc_feature (534)..(538): n is a, c, g, or t
  misc_feature (561)..(575): n is a, c, g, or t
  misc_feature (580)..(585): n is a, c, g, or t
gtataaacgatacagaaaaaacaatttcttccaaaaagtaaacatctagttcgtttgaaaacatacaagctttggattttgggaggcaatgcatgatggtttgtcgtttgatagatcccatagtttcacctacgtttgcagatgtgttttagcaacaggtttaaacgtatctatatgccaccaaactattggaacgtccttaccattttatcaactgagcctgttgcgagaaactgcaagaaaagaaactagcatcagtaatctggaccggtggatgtgtttctttccctatttaacaaagaactatatagcaaaaagaaaaacatacattaggggcagacgggttgaaggagatggaagaaacagccttatcgtgtgcatgaagggtatacatagactggccagaagaacttgatgaagctgttcgcttatcgaaggcttgaaccatcccattttcangactgacctgggagattatacagaacatactacagttacagggtttcataccatcnnnnngtaattaaattaccnnnnntacataataataataaaaaaagnnnnnnnnnnnnnnnaaacnnnnnnattca

SEQ ID NO: 3126 - DNA, 303 bp, Zea mays
aacctaatgcatgggccgtatctcatagtactccgtcagttctattttatttgtcacggtttagtttaaaaatgaactaacgaacaacgaatattcgaaaacggttatgataaatgagaactttgttggtatgatcagctaatgcatggagctatcggttgtgatggactttggatgctcgctttcttttcgatctaacccgggtgttaaccctttagtcctggctggtgtaacaccaattgggactagtgcagaccttttagtcacgacgtctataaaacttgggtccggaactaatacaga

SEQ ID NO: 3127 - DNA, 478 bp, Zea mays
aatgagttgctgtatggaagggcgggctatctgtgggcttgtttgttcttgaataagcatctcagcgagaagacgatccctctcgagcacattgtatgttaatgctgtagttctgttatgattttatgaaaattcttgcacacaattcgtttttaattatactcatgtgaagaggtcttgcacactggaaatcttattgtatcaaaccccttcaactgtagaattctgtggcgaaggacattattaatgagggaagaggttttgcaagcaaggggagtagccctctgatgtacgaatggcatgggaagaaatactggggggctgcgcatggtcttgctggaatcatgcacgtgctaatgcacaccgaactgaaaccagatgagcaggatgatgtaaagaacaccctgcggtatatgatcaagaacaagtttcctagtggcaactatccctcaagtgaaggcaatgaatcagatcactt

SEQ ID NO: 3128 - DNA, 319 bp, Zea mays
tctataagttctggccattgcttctgcggaatctcaataccggcaaccttggcaataacttgggaagcagtggatctggcacttgcaacaggagatgtgagagtttgcagcagcaatcctttaatttgtgctttggcaccagcatccagtgccagccatctctggaaaagctcattcttcctgtgctgctcctttgcatccagtgcattcttaagaatcaagccagctaacctgcggctctcctcaggtttctcttcattggccaactcacttgagagagagagcaagaatccagggaggttctgctcctggaataaaa

SEQ ID NO: 3129 - DNA, 658 bp, Zea mays
aatatttttcactgatgcatataagccagttggcaaagcaattaagaaagctggggtagagatccaagcttcaggtagacaatcttatcccaatacacagataaacatgttcataagttcaccataccctttttcttcagcatactccacaacgaaatcatttagtgatccacccttctgtcatttgcatcttaacatttttagcgcagaaaactccaacaagctccatcccttaacatttttagcgcctgcagtttctctacaagataacgcctttaataatattccttttactgacacaggggaagctgtgtacgttgatgatatccctgctcccaaagattgcctctatggggcatttatttatagcacacaccctcatgcacatgtaaagtcaatcaactttaaaccatctttggcttcacagaagatcatcacagttatcactgcaaaggatattcccagcggtggacaaaatgttggttatagcttcccgatgattggagaagaagcactttttgcagatccagttgctgaatttgctggtcaaaatattggtgttgtggtaatgtttcctaagttccctttcacatttcacaaaactgttcttaagtttatgtctatccaaccttgctgcgtcatgttggtttttctatca

SEQ ID NO: 3130 - DNA, 857 bp, Zea mays
  misc_feature (52)..(56): n is a, c, g, or t
  misc_feature (715)..(715): n is a, c, g, or t
  misc_feature (770)..(772): n is a, c, g, or t
  misc_feature (776)..(777): n is a, c, g, or t
  misc_feature (782)..(784): n is a, c, g, or t
  misc_feature (791)..(793): n is a, c, g, or t
  misc_feature (798)..(821): n is a, c, g, or t
  misc_feature (826)..(826): n is a, c, g, or t
gaggggttcccacggcgcccccagccgcgtcctcgaggggtacctcatggcnnnnnttttctacgagccctccacgcgcacgcgcctctccttcgaggctgctatgcggaggctcggcggggaggtcgtcaccaccgagaatgcgcgcgagttctcttccgccgccaagggggagacactcgaaggtgagctgttgagcttcagctgctttgtttaatacagtaggttaaattatgtatgcatcggtgacgacgagggggttgtttgcgtggacaagtcggtgtctcaattgcattatggatgctgttgagagtcggtggtgcctgagcacactcgagtaggtgtggaaacgagcatgccaagctttctgccagttagcaattgccaaatttccatttcactcaaagttccagtcaaatttgagatcagaactggatttaatcgaaaacaaaggaaaatgacgtagtggattaccttgtcagttgtagaaattaaatttgttcttaatttgcaatttggatcaatttttaccattttccgtatcttgagcgaattccaggtcactaaccatgtgtatccatgatgcagataccataagaaccgttgagggttattccgatattattgtactgagacattttgaaagtggagctgcaaggaaagcagcagatactgcaaatattcctgttattaatgcaggtgatggaccagggcnacatcccacccaggtaaatgttcactttctgatcttccctcctgtctcactttannnagtnncgtcnnntgtcatnnntgggnnnnnnnnnnnnnnnnnnnnnnnnaaaantgacagcatgtaaaaaatggattttttgaat

SEQ ID NO: 3131 - DNA, 345 bp, Zea mays
cacatcgctgggaccctggctaccgagaacttgacgttccagtcggagacggcgagcctcgtcttcgggtgcatcgtcgtgaccaagctctctccggggtccctgaacggcgcgtccggcatcatcgggctcggcagaggcaagctgtcgctgccctcccagctcggcgacaccaggttctcctactgtctcacgccgtacttcgaagacaccatagagccgagccacatggtcgtcggcgcgtcggccggcctcatcaacggcagcgcgtcgtcgacgccggtgacgaccgtgccgttcgtcaggagccctagcgatgacccattcagcacgttctactacctg

SEQ ID NO: 3132 - DNA, 347 bp, Zea mays
gcgcgagttccatcacccgatccgcgtcaacttcttcttcgcgccgtggatcgcctgcctcttcctcgtcaagggcctgccgcacccggtgtggaccatccaccacgtggtgtggtacatcctcatggcgcccatcttcctcctggacctcaagatctacggccagtggatgtccggcggcgaccgccggctgtccaaggtggcgaacccgaccaaccacctcgccgtcgtgggcaacttcgtgggcgcgctgctgggcgccaagatggggctccgcgaggtgcccatcttcttcttcgccgtcggggtggtgcactacctggtgctgttcgtgacgctgtaccaga

SEQ ID NO: 3133 - DNA, 923 bp, Zea mays
  misc_feature (15)..(16): n is a, c, g, or t
ccttccgactccggnnagaagcagcgacggtgccggcagtcggttactccactcggcggcggcccatcctttcctgttttctcctccagtcctacaaatacaggacacaacacgcttgctcttgtgatactctattaaggtacggcctgaagatgagagtcctcttcatctggtgagaacgaagctccttttttaaaaaaaggaatacgacgctcttatatgcttacgtggattttgttttagtttttcgctaatatatattaaagaatgttttgcttgaggaactactggtcgcctgcatttgcttcagtaaaggaggggcctgttcgacatcatataaagtttaattgtgtagtggtgagcttaatctactgtgcgcatgcggtatgcttagtgctggcggaacggccaatcagattcctatattaattgcaattgtgcaacaggtttgtggtgccaggggtccaagaccgagatatccccgtgtatggaaaactcgtaagaaaattgggactatttccaagtcacagaagcttgttgaatgtgtgaggatcttgaacgtttctctgttgaaatttaattgtgtctgtgtactcttgtgcatcaccttgacatcctgttgagcttgctgcattaactttagtccattcccacaatccaacaaagaaggaatatcttttcattcagcttttgcagcaaaatttcagttatctgtatttgtagcaactataagtctgcatggtttcattaaccactttttaccaaatttcactcactctacctgtatcactgtatgttacataaggggagaaacatagtttgtgtaggatgccttttgcaaatactcattttcctatggacaaattcaaattgggtgtctgaaattacatgtcaaacttttatcatctcatgcagataaagtc

SEQ ID NO: 3134 - DNA, 531 bp, Zea mays
cctgcttagtcatggaagaggtgatgatgatgctgattcaaaagaaaaagaaattcagtacatgctactactagacagtaagtttcctttttttttctctaaatgacgtgtgttttttgcagtggatgaagttgtcgtctacagggatggcgagagatcagctgaggttctgaggaactcaggattctcatttctgactttcaagccctacaacgggtacagatgaggttctgagagtttcaatttcctctcctcccccagacaaccagattgattaggtgacttgtgacaacgcaggttgggccattatacgatccctgaagaactggacgacctctgcaagtggcttagttcgtcgcttggcctcggccgatctcgctaaaagaatagttttttttttggcgtatgcgcaatgggtttggtgacagcatatattttgaggggaggtttggtttgatagcttgtaaaacacttgatgctagctgctctcttcgcatgtggcttttgtttccgtcgtcctaatttacgtac

SEQ ID NO: 3135 - DNA, 409 bp, Zea mays
catttccaacgagaccaatgccgtcgaacgcaatggaaagaatctgcccgccgatgcactgcacgccgtgccaatcaacggggcagtcgtcggagtccagcgcgctggtggggttccagggaatggcctggcggcgggacgggtcttgccggatgcctcgggagaactccagcagtgcctccatgtctgaaccagcccccgccgaggcagcggagcacacggcccagatcgagagccacaacaagatgagccgcatcgcaagatcctgctgtgcagccaggcaattgaagcaatgctcatgcaaatgggatggatttttcgagatacggagcttaagatgaaaaaggcagtagggtagggtttaagctcccttggaaccgagaaaggggattaaggatgaaaggtttga

SEQ ID NO: 3136 - DNA, 377 bp, Zea mays
gtaagatgggtaagaaaattagtactaagaagcaaaagaatgacaaaacaaataggcagtttcaagaaaatcacaaaaaggctgacattgtggatttgcttcatgaagatgatggagatgaaggcacatacatagactgcaatgaaattcgaaaacaaaaaacagatgacgtgagagtaaaatctagaggcaaaatgcaaagtggcaagaaaaaagtcagcagatgtcaggcaagtgatggttcgcacaatggaggcaaggaaatgaaattatcaagtgacatagaagtgtgcaacagaagaggagatggaacaacggcagccaattttgaagaaattccaaaagaaaaggccgatgctgtgaaagtgaaacccaag

SEQ ID NO: 3137 - DNA, 372 bp, Zea mays
tgggaggtagcagcgccatgggagaagcttggttggggagggctgccggacctacaggtgagtgcgcatggaagaagacgcaggggaaaacaagcgccggtcttggagaagaagttcctatgcgcaaggaacagagaggagggaactggagagagaatcggtagtcaccaggggaggagatgcagaggggcgccatggggaaagtgttggtcgcctgcacttggagattccatgtgccatgggagatgcagggggggcgcctgttcctggagccgagcacataggcgagcaagattctggcgaggagtggcgccatggaagggagagcagagacaacggcgccgtgcactagggatagaggagcagggagaa

SEQ ID NO: 3138 - DNA, 298 bp, Zea mays
gagcgcgagcttgagggaggggaagacggagcacggccatggagaggaacctcgagggagctgcgcgcgtccatggcgagctgggcgtcgagcacagggaggaatgagagtaggggcgcgacggccagttgccatgaccgagcagggaatggcggctgtcgggtcggcgaccacgcactccgtgttgtcgcccaggaccgccagcagcttgccgtcgagactcaccgacgtgcttttgacggaccacgggaaggtgagctgcgtgagaaggctgtgaggataaatgctaaaggcgaga

SEQ ID NO: 3139 - DNA, 665 bp, Zea mays
tcaaaacccagtgcatccgagttcaggtcttcaggcttggcaggtgaagatttctcgagaaacccctggaaacaactggcttccgtttccggaccttgattcccacacctgccatgcccctcaaatgcctggtggttctgctttacgtcatcctgatgaacttccttggtttttcggactgtaaacatgccttcgcatccagaaacctaacaaagataaattactgattgcatcgtatcagggacaatattgtttctaagttactgagtgtttcttcttggtccaaatcggagcttcaggttgtccaaaacacgggtaacattgagaagtcgtggatcgtcagaaggaatctctcgcgcctgaatttgaaaaacaagggagcatgagcagaacacgaatcaagaacagccagatgaaccagttcgttttaattcttcagagcttaattgctgacaggtgacagcagacaaataatttcagtgtacaaacagttgagacccaaatgaatatgtacatcaaggaccaatatagtaagttagcaactcattctatagttaggaagtactcaattattcatagatgttttcaaggtgaagaaagtgtaccaagtcacaagttcaagatactaaagcttaccgtcagacccttgtggtatgcctcaacac

SEQ ID NO: 3140 - DNA, 373 bp, Zea mays
actgccccagggcaggcagcaccgcccttgcgccgctggacaccacgacgcccaacgcgttcgacaacgcctactacaccaacctgctgtcccagaaggggctcctgcactcggaccaggagctcttcaacagcggcagcaccgacagcacggtcaggagcttcgcgtccagcacgtcggccttcaacagcgccttcgccacggccatggtcaagatgggcaacctcagcccccagaccggaacccaggggcaaatcaggcgcagctgctggaagctcaactcgtaaactactagctacgtactacgcccaatgcaatgcgttatggcaggcagatcagagccaatcaataataaggcctcagctcgctctct

SEQ ID NO: 3141 - DNA, 441 bp, Zea mays
cgagatgatgacacaagagacgacattacataagatcgtccatagcagcatgttgcagttcctctgtagaatcaatgaaggtcagctactgcgcatcatcgaagaatctgcaaagaacggcgtttctgcagcggataatggttgcattaccttgttgttgaaggagctttgcaggattgacaaggtttcaagcgcagaaaaggcgttgcagacgtttgccaaaacagggctggtcccgacaacagagatgtacaacattcttattgacggctatagcaagatcagggagctccaagcggcattcttgctgtatcgccagatgaaatcgcatgatcagcttgtacctaatgaagccacccatgaggcactactgctggctgtgcgcaacaacacaagcatcgtctactgggaggacgtggaggagttgtttgagaagaatgg

SEQ ID NO: 3142 - DNA, 320 bp, Zea mays
cactactgcacacgcagcagcagtttcagcagcagcaccagcagcatgtggtgaaagaggagagtggcagcatgatcgtgttcggcagagaccagcaaagctgcagctcatgggacagcggctgcgcacatagccagcagcagccacagtacggcaatggccatggcaaggagctgggcttcgacggctacttgttcggctacaacaacggcggcagcagaatgaagcatgacaactgcaggctgatcagcagctgcagatgctcaccagcaagcccatcagcaggtgtcggtggagtacaactacgaggagatcaagca

SEQ ID NO: 3143 - DNA, 375 bp, Zea mays
ctccttttgttgcttcgtcactaaggacgctacaccagttcatcactcgctacttgtccactagtccagtctcggatatctcagctcggacgcctaccgatctgtccgtttcctacagccgctccccaaaaattccaactgattcctccgcctcttccgagttccccagaatccccagtttgatgctgcctctggccccctgcccaccgattggatcttggtcgatttctccgttcttcagatcctgtgcgcatccgctctaggtagtggccctttgctcggctcccttcctcctccttcgcccatgctcggatctttcaatctgcgccggttttgagttcttgcccctgctagctgccggccgtcaaaggctag

SEQ ID NO: 3144 - DNA, 295 bp, Zea mays
atggatcaggctaccggatggcataaaagggcagcgacggggcacatggagccaggtcacagcacggcagatcgcccagtccaccggctcctgcagtcctgcccctgagctcctcccctcccctcggaatcaacgcggctgaactgaaccaacctccccgatcgaactggccggctgagcgagcccccggccccacgtatacttttacggaaacgcccacaccgccggctcgtcttctcccgaacccgaacctaccctccccgattcaaaccgtcgctgccgtcgccgagagagt

SEQ ID NO: 3145 - DNA, 394 bp, Zea mays
tttgtgctggctgtctacctcctccggtgcttgcaaagaagagctcagcaatttaggtgttgtccacctcacacctttattcatcaacttcttgcccccctcgacatgtcaaaatcccgtctttttgccgctaaggcacttcacacatcaccagcgtcgttgcacttcacacatcacggagacgagtggcgcggctaaaaaaaaatcaaagtaagcagagtagtcaatttcctctgatcattgggcacacactttggcaggtcactgcaacccatcatcggctggtgagttttctccttttgctggtcaccggagaggagcttgaagagccagaggccccatgtgaagcagcagtcgctgctgccgcggcatcgtcttcgctcttgtagctgag

SEQ ID NO: 3146 - DNA, 530 bp, Zea mays
tttgtatcatacattgtattttctttgttatgccatctgcggcgtcttatgttaaatgtcccaatacacgagttgtgaagcattttatagctgcagctacaatcgtgagatatctaactggcactgcacattactctttcaggaggcagagaagcatctttcagacatggtgaactcaaaatctctgactgcgaagatcgacaggccgatgggagttgtgagcttccgagtagttcaggactgcaacggcacacttaactcgtgggctacaaacctcgagcagcttcttgaccttgtcgagaagagctgtcaccagatacacaaggagactatgatccacaaggcggtattgaaagcttgactgattggcgctggctgtttttgcttcgtaagtaagatactgtaccagcagaaggacggggatgctatttgttgctgaactcttgctgcacattatttgaattcttagatctgcaatcagatacctactcctgaaaagctgatccggctcctcattcaaactcagttct

SEQ ID NO: 3147 - DNA, 356 bp, Zea mays
  misc_feature (348)..(349): n is a, c, g, or t
tgccctatggtggtgcagggggcatctctagctgagatgcagggtaaggcggcctcccagactccacctcctgctgaggcgtgggggaagagttctgctgctcctgctcctggtgtcggtgctcctggtgtcggcgctcctggtcctcgtgcaggcgacgatgcagtctctccaggtgactagactgacctggcaccatgagactgtgacagccctcccaagttatcgggcccacgtgcaccaatccttgccttaatggcctcgggtggctgtgcacgtgtaccaggtaacttaacaaggctatcgagttcaccaactggaactcatcatcccaaggatctcccacannacaggta

SEQ ID NO: 3148 - DNA, 824 bp, Zea mays
  misc_feature (331)..(335): n is a, c, g, or t
tctttggtttgaggtcaaagtaggatgaggcgggggcgacaccgtcccctcaattttttgggatcacgccgtcaccaaaaaattactccggtatttatttcaccccacgtgattctcatccaaacactatagaaactgtagccatccccttccatccctccttatacatccaaccaaacacaccctaaatgtttatattgtggggagctaggccacaagaagaacagccctaaatgtcctttaaatggcacgaagaagaggcgtgtgttttatgtgttgatctttgttcctgtttcctgttctgttttttttttcaaaaacttacagctgnnnnntattcttataggccaaggaagcagcgacataactctactcaaaaatggttttatgtgttgatctttgttcctgtttcctgttctgtttttttcaaaaacttacagctggtctgtattcttataggccaaggaagcagcgacattactcaaaaatggtttcctcgcgacgacagatttacacaagaacctagaacaccgcatttcgacaaagttatacaagaccctggtacaccacatgaacagccatcgtcttcgcagccacttccaagggtattgataaaaaaaatcactccaagaaagaggaagtcggttccactaagcatggacgagatgtagtatctgttagttgtatcatccatgtgttgtcagcatgtgactgcagacatgtgccatgtatcagacttattgtatcagactacgttcagcctacttgttagtagctgagttattgtgtttcctactacgttcagactacatctatcagactta

SEQ ID NO: 3149 - DNA, 362 bp, Zea mays
gaaatggccacatacaataaatgcctgggagaaattgacctcatgggcattccacccgccccaagaggcttgcctcggattgaggttacattcgacatcgatgccaatggaatcgtgaccgtctcagccaaagataaggctacgaggaaggatcggaacatcaccatccgatcttcgggtgggctgtctgaggctgacatctagaagatggtgcaagaagctgaactacgtgcctagaagaatcaggaacggaaaagccctcatcaactaatctaattcttttgtccattattttgatgagaagtccatccctcgataagtgttcccttcatgagtttataacaccaactccaacatgctca

SEQ ID NO: 3150 - DNA, 389 bp, Zea mays
aggttttgcgcaagcatgaaggaaacaatatatcaaaacacatgacacgaggcattttaacctaacaattaatataaccacaacacccggttgcagccgtccagaaaactgacataactaatataaataattaatccagtccatgaaccaatagtaggaactagcgaatcaatgtactattactagtcgatgtaaaattcacgagaacgacgatgatttcggttgagaccgtccatcaagcacttagcgcgtgatgaacaacgttccacacgtcgtcgcccaacagctagaatttcactccaattatcaaccacacacatcatcaaattaaaaattgtgccaagcgaaggggcacaacgacgtgcggatacacagacctggagcaagac

SEQ ID NO: 3151 - DNA, 577 bp, Zea mays
  misc_feature (571)..(574): n is a, c, g, or t
cttcagatgatgctcctcaatcacattcagccagttgccgcggacaatttggttggcctcttcgattgatgtagcctcaggtattgccctctttgcgatcgacattgttgcaggctccgcctctgctgcagcctagctcattcaacatcaaattgtcagtatgagcgtgcacaaaatatgatatccttcggctgtttttttttcaacggcgtcacattttcaagattttagagaaagaacggtaacctaggattgttacgaaaagttgagctgcagattatcagagtatataagaaaacaatgagaagctgacaacagaaaagttaattaccagccatgatagattcccttcgtcgtaggcatgaaacgggttgagatagtctgatcaagagaaatgaggcgttagcattatgtactccagtttactttacttcatatagggtatcttttggtcgaatataatgctgaaattaatcaacggaactgaaggaaaggaaaggaaaggggaagtgagctgacagtcagggtacacgaggtttgggtcttggattctctcgaacacctcgtacannnnaaa

SEQ ID NO: 3152 - DNA, 458 bp, Zea mays
atgatatcttctatccattgatgtctcaggcagtccaaggagcttcataacaatttggaactggcacaaaagagcattgtagaccatacttctgctcagagaaaacgaaaggcgagagtaatttcagagtatgctgttatggcccgttctatcattcgtaagaagtttcagcagttccaagaatctgctatagctgaaagagtgaaagaagaagagaatgctgtgaatgatgccaaatctgacagagtgaaggatcctatgccggcaaatacatctgccattggaaagatacagaacatagataccagcttgggcatgtcagccaccggtaaagtactaggtgagaactctgttgtttttatattaccattaatctccacgccttctgaagattcgttaaactgtcaaggttttcttccttttttgtacttagatgatgaagatgaggttccagaagt

SEQ ID NO: 3153 - DNA, 347 bp, Zea mays
gggggcaagaatccaagacgaatgccaagaagaaaaacttaggacgctcactgaagtgtgcccatgccgaacctgatggggagaaccgaaacggttgcagcagcactgatgcagacgagaactcacttgcagaaactgctgcctctgatcaggagaggaaggcggtgctgcaggaattgagaatcgaggtggatacatcgcgagctgacaattccgatgacaacaaggagaatctgtcgagcgctccgagtgatgaagaagcattgaacaattcacattctgaaaatggaaacagacagttggagaacaatgataatgttcctctgaacgaaaatgttgctctgaag

SEQ ID NO: 3154 - DNA, 569 bp, Zea mays
atatgtgaactctttgttggcattttcagattcataaacggtcatttgggtgatgaatatctgactattaacttgcaggataagcttggtcctttctgtagaagcgcagtagattgtgctgttgtattagacacaattcgcggaacggatgccggtgatccatcgtcgcgtgaggttgctttgggtgatccatttcatgttgacatcaccaaactcactgtaggctacctcgatgacgctgagatggaggtagtacagagcttttaatctgctcagctgtctatagttttgtgtattgatcattcctgatatgctcctctatcacggtacatgttttcgtcgtcgtgattataccaggttgtcgatgttctttcctctaaaggtgtcaagctggtccccttcaagctgaactacactgtggaatcagtccagtccatcctgaacataacgatggacactgatatgcttgcgcactttgataactggcagcgggaaggacatgatgatgactatgaggcgcaagaccagtggccggtagagcttcgtcgtgcacggttaatcccagcggt

SEQ ID NO: 3155 - DNA, 347 bp, Zea mays
acctcaacgccgacaccttcacgttcgcggccgctgatggctccggcggccaggtctccgtacccgacctggccttcggctgcggtctcttcaacaacgggattttcgagtccaacgagaccggcatcgccggcttcgggcgcggcgcgctgtccctgccgtcgcagctcaaagtggacaacttctcctactgtttcaccgacataacgcggccggagcccagctccatcctgctcggccttccggccaacctttacggcgacgccggcggcgtagtgcagtccactcctctggtccagaacttctcgtctctggaactatactacctgtcactaaagggcataacc

SEQ ID NO: 3156 - DNA, 720 bp, Zea mays
  misc_feature (662)..(665): n is a, c, g, or t
  misc_feature (672)..(686): n is a, c, g, or t
  misc_feature (689)..(715): n is a, c, g, or t
tctcgccttccgtccctgcgcatccgccgtgcccatggacggcggctggtcgaacggcggcgccacctggtacggccccgccaagggcgctggatccgacggtacgtacgtgtgcaattaccatgcatgcgtcgcatgcgcggccatgatgcaagtgtgcatttattctcattgcgaatgatatgatagactacgataatatatatgtgcgttcacgatgcatatacgtaggtggtgcgtgtgggtaccagggtgccgtcgaccaacctccgttctcgtcaatgatcaccgccggcagccaatccatcttccaggacggcaagggctgcggcacctgctaccaggtacgtcagtattgttatatatatacgttcatggatctgttcatgtatgcatgcacagtgcaagtccactgtaagtactagctagctaaagattactaattgttggattgcacacatgcatcttgtaggtgaagtgcaccggacacgagtcgtgctccggcagcccggtgacagtggtcatcaccgacctgtgccccgacgctacgtgccaggtggagcccgtccacttcgacctgagcgggacggcgttcggtgccatggcgaagcccggccaggccgacatgctccgaaacgccggccgcctacaagtccagtacnnnncgggtgnnnnnnnnnnnnnnnggnnnnnnnnnnnnnnnnnnnnnnnnnnnggggg

SEQ ID NO: 3157 - DNA, 596 bp, Zea mays
  misc_feature (542)..(544): n is a, c, g, or t
  misc_feature (576)..(581): n is a, c, g, or t
gggcgcagacgtttcccgtgcgcaatcggtgaagagccgcatcgccaggagcaacgacgcgcgcaggctcaagaactggatcacggtgctccaggaagcgcaggccgccgtggccgacggcgccgactgtgctccgcaggtcagcgctcgtccgccacgatatgtgccacacagctccatgcatgaccctctgtacttcacgtgtgacaaacgtattcctctcggtgcacttatctgctaggtgatggcgttgcaagccgaggcgttgctgaggctgcaacggcacgacgaagccgactcgcttctcagcggcgccggcgcgccaaggttcggggtcgacgagtcgaccaagttcttcggcaccttcggccacgcctacttcctcatcgtgcgagctcaggtcgacatggctgctggaaggttcgttcattcccgtcctgtcctgccccgacacagaaacgcactccccctctccaaacaaaacgtggcgtggttgacgcttgaattctcgtgaccacatcacggtaggttcgaggacgcgnnngccacggcgcagacggcgtttcagctggaccnnnnnnaccgggaggtctcgg

SEQ ID NO: 3158 - DNA, 391 bp, Zea mays
gacgatggagaacacctcagcttcttaagcacccttttctcaatcctccagttccaagggatttacctccctctgacgatgatccatataggttgctcattgagaggatcagagtccactgggataacccaatggttcaaaaacttcgtagtttaattgaagaactcgatggggatcagtaaaaatgggtttttaacaatcctgattgatactcgatctagggcctgggtagtggtggcacaagtgttttagtttctgtattgttcctgattgatagggtactgttgtaatttgtaattagagagtggcggcatcggttggagacgtcggagcatattatgatgccctggcatttttgcttcctcgtgtttggaggttgatgtgacacttt

SEQ ID NO: 3159 - DNA, 244 bp, Zea mays
ttgtctaaaggaagagactgatcctgagaaaatgcttacacgtggaactcagattaccctgtttctaagagtatgttgctatgttcatctgagatgtcatgaaatgtttttttatggcaaccttgcattaatatgtcttctatagcctgatgataagtacgagtttgcggacccttcaaggattcaaggcttagtaaaaaattactctcagtttgtgtctttccccatatacacatggcaggag

SEQ ID NO: 3160 - DNA, 496 bp, Zea mays
  misc_feature (483)..(484): n is a, c, g, or t
ttctttcatcgaccataaaattcgatattttcgtcaccatggcaaccctcacacatgactccactattttgtgttcttctatttatttcacggtcgatagtgtgatatcgaaccccatcgacaagacatgctgaaaatattcgaacccgaaggtccggttcacatgacaatgcaaataggtcatcactaatgtcttctccatccacgtaacgtagttttgcaatctaaacaatagaataataatatggtgaaaatcaacacaaattatattttttaataaatattatattggcataaaacttacatgcttcttaaaccagaaagaaaattgcttatcatgggatttttgaacataaggagttccttgatccgctaactcttccttgtatatcctgtaattatgaaacatagttaattcgaacatcgaatctaataattagcaagtcacacagataaattagaattatatcagggtgttatacnncaaatatgctca

SEQ ID NO: 3161 - DNA, 500 bp, Zea mays
agtagatcgatcaaactgcagcgttctgtctgccccatggttttcagaaacaactgccgcaaacaagttcagcagttgagctcacatctgaatgcacctctcactcacctttcctgcagtgctgctgtggctgctcaccgcggcatgcatcaagaccgggaggctgaagatcgctcggcgcgcgatcgacctagccgaggcgaggctcgcgagggacggctggccagagtactacgacggcaagctgggtcgctacatcggcaagcaggcgaggaagctccagacgtggtccatcgcggggtacctagtggccaagatgatggtggaggatccgtcccacctcggcatgatctccctggaggaggagaagccgaccaagccggtgctcaggaggtcggcctcttggacagggtaaggtagtggcggccacaaaaacggcagcaggacccgagttctggttctttgagctaacatctcgaatttctctgcaacttcttgct

SEQ ID NO: 3162 - DNA, 406 bp, Zea mays
cagaggacgacctcagcaacctgcgctacatgcacctggtcatcaaggagggccttcggctccacccaccattgccgctcctgctcccacgggagtgccggagctcgtgccaggtccaggggttcgacgtgccggcgggcacgatggtgttcgtgaacgcgtgggcgatcgctagggaccccagccactgggacaggcctgaggagttcgtgcctgagagatttgaaagcagcagcgtcgacttcaaggggacggacttcgactacctaccgttcggggcaggacgaaggatgtgcccgggcatggcgtttgggctcgtgagcatggagcttgcgctcgctagcctcctctaccattttgactgggagctgccgcctgggatgacggccgcggatgtagacatgac

SEQ ID NO: 3163 - DNA, 506 bp, Zea mays
  misc_feature (474)..(479): n is a, c, g, or t
  misc_feature (482)..(496): n is a, c, g, or t
gcctcctgttgccctggtctccattgggccctttgccagattttctttcgcctctccgccggcgacgaacaccaccaccaggtgcgcccaccccttcttttccctctctgccgcgcgaaactgagcacccaagccctaacttaagccttttgtattcggatctgatctaattacgaagtttatacatatattatacataccactaacttcgattttttcttacaaaacttatcgggtgtacatgtgtacactcatgtcatttactgagtcttcctagtagtggagcttgggcatgaaagtaggagggggcaatatgatatggaatgtaaggagaaggggtatgttagcgttccattattatcacttaaagtggtgaaactgttttctagcttaggaggggccatggccactatgatcttaattaagttccgccactgacatgctcttgaactgagcactgaataattgatcagnnnnnnctnnnnnnnnnnnnnnnattttacttt

SEQ ID NO: 3164 - DNA, 727 bp, Zea mays
gagtaagcgctgaagagattgatccagatagagtggaggtttgaagcttcaacttatttgcatgaatatcatttttatttgtatgcttggccctcatatctctttactacacgcatatggtagggtttcatatgacaaaaacttgtgttcccaagtatgcacctatttttgcatgtgaattgcagcattccaagattgcttaaaattatttagttgcttcgcattggaaccaatttctattcttaaaaggtaccatcattcattgcagtcacgatctgtgtttgtcaagaacttaaatttcaagacaacagatgaatcattgaagcagcatttcagtacaaagctaaagagtggcagtcttaaaagtgcaacggtatggattattgtatgtgctcttactatgtatatcaggagcatactgttttatccattttctttgtctgtctttaggttaagaagcatgttaagaagggcaagaatgtttcaatgggatttggttttgttgagtttgactctgttgaaactgctaccggtgtgtgcaaggatctacaggtaacacccatccctcctcttttgttttctttttttcgcctctttcccttagatgctcatatagatgtgcagcatgctaaatgtttctttggttcatagggaacggttctggatggacatgctttgatcttgcaactgtgtcatgtgaagaaagatggtcaagcggcaaagaaga

SEQ ID NO: 3165 - DNA, 660 bp, Zea mays
  misc_feature (649)..(651): n is a, c, g, or t
caggggccgtttaaattgatggatatcttgtggtatcaacagcgcctcgtagtcatctaccatgacctgtcaacaaagcaagcaagcagtcaagaaaacttgctcatgaaaaaaaaacttgcgacgcttgtcgcaagccggtacataaggcagtgttacggcattccctaccttgtatttatgaccatgaaacgtatactcgacaagtaatagcttcgggtctccaggacaaggatcgtagaaacccattattccagacttctttatcccgtcatgaagctgcaggtaacagataagaaaattcagtgcagagtaaccatgcaactatttgctaccttgcagaaaagtgtaaatttcggggtttcaagcgcgtatatagaattccaatctattttcaggttgcaacccatacgcaaagccagtggcaaaattgcaaatgcccagcagaaacttgagtaggttcatatcttgggaaaaaaaaacacttgtcaccaatgtaactcgaatgtaccttgagctggcctgcctcagtaacgaggaagttcagtgggatggtcacatcaaatacttgtgaagccatgtcattgtgtatatcattcaattcactgctcattttgattttttggcgactgccatatagagccttcgnnntcaccaatc

SEQ ID NO: 3166 - DNA, 446 bp, Zea mays
ctgcgacttcccctgcattaaggatgacctcttctctctaggtcttacaaccctagacgtggaatcaggatcagtgtgcacggggaaccagcaacggcagcacgtacgtggaaccggcaccgacgaattgcacggggcagcagacaatcgtcgcctccttgactccatccgcgaccttcctccatccgtggtgccagcaaactgcacgagaagacctaggtcaggtgtcctttactttctttgatactgctttctttaaccacttattacttgttctatgtttgataataaattttaggcacagatgtaagtcactactagttgcccatgtttactagttagttgttcatgttcactagtaggtagccaaaagtactcaattaagttatgcttgttaattttacctaggtgactcggtgctagccacactattacaagatgcctcc

SEQ ID NO: 3167 - DNA, 672 bp, Zea mays
  misc_feature (246)..(246): n is a, c, g, or t
tgccggattcagaccaacctttcgtcatcaatgccaccgaagagaagtgctcccggccgatatccgcaagatatagcgtattcttttagctcttctttttcagcctttatcagttccttaccaaataagttttggaagttaaaaatttcatcctctgaagtgtcttcagctatttctttctccttttcgggttctggggccataatttcttcggtggctgcggcagcttcttctgcggccatgttntctttgccggattcagaccaaccaccgcgcgcacgcggtgcccgacggcctgcccgtggccgtggatggttagatgcgatgcggatgtgaggctgcaacccggcgagcgcggcgccgccgtccgtcttgcgttcaaacagacgagggatacgccggccagacacctgcacgcgtgcgcacgctgggagggggagggcggtcaaggctccaattatcccttggtcgccagtcgccacgacgcgttgccgaggaggagcaggcggcaggccaactcagtggagtggaagcagaagcgtgctgggtctgggttgctgccgtgtgcggtgcccagtgaccagcctttattttcccctcctttttttgtttctgagacggaggaaacggagtaggagtacttttggttgctttcgtctccgttctctatac

SEQ ID NO: 3168 - DNA, 335 bp, Zea mays
gacgtcgcaagatcaagagcgctgtcgcaccacaagtctgagatgtttcgccgcttcaagcgcctggttcaggtccgtcatgagctactggaagggaaatgcgaccttggaaagtttgtagacgaggtctgcctcatcctaaagtacgtagtgagccaatgcttctcggatcaagatcagatcgacactgtgagccgtgatacagaggattttgatggagctaagccatcaggtgcggttacagcagacggtacgcatgacactgaaagcgctaaaccaacagcgacttcagcttttcggacagaagcagatggagaaccagttcagtcagttga

SEQ ID NO: 3169 - DNA, 348 bp, Zea mays
gtactaccagtcctactccatggtcggcctcggcctccccggcagcgggcgcgacggcatcgaaagccacgccgcgtacgatgcccgcgaccctctcgcggagaagaagaccgagatcgcccagtgccgccggaaggtggaggacgagatgacgaggcacgccaaggccgtcgaggtcacgcggtccatgacgctgaacaacatacagaccggcctgccgggcatattccaagccatagctgggttctcggggacagtggtcgaagctcttgatgtggtctgccgccgagctgggtctgtgcggtagaagaagctctttgccatcaggattaccaagagaccatttgc

SEQ ID NO: 3170 - DNA, 409 bp, Zea mays
gtacttcgacaccatgaaggagatcggcgcgtcgtccaaggcgtcctcggtgttcatcccgcatggccccggagcggtgcgcgacatcgccacgcagatccgcgacggcctcctgcagggatcctctgtcgccaaacactaagctgcctgcctgctgttgccgctgctgctgctgaagaacaccaccaccactattatatatataatataatgatgatcttggtaccagagtgatgcttgtctatattgttcatcactcatcgtcaccatctgctaggatggctatctttatgcttggggattggagaaaaccttatctaaccttttagggaaccggtaatatatatataatgcagcatgagtttgcagtatgttcatcagaaccttttagagtgtagatgcatgaatg

SEQ ID NO: 3171 - DNA, 349 bp, Zea mays
cttgattttgatccaaatatcaaatagatatttctacaaacaataacctcctggccatattagggatctggatatagttggagttgtatgacacaatagatgaaaatttacttttctttttcagcgtttcttatatggtgccacatggaataatttctcaaaaaaaaaccgtctatttcaaattgtcagtgtttttccattggaaagctacaacaatatatagcccatgcaaaaacccaaactgatcacatcagattgatagatgttgaattaatagatgagaacattttcatgtcctaacttatgtgctgtgcttagtatagtataatttgcaacctttcttccaggg

SEQ ID NO: 3172 - DNA, 419 bp, Zea mays
agtttcagcaggcctcacccctccaatccaggaacagcagcacgagaagccgaggcagcaccgccgctactccgcctcgatgatcttcttgggctctgcgaaccagagaagaagcagccatatagacctatcgatcatgccgatcaaagggtaagacgaggcatgaagggattcggaccgtgtaactcgggcggtcgggcatctttgccccaacccacgccgcgtgtagcctctaggtactggtccacgaggtggcggcacttctggtggtggttgatcccctcgatgcggtagcaccagcggaggcgctcccggatgatcttggcggtctcgatctggatccacttctcccgcaccaggtgttcccggtactccagcatagccaccgggtccgcatatgggttcttcgggtcgaagtt

SEQ ID NO: 3173 - DNA, 298 bp, Zea mays
  misc_feature (246)..(248): n is a, c, g, or t
  misc_feature (257)..(258): n is a, c, g, or t
  misc_feature (269)..(277): n is a, c, g, or t
  misc_feature (291)..(294): n is a, c, g, or t
tcgcttcggaagtttcaacagtcttcttcggagttatgcttgaggacttaattgtttctagaacatctagcacgttgaccattctttttcttttcggagtcaccgctggccccttttggatttttgttgtgtcaacatttgctgaaggacttaaaacttctgatattttggatccctcagctgatccttttgcttcttccattttttctgttgttggcgcttcggccatttatgcggtttctggtnnnaaggctggnngttcaacctcnnnnnnnnnagaggtttctccgnnnnattc

SEQ ID NO: 3174 - DNA, 433 bp, Zea mays
gtcgctgactcgcggggtccgctcggtcatccagccttgcgctcgcgtttggttcactggtagtggggccgccccgtcagatgaccttcttccccgcgtgaaccggatcgcgctgaccggatcctccacgatcgcgcggctccgttgccagctgaagttgttacggcctccaccatttccgcactaacttcgccctgttatctagccgagacctcgcgacctcctctcttctcgtcctcgctcgcatatgctcagatttccccgcatcgccacacgccatgaccacccgcgcgcgggtcgggtgtgtggggactgtcctccgccgtaacccagcaccgctcctctctggttcatagccgtcccactgccgctgccgcggggctctgctggcggccatcgtcacctatacccgaccgccatgggaggaagctgt

SEQ ID NO: 3175 - DNA, 307 bp, Zea mays
tttgtagttctgtttgcttgattttgtgttagttgtgtgtttcttttccagcttgctgagattgacaatcatggaaaactggcatctaatgagatcaacataaatcttctgtcagttttttaattgtgttgtttgtatgctttctttccagcttgctgagattgtcaatcaaggaaaactggtgtctgatgagatcatcataaatctgctgtcaagacgcctggaagagggagaagaaaagggtgaattggggttcatccttgatggctttcctcgaaccatgagacaagcggtaagctaattattg

SEQ ID NO: 3176 - DNA, 398 bp, Zea mays
attcttgacgtaggaggtgaacatcttcttctcccccgtcatatggtttgtgcatccgctatcaataatccagcttgaacccccggatgcataaacctgcaaggcaaatttaggcttgagacttaggtacccaactcatgttgggtcctacaaggttagcacaaatattcttagggacccaaatgcaagttttgtctcccttgcattttgcccctaacttcctagcaacaattttcttatcctttctacaaatagcaaaggaagcatttaaagcacaataaattgtagaaggttcattcactactttcctaggagcatgaatcatattctttctaggcacagcatttttcctagacatatttctaccatgcataagcgaagaactagaagcaaacatg

SEQ ID NO: 3177 - DNA, 375 bp, Zea mays
gtcggaggcggttccgaccaggcgactaacccggcgacgggccggcgattcgacttccgccaccgtcttcaaccttcaagccatgcgcattgtagcatcggccatcggaggccgactgagtagccctaactgatcgaccctctcattccacccctgtcgagcaagaaggccgactgagctgcacacgtcgaaggtattttttcttgattctaagcttgctaccaccatcaaaacctaacttcaacctacctgaaacatgaatcagtccatgtattcaccgatttagttgtttttttagaaaaccccgtcccgccctggggattattacgggtttttgtttcattaggttggcgcagtaacaatgtgtgtttggtt

SEQ ID NO: 3178 - DNA, 390 bp, Zea mays
tgaccctctaacactcctcttctaaagacagtaacacctatatccgtaaaaagacagttgtagcccattttgcataattgagaaacagaaagcaaattgtaatctaaagaatctacaagaaaaacattggaaatataatggtcaggagatatagcaattttacccaatcctttgaccaaaccttgatttccatccctgaatgtgatcgctctttggggatcttggtttttctcgtaggaggagaatatcttcttctcccctgtcatatggtttgtgcacccgctatcgatgatctaacttgagcccccggatgcataaacctacaaaacaaatttagttcttgattttaggtacccaaacagttttgggtcctttggcattagatacaag

SEQ ID NO: 3179 - DNA, 304 bp, Zea mays
atttatagagcggatttttatgttcaagttgtgttatttttaattcttttataaattatgtaattttatctgattagttatgtaatcagatatcaacgagtagagacgcaaggcggatcaagagaggtgccctcgtccgcatcaacgccgagcttacccgtttcagcggtaggagctacagggttcttctctcgctaaaagctacagggctcttcgctcgcttttgcaacaggctcaaaatttatagcgttgatgccccggggactagatttgtgggggttctctttgtcatcatttcgagcat

SEQ ID NO: 3180 - DNA, 537 bp, Zea mays
tcatgggtctggtgcagcggtgagaactctcactgagtcaccaggtcgcacattcgaagcagcctcttcgtatttgcggggaagacttgcctcggtttattccttccccagacctcgctcctgtgtgagcctccggcactagatccgcccttttttatacgctcatgggcgtccaccccagttgacataagaagtggatgaaagaaccaagacgaatcagcaatgaagcaaaggccatgtagtttgtaaggtccctagtaagtcagcttcaacttgctaaacagctcatgacgagacctggagcaggaatactggtaagtcagcttcagcttgctaaacagtttcatggcgagacttggagcatgaatacttcaagtacttatcatgtcatatcagactcatttttttggctcatttattactgaattaaattgggatgaaagtcgaaatgcaaaacttttagatggaatgcagatcttctgatcttcatgtggttgctccttaagtgaagccatcacatcagacaaactacttggc

SEQ ID NO: 3181 - DNA, 354 bp, Zea mays
gtcctgggcctgaggttcggtctccttagccccaccaaccattttctggcgcttctgggaggagcccgaatcaagggatgggtccgagacaaaagacccatcggcgcgacgcagtcgatgtcgtctttcttcccccgacctcctggcggccgaatcaaggggtgggtccaaaacaaaggacccatcggcgtgacgcagtcgaggtcgcccctcttcccctggcctctcggcgacgtccggggtagaggagctgcatgcaggctccttgcctttgcccaagaagctgggccccacaggagggaccctgggggcgacatcagcaggctaggggcctcgaactggtgtaccaggtat

SEQ ID NO: 3182 - DNA, 455 bp, Zea mays
gcgcagaagaatgatgagaagatcagtgagattcggcgactgattctagatggcagaggcaaagattttcgagaagatgcagaaggcgtgatatggttcaaagaccgcttgtgtgttcccaatgtccagtccattcgggagttgattcttaaggaagctcatgagacagcttattcgattcaccctggcagtgagaagatgtatcaggatctgaagaagaaattctggtggtacggaatgaagagggaaatcgcagagcatgtggctatgtgcgatagttgtcgaagaattaaggcagagcaccagagaccagctggattgttgcaaccgttgcagatccctcagtggaaatgggatgaaattggtatggatttcatagtcggattgcctcgcactcgagccggctacgattccatttgggtagtagtggctcgtttgatctagtcagcccactt

SEQ ID NO: 3183 - DNA, 134 bp, Zea mays
tgatcaaggtggttgcactatcacggcaaaccagccacgattcctaagctcgattatataggtaaatcgtgctagtaccattgctactagtacataaattagcagctaaaaaaatgtcactatccaacaaggtc

SEQ ID NO: 3184 - DNA, 475 bp, Zea mays
tgctgaatttgtcattgtcacaaactagtgtgccatatagcatgtaattgttttcagtgttagattgatgtctgttctgctctgggcagtaagctatgacttaacatcacttaataaaacttgtttactcttaatgaaaaacgtggcttgatagactggtcattataaaaaaatgatgactgttgcatctcattgccctctaacagcctagtcttataaccaaacaataaacttgttgctcatctattgattctcagttctactagaaggctaggtgaaataagcaaacaatcagtatacttcatttctagaatcgtgactggctgtctggcatcactgaaaaatcaccattgtgttcatgctggccactagcccactactactgcatttatgatttatgtaagcaccgagtgaccattagcagctcaatttctctgtttgaccttagcaggcacgtgaacgttctccatgatca

SEQ ID NO: 3185 - DNA, 1019 bp, Zea mays
  misc_feature (463)..(908): n is a, c, g, or t
  misc_feature (916)..(967): n is a, c, g, or t
  misc_feature (969)..(1016): n is a, c, g, or t
gagccgagggactcctacgcctccgggatacagatacctcactcgtcaccttcgcacgaggcaactcacgcttggtgaagtggtccagctagccgacaggcgagtcctagtgctcaaaatgaggaaaaaacacggctccgtgccaaaaatacatacatgttcaggccccgacagccacaatgaacagacaccggcactcaaggtgccattacaaacggaactccgattccacctccgcaggtacgaacaaccccccacgattggagggcctacggagcaaccgaaggccgacggatggctcgccgccgcccgaagagcagcagcgataacaacttctgctccgagcggccgaacagcagcagcgatgacctcagggcggatgctgctgccataaaaccctcgcccacgtccccactcgaggggcgaggacaagcagaatgtcgtagagttggaggtcagtccnnnnnnnnnnnnnnnnnnnnnnnnnnnnnnnnnnnnnnnnnnnnnnnnnnnnnnnnnnnnnnnnnnnnnnnnnnnnnnnnnnnnnnnnnnnnnnnnnnnnnnnnnnnnnnnnnnnnnnnnnnnnnnnnnnnnnnnnnnnnnnnnnnnnnnnnnnnnnnnnnnnnnnnnnnnnnnnnnnnnnnnnnnnnnnnnnnnnnnnnnnnnnnnnnnnnnnnnnnnnnnnnnnnnnnnnnnnnnnnnnnnnnnnnnnnnnnnnnnnnnnnnnnnnnnnnnnnnnnnnnnnnnnnnnnnnnnnnnnnnnnnnnnnnnnnnnnnnnnnnnnnnnnnnnnnnnnnnnnnnnnnnnnnnnnnnnnnnnnnnnnnnnnnnnnnnnnnnnnnnnnnnnnnnnnnnnnnnnnnnnnnnnnnnnnnnnnnnnnnnnnnnnnnnnnnnnnnnnnnnnnnnnncccccccnnnnnnnnnnnnnnnnnnnnnnnnnnnnnnnnnnnnnnnnnnnnnnnnnnnncnnnnnnnnnnnnnnnnnnnnnnnnnnnnnnnnnnnnnnnnnnnnnnnnccc

SEQ ID NO: 3186 - DNA, 626 bp, Zea mays
  misc_feature (507)..(515): n is a, c, g, or t
  misc_feature (521)..(543): n is a, c, g, or t
  misc_feature (545)..(545): n is a, c, g, or t
  misc_feature (552)..(578): n is a, c, g, or t
  misc_feature (581)..(621): n is a, c, g, or t
tgagtgaagaggcactgcaaatgttccgatatttgttagaacagtgcatcaaaccaaatgctgttactatagctagcgtcttgccagggtgtgctagcatggcggctttgcctcttggtcagcagatccatggttatgttctaagaaacgcatatgaaagaaaatgttatgtggagagtgcactgatggacatgtacgcaaagtgtggcagacttgacctgagccattatatcttcttaaaaatgtctcagaaggatgaggtgacatggaactcgatgatttcaagcttttcacagaatggaaaaccacaagaagctctagatcttttccgtcagatgtgtatggaaggaataaagtacaataatataaccatatctgctgccctatccgcatgcgcaagtttaccagctatatattatgggaaggagattcatggtgttaccataaagggtcctataaaggcagacatatttgctgagagcgctctgatagatatgtatgcgaaannnnnnnnncttgannnnnnnnnnnnnnnnnnnnnnnanatatggnnnnnnnnnnnnnnnnnnnnnnnnnnntannnnnnnnnnnnnnnnnnnnnnnnnnnnnnnnnnnnnnnnncattc

SEQ ID NO: 3187 - DNA, 496 bp, Zea mays
  misc_feature (480)..(482): n is a, c, g, or t
gatctcactgcgatttctatacaggatccttaaagcacagacgcgcaagtataagctgcacaagaacgtttctctcttgtcagttgcgcagcgttgtccaccaaacttcactggtgctgatatttacgcgctgtgtgcggatgcatggtttcatgcagcaaagcgatcagtgagtacttctgccgacccgttacgccatatgttgggctcttcctagccttgctccgttgatcttacgtgtggtatttttaggttgaaacattcgaaaccgatccttcaagaagtaatgacgccagtgccgaagaagtcatcgtcgagatcgacgattttatcacagtaaaactctaaatcactttgagtaagcacagtaatagcctttgtggtcgcatgctgtggaaataagttgttgtgtttgtacgcaggtgttaggagatatcgcaccgtcgctctctctggacgagctacaaaactacgaacagnnnggcagaagatcgaa

SEQ ID NO: 3188 - DNA, 439 bp, Zea mays
gagccaccttccctctttaaaaaggctattgttttatcttccccacctacatttgttcagacataataaacacatacaaacgaagaaaacaaaatatgaaaactgcaagtgcaccaaacaatatatatcatgaactgtatcagaaagacaaaatgtaagggtttgattggtttagctgcagaggtacatacaagaaagtaatttaggacaaaaaagattgcattgttcaaaattatgttacattcctactctttgaaattaaaactccattggaaaaatacaggcagctaagaacacaactacagcgaaagagcctctagtcgagttggttagatggtctgagtagcactcctcaggtcctggattcgactcgccgtgggaacgaattttcaggctgtggttaaaaaaatcctctcgtctgtcccacgccaaatcatag

SEQ ID NO: 3189 - DNA, 460 bp, Zea mays
cttgtagccaactagcattatttgtactctctgatcgtacaaaatgaaataaaatgcagagcaccatgctttttaacataccaaaactctgatgttccaaatcgctgaacaaaagcagataaatcagatatttctcttgccgataaattggatccaactgctcggttcaatacgaccaagatctcttccttcagtgcagttaatctcaaatccagtgctcgaagcaattcattcctagcatatttaaccatcgcaaatgtcaaccaaatgaggtagcaaagtaaagtagcagagaaaaggaaaggaattttactttgtcgtatccgatgaatttggcccatcatttccctaaaagtggtgtttaaaaattaagtaggtgaatcatgaaagagtacaaccatgtaatattaaatccttgcagcactagaaattacctgctgtgctatggcaccagtaccaa

SEQ ID NO: 3190 - DNA, 518 bp, Zea mays
tctgggagcagtagtgtgtcgcaccatggtattgatactggcccttccatagttaggactgaaccaaaagttataggttggtacaaaggagaccatcaaataatttcaattcaaccactaaaccaaaagctataagttggtacgaaggagaccatcaaataattcaattcaatcaacattattaaatgtgcagtataactcttacgatatacaaaataaaaagcaacgtaggaaaacaatgatttgggttgtgtgaactttatatgatttgttgggctttaactctactttgttttcaatatctcagtatctacctcgtccttgttgcatgtttacagtaatgtatgcagaagtattatacatttcacaaaaaataagttaacctgaatcaataatttttaaatggatgttagtgtagttatctaggaaataatggtcattagccataattgatcgtttgtattaacacgtattccatcaatttgatactttccttttcttatgatatgccgaaccgt

SEQ ID NO: 3191 - DNA, 508 bp, Zea mays
tcgtccaggagctagaagccgctcggctggctgttaaggctgctgaagacacttctaccaccttgaaggctcagcgcgacaaggctatggacaaagccattcgcgcggggcggatcttgatgagaaggccgggtgtgattgttcctgacgacatgattgctgctgtcaacactgctcctgattctttgagttgtccttcttcatcagttgctcccacggtttacaaaaccgttccagagttaaaaaccgccttccaccagtaacggtttaccaacggtaaaccggtaaaaaccgaccggtttgaccaactcaaatcaatttgaatttgaaccggtttatctgtgaaaaaccggcgaaaaaccgctttaaaccgccggttaatcgcgaaattaactggtttttgctgtttttacagaaaatatgatttttttgataaaatttatttgtagtttgttcaattcacattgcacactaaatattaattaatccacacgacatgtattcacca

SEQ ID NO: 3192 - DNA, 469 bp, Zea mays
cgtcctggcggagcatgtcggcgagcgggtagaagacacggatcactttggcgagcacgatcgtcatgcgtgttatggcgggatttatttgttgtttgttggagaagataaggcttatccgatagccataacagattgtttgttagttcactgatggtacgaaggtttgttgcttccattgcgtacggatagccacgacggattgtttgttaggtcactgatgatgcggttggtttgttgcttccattttgcgtggaggacacagttagagagtatacgtgtgtgagaggaggcatcacgttcgtgaacgacgtgacaactgtaggctgatttagaataaatgaaaagggggtttttgtaaaattttgacgcacgacgaccattgaaactggtgctttaagtattgtagagatttagggggaaccgctgcaggagatgaaaaaatagagggtgaaatgttgatgatgtg

SEQ ID NO: 3193 - DNA, 505 bp, Zea mays
acagatcgacgctcagcagatctgcgtctttcgagcttcgacgtcgaaggtacgcccctttctctgctccaagtttttcatctgggattcaatccgtgtcccaaaaacacctccgttggtttaaccgtagggtttacatgtacttcacttgattaactagatggattcatttgttcatggcgatttgcccagttagggtttacgggttgtccaaatcgcctattgttaggcctttacgcttaactgatctgtcgttatcttgtacaccatgtccaaggcttttagttttcgagcatacgatagaacaagaagactcggctgtgattttgatattcgtcatcgtggtgtgctcatttttgtgtatccacctaagtctaacagctgaaataatttgcgctcatttcagttgtatgttgattggtcactcttgctggtacacaaattaatgttcatattcgtatgcgaacaactaagtacgaattaccgtttaattccacaacacaac

SEQ ID NO: 3194 - DNA, 501 bp, Zea mays
acggatacgcgcgcggaagacgtcgacacgcgccgaccacggctgggtcggggattcgataggagaaggtagatataacgacggcactgttaaaatatggtcgctttacttcacttggtatggataaccacagaatctacaaaaagctttgcacaataaagattcatccggagaaccacagactttagaaaaagctttgcagggtaaagattcgtctgaagaatcgcaaattttagaatagtttttacatgataaagattgaaagaagtatatattcagagtgtatggctcgtatgaaaaataaaacatgccatttattagttctacctaagaaagcgagaaatattgtagaatgcaaacgagtctataaaatcaaaagaaagttagctgccacttaccactaaaacctagtgactattaactagttagggcgtccagtgaaccctgctacacttcctcgaaagatttaggcttgctgcctttcttccatttgttcatggc

SEQ ID NO: 3195 - DNA, 386 bp, Zea mays
ccaagctggggagttcgattcaacaagaggtgactccaacggccgagggtaggagttggggaggggagtgctttacttcaaaatgatgcagcgttggagtctgattcgacgacggcgctgcagctgaaggttgcgccatgaatggatcgtcggtgactggctccatctctggtttgcactgtacgcggccgccgcctgagcagttcttctccaaggtctggtgagcgcgcgaaatgataaaatccttcgacgcgggatggcgcgaatcgctaaaatcaacgcgggaaccagatacgaacgccggatggggagctcgcccggcggcggagttttgcgcagctcaggcgatttttttcgcgtgcgacagtatagggatatggcatagg

SEQ ID NO: 3196 - DNA, 446 bp, Zea mays
tacccgctcgttgtcgaccccgtcatcggcgacgtcaggctcaccaaggtcctcatggacggaggcagcagcctcaacatcatctacgccgagaccctcgggctcctgcgcgtcgatctgtcctccgtccgagcaggcgctgcgcccttccacgggatcattcctgggaagcgcgtccagcccctcggacggctcgaccttcccgtctgcttcggaacaccctccaacttccgaatggagattttgacgttcgaggtggtcgggttccgaggaacctaccacgcggtattggggaggccatgctacgcgaagttcatggccgtccccaactacacctacctgaagctcaagatgccgggccccaacggggtcatcaccgtcggccccacgtaccgacatgcgtacgaatgcgacgtggagtgcgtggagaactgaaagggaaatgt

SEQ ID NO: 3197 - DNA, 505 bp, Zea mays
  misc_feature (454)..(454): n is a, c, g, or t
agggggagcacaagatgatcatgtgatggaggaagaagcgcaaccggcacctccaacccaagttcgagcgatgattcaaagggatcatcccgtcgaccaaattctgggtgacattagcaagggagtaactactcgatctcgattagttaatttttgtgagcattactcctttgtctcttctattgagcctttcagggtagaagaggccttgctagatccggactgggtgttggccatgcaggaggagctcaacaacttcaagcgcaatgaagtttggacactggtgcctcgtcccaagcaaaatgttgtgggaaccaagtgggtgttccgcaacaaacaggacgagcacggggtggtgacgaggaacaaggctcgacttgtggcaaaaggttatgcccaagtcgcaggtttggactttgaggagacttttgctcctgtggctaggctagagtcnattcgtatcttgctagcatatgccgctcaccattctttcaggttgtaccaa

SEQ ID NO: 3198 - DNA, 223 bp, Zea mays
gattccaattgtgtattttgtttgagatagaaaattcaaactcaaattcaaaatagaattcaattggaaatgaaaaacagaaataaataaaagaagactctacttggcaccttgggctgtattctccccgcgctggcccatctacgctcccttttcctcgcgctggcccattgccgtgccagcccaatagcacaacactgtgggcgccctgtgtctctaccac

SEQ ID NO: 3199 - DNA, 404 bp, Zea mays
gggggtgaataggcaaaacctaaaatttataaacttgaacacaaaacttcacccagagttagcgttagaatgagtattgtcgggtatcgtaattaggggttcctggattacgcccctaaacatgcttaaccccaaggctaacatcagacacattccccaaggtcaagagagtgtgaaccacgattcgcctgaggctccaatcggcagtcgctcaaaactctgccttgcccgagcatgtccttggacgagggacgtactcaggaaaatcctcgtcccgcccgaggtcccctctccaaggagccattgtttctgccttgcccaagatcgtctcgggcaaagaagacaaccccgagctaggactcaaccaaaggccacaggggacatcagcattcaatacgcatagc

SEQ ID NO: 3200 - DNA, 381 bp, Zea mays
tagactgagaaaatcaggatatttgacctttatttcatcgcaatttctttttggaggtgtgtaataaaattggacaagaatatgattttcagggtggtttgtgatcatcaagtgtcaaaagtagcaaatgatgacgatacacagtggttctgaaagaaagaaaaagtaggttgtataaatacttcatgtaaacaccaatcaagatcagtagtggcaaacacaaaagagatccatgtcacacgatacttctcaactgaaaaaaacagtaggccacaagcaacaccaaaccatgatggctacctataggtcaggccatctagtgccagacgcatgctctgcatgtatatttcattattttttggatagttgatccttaccatg

SEQ ID NO: 3201 - DNA, 463 bp, Zea mays
  misc_feature (245)..(245): n is a, c, g, or t
  misc_feature (435)..(436): n is a, c, g, or t
attcccttcatcatttccatggtcactattgggtaggctgacaaaactttgcgggttgatatttccttgatcattttctagccatctctcatcaccattatgtgaccgaattaagttatggaggactgcagcagcaataggtatttttgcttgattttccattttgtgaagggtagcaactttgaggattggaaatctcttctttatgacacccaaagccctctctacatgatttcttaaaacancatggcgatggttgaataactctttgtgattttgaggccttcgatgaccatggccaaactctttcaggtgatatctaaccccacgatatggtgcaataaaggaagtcgtattggcataaccaccatctactaggtagtacttcccagaaggtacttcaaactttcctacaacattgttcattgcagatcnnagaaccattgaatctgttgctgatcct

SEQ ID NO: 3202 - DNA, 513 bp, Zea mays
  misc_feature (504)..(508): n is a, c, g, or t
tccgttagttaccttcgtcatgccgtgctgctgaatgcgtacaggtcaggtatacgcgcgcgctgctgcggaggagcagagggcgaagaggaagagaggaaacagctgcgtgttcgcgtccggctcgtgagaaaacagctacctggcctgatcgctgttgtttgcggttgcagttgcagacagccatggctagagagctcttattatatacgtatataaggaagacacgcgacgtacggaggcgaccggagcgaagaacagtcatggcaggtgaggtgagcttccagtccaattgcccaatcgaatagacaagtcctactagttaacggtgaccggttgacgcgttcccgaggcttgcgttgcgttgcattgtcagtcgtcgggactcgggggtcagatcgattttctaatggagatgagactttgctttgcttaaacataaacgacgacttggcttgctccgagccgggccggactccagccagttccaacgtatactagccnnnnntacgc

SEQ ID NO: 3203 - DNA, 228 bp, Zea mays
ccctcgaccacttcaccggaacagtctcgccgccggtaagcccctccgcccttttcttccgccgcggctactgtttaaggtagaagaaggacctcgggttaggttctgtagaacccgaggggttttctgtaatgtcagcgactcatgtgaatagtaacctaaggactgattcgcgaggaaaacttagaaaaccgccagggaccccagtgcaaagtggatttccattta

SEQ ID NO: 3204 - DNA, 540 bp, Zea mays
ttgaacctcttctgcttttgagctctttttctcagactcctcttctaggccgatactagcttcggctgtcgcagcaggaatcgtctctgaagccaaggggatagcttcggcctgttcagcaatctctaccctctttccatcaagttttgcagttgtccttttatagaatgcaacatcagtctatgagttaaaaccttaacctacttcgacttaggcacgatggaagaggaggaggctaccattttcctcttcaacccttgttttcgagcaggaaaacagtaatcaggataaaaaacccaatcacataaaaaactttgtttaacctcctctttctgcgagcgccgaaggcagtgctcatagcttcatcctctgcttttgtgtaagcttccaacagctcatcactggtagcttcgatagccttgagccagtcatcatttggctcatcaaactaatttcttaaatggtaggtgtatcttaagtaaaccagaccaccttcgctggagcaggcagcagtctcctatgacatttcccaatcattca

SEQ ID NO: 3205 - DNA, 446 bp, Zea mays
ccgaagactgtgtgtgctatagggggtcctgcctatcccttagcgccatagccagtatctcagagtggtcccgatgcatggatctctaagatccaagactacctgaaggaaaatatccttcctgaagatcatgtgtccgcagagcgcatagtgtggttggctaaacgacacacgatggtggaaggggatctctaccgccgtggcgccaacgacattctcatgcggtgcatcacccaggaggagggccgtgagttgctcacggagatccatggaggagagtgcggaagtcattcttcatcccacacactggtcggtaaggccttccggcatggcttctactggccaaccgccctccaggatgcagctgagatggtaaagtcctgcaaggcgtgtcagttccatgcaaagcagatacacacaccagtttcaggctctgcagatgattc

SEQ ID NO: 3206 - DNA, 374 bp, Zea mays
  misc_feature (15)..(17): n is a, c, g, or t
  misc_feature (110)..(110): n is a, c, g, or t
  misc_feature (112)..(112): n is a, c, g, or t
  misc_feature (114)..(114): n is a, c, g, or t
  misc_feature (318)..(323): n is a, c, g, or t
gactataaagtccannncaatctcatcccatttccactgaggaatctgcaacggctgcaacaaacctgcgggtctctgatgttctgccttgatcctctgacaactgtcgnancnggccacatactctgctatctctcttttcataccgtaccaccagaatctcttcttcaggtcttggtacattttctcactaccagggtgtatagaatatgctgtctcatgagcttccttgagaatcagttcccggatcgatttgatgtcgggaacacacaacctatccttgaaccataccactccttctgcatcttcacggaaatnnnnnnctttcccatctatgatcagctgccggatctcgttgatcttctcgtcatcct

SEQ ID NO: 3207 - DNA, 443 bp, Zea mays
tcatcaacataagcttctacccgcttgccccaatgatcgtctaagcatgtttgaatagctctctagtaagttgcttcagtgttcttgaggccaaacgacatggaggtatagcagaaagctctaaacgggataatgaatgttgttttttcatcatcttcttttgctaggctgatctgatggtatccagagtagcagtctaggaaggacaacatagaacatccggcggtcaaatctaccacctgatctattctgggaagtccgaagggacccttcggacaatgtttgttgagatctgtatagtcgacgcacatgtgtcaatccactttattctttttgagtacaagaacagaatttgctagccactcaggatgcagtacttctcgaatgaaccctgctgcgaccaagcgagctagctcggcgcgaatagcctctgtcttgtcagg

SEQ ID NO: 3208 - DNA, 564 bp, Zea mays
tacaacctcagttgccactaatgcaaaatttgaaattagaagccccaagcgtgtgcaggtgagatcctgtaatctaaatatccatttttcatctatgactgaaagcagtttacttcagacactcacatgcatcgttcttaaatcttaattccaggatgattcacaaactgctccgtctgtttaataatgtttgtcctgttggcatacctagacggcataatacataaatatttaatgaatttgaattggatttcgtgctttttggatatacaacaaatattcacccaattttgtaaagagttacttcttgtgatcacaaatataagtctctttaggcttctcctgaattaagtatcttttgcctttgactatcaatatcaaaaattctatataaactaacgtcgtaagatcagccttactagttcattatgaactgtattttcatatgtataatcctttccatcaaagactatttattatttataaagatgttgctagtcaaagtgtcatattaaagattgtgctgatgtccaaatggacgttgtttttggtcggagtatgaca

SEQ ID NO: 3209 - DNA, 372 bp, Zea mays
ttacaggaaaaaactaaagaacagtgacctgcactcctgcagacagagtttaatttaatttaatgccatgatcctgttcatcgtcaggctgtgatggccctcttgcacagaaacaaacaggaattaatgcaatcaaccgttcttaaacgaaacaagcccccaggtggcatggcgtcattttagctaaagattcttccattgggatgcagaaaaaggctacgacaaagttcgcatggctgcagttttctgtgcagtataagaaagggtctaagactgtcttcagtggttccccctaaatttctctccctatatcccactcacgtgccacgtcagcgatctctctccccctatatctccacgctctacagtggt

SEQ ID NO: 3210 - DNA, 492 bp, Zea mays
aaaaatagatttagtatttcatatgatcaattaaatgccctagataaatatctagcactaccgaaatgagtgaaagcgaataatatcgataagtttgtttctgttaggattcaatccagctaagttaaaaataatgtagatgatgagtcgtgtctaggctaattatgtttaaagtgtatgatttgtttgcgatgtttgtgttaggtttgtttaatttagagaagcgtaattattgcgcttagtcgtatgtcgataactaatattatcgtataaaattgtacaacgcctcgccactaggtgtttaatacgctatcgtataacactatttagatttgtgtcattcttgtttatatgcattcatgtgcatcgtgcatctcaattaggtacgataattgatcgcgtgatgcagaagacaagccaagtcgaccccaagcgcggactaattcgcaagatgatgctggtggattaacctgaagatggataatcggaaca

SEQ ID NO: 3211 - DNA, 536 bp, Zea mays
taaagagctttgccgacagataacgtgtgtcggggaaagtcctgttggcaataacctttaccggcagacatagatctaccgacagactatctgtcggtaatgtttacattattgccgacagacatatctttgccgtcggacaaagttttgccgacagattcttgtgccaacagcttgtgtgtcgctaaaagtctatataccgacagattgtctgatgttattccctatgtgcagttaaaaaaacatgtattcaaatatatgctaatgaaacaaataataaactgattatgatgcacattacaagacaacttgaataatatgttgatcagaatatatgaaatttaattactaaaagaaagagatcaatctttgactttgaattccaacatatattgttttggaacacaatttgtgtgatgaacatataaaaaaataatagcatacatgttttctaaattctgaagtgatctttcagttctattacatgcaaagtctaaagattcatctagctagcaaactaaaatctctccatcagc

SEQ ID NO: 3212 - DNA, 457 bp, Zea mays
ttctctggaccgactggagttggcaaatcagagcttgcaaaggccctggcggcctactactttggctcggaggaggctatgatcaggcttgacatgagtgagttcatggagcggcatactgtctccaaactcattggatcacctccaggttatgttgggtacactgaaggaggccaactaactgaagcagtccgtcgtcgcccgtacacagttgttctctttgatgagattgagaaggcacatccagatgttttcaacatgatgcttcagatcttagaagatgggcggttaactgatagcaaggggcgcacagttgatttcaagaacacactattgatcatgacatctaatgtcgggagcagtgtcattgagaagggaggtcgcaagattgggttcgaccttgattatgatgagaaagacacaagctataacaggatcaagagctttgtgactgagg

SEQ ID NO: 3213 - DNA, 425 bp, Zea mays
ggtgccaatacctgtctcaacaagtgttattttgtgtgattataagttgggatttggtttgattgaaaactagatagaaaatttgaaaaaattaaaaattccctttgtctgggctcaacggacagtctggtgcaccagccgcgcacgcgcagaactcctctttcctgtccacggtctggtgtgcatcggacaggcactgtagactgttcggtgcacccataactcgtttttaaaaaaacttccccctgcccgagcccaaggccaggcattatttccctcttctctgctctagtttcactttgctcctcttacgatctcccctcttcggcgaccatcctcgtcggcggcgatcctccgacgaccaagagctccacttcttccccctctctagtgagcatccatgctttccctcttttcttctctcc

SEQ ID NO: 3214 - DNA, 510 bp, Zea mays
catggaggacttgagtacaatggccccgaccattgtgattgggaaaattgtggcatttgagatgtcacggaaaatgggtcgacaagaggagccaacttcctcaaggtcatatgcttttgcatgtgatgaaaggaagggtaaaaataaggctcccactccaagttcctcaagtgaagaagaggaagaagaagaaagtgatgatgataaagataatcaaccatcaacataatcctctgaggacgaagaaacaatccgacgcgtcgaaaaggtaatggggatgatccgcaagattaatctaatgggtgtgccctgtaggtcgaggatcttctctttaacattgacaggaaaaagcaaagaaagagaggatgtttcgcatgcggacagtccgcctgtggcaacacttttcttcgtttcttggactttgcttgatatttgttgatcttcacttgtgatcttcataatgtcttcttttgaggtgttgttttcctcattgccttagtccaagtcact

SEQ ID NO: 3215 - DNA, 390 bp, Zea mays
atatctctgcaaccagtaggcaaaatcctatgacccccacacaagaatggtagcttgtagggaggagaagaggttttgtgcactgaccaaggtgagagcaggctcggatgagcgaccacacgcgccagaacttgggcagaacgcacaggcacacgtgttcgaccctggtcggcacgctagagctcgcccaacccgcgcgcgcgctcaccccgacgtccggtcaagtccaccgtgcccactcgcgcctataaagtctccccgggcacctctcttcgccccacactcaccctcaccggccagcacttttccttagctccggcgagcttatttccgctcgccattgccgccagagcttcggccaccgtggccagcccactccagccaccctca

SEQ ID NO: 3216 - DNA, 352 bp, Zea mays
tgaagactggagaactgaaataatatctttcctccaaggcaattgtctttcaagtgacgaagcttataacaagagaatggaggcaagaacaagaccatatgtgataatagaaggggaattgtataaacatggagtttgttcaccactcctcaagtgtttatcaagaactgaaggtatggaattaatgaaagagatacatgcaggtctgtgtggatctcacattggatctaggcccttgttgggaaaagtttttcgacaaggattttattggccgaaggcagcttcggatgcagcagaattagtccaaaaatgtgaaggctgtcaaaaatgtgcaagagaccagaagcaacct

SEQ ID NO: 3217 - DNA, 426 bp, Zea mays
  misc_feature (162)..(162): n is a, c, g, or t
  misc_feature (298)..(298): n is a, c, g, or t
  misc_feature (300)..(300): n is a, c, g, or t
  misc_feature (379)..(379): n is a, c, g, or t
tgccggatattgcatcactgttacctattctagattcgagtttgttagagatcctaatagataggataggactataatagataagtattggattagatctatcatgtaacagatttggtttcgagtttgttagagttcctaatatatatatgatatggttgnaacagataagtaccagatcagatttgtcatgtaatcccccccctcccagcctatataaatacatgccatcataacaccttaagccattaatcaaagacccatatcatccatagcctcacagcagccaccgctcgcngnggggcctgccatcgtggacaggatgccgcagccctgttccggcgtgaacaggatcgtgcgggggagaaacggccctagncgtcgatccagtaatgaggtctcatgattgaatctcaaataccccca

SEQ ID NO: 3218 - DNA, 394 bp, Zea mays
gatcagtggaggctggcgggctagactcgaaatgatgccttttttagtgcacctagagaggatggatcgctttggttctagaataatcgacgacaatcgaatatgcgacaacactgatgagcacacgcgtacaaattacgcgggagcaattgtttgtggcccgatcttctcgaaggatgttcgaaacttgataaatatcgctgcgtgacctgacgaagaggttgcgcaccgcgagatcttgcacacgcgacgaacaaccgagacaatcgcccttccacgtaccgatgaagccagcccacgcaatcacgccatatagacgtgaaggcacaaactgggtgaaccgcagttcggtgttctacaactccctcgggaatcgaaagaacaagtctgcaag

SEQ ID NO: 3219 - DNA, 469 bp, Zea mays
  misc_feature (266)..(267): n is a, c, g, or t
  misc_feature (331)..(331): n is a, c, g, or t
  misc_feature (400)..(401): n is a, c, g, or t
cataggcttcggttgatctgctgaagcagccttctctcttttatgcttatactgttgataagcttcggcttcatctatattatgaatagccttcgaatccgtccaactcccttcagccctcctggcagcttcttgactcccgtgtacagcaatgggcccttgttccgaaggtatcttcatgcatagatatgctggatgaagtattgcttcgaaggcattaagcgtccctcgaccaatgattgcattgtatggatactccatatcannaatgtcaaagacaacctgttctgttcttgtgttatggacatagccgaaggtaactgacattgtnatcttgccaagtgccacaatctgtcttcctccgaagccacaaagagggtgtgttgcatcatgtatcttnncctctggctcttgcatttgcctgaaagcctttgcaaagatgatatccgttgcactgcctgtgtctact

SEQ ID NO: 3220 - DNA, 465 bp, Zea mays
caacattcacaagataacaaattcaaataaattaagttcttgttgctcctttttgccttactgtacataactatgttagtttgcttccatgttttcactataacaattgataaacttgcccctactgactctcaagaaaattagggtcacatagttcagtggtatagcaaggaacagtactgtagtttacaggagaaaatatattattagacacagaaaaaaggcggcaccgcggcacagagaaactaggcaagcaaataagcatcaatgcagccaaggaagtaccaccaacgtaacagaatccacataagtcatcttagtaatagagcataccaagttctcagcaccagggaggttagctctcttggccagattcacagcaagctcaaggttgtttaactgcatatcaaagttgtgttaaaataaatacctaatgtatagatcaggaaaggaagaccagaaagt

SEQ ID NO: 3221 - DNA, 497 bp, Zea mays
tgattttcctccatgttctcatcttttatgctgagctgctccctcacgcacaactccaccgacatctacgccgccggggagggcacgaacggctccgtccacaaccggttcaacttccaccccatgggtgacggcagcgtcgccttcgccctggcgtagctcaaggagggcaccgcttccttcttccccacggagctccccgcgagggcggcagcttcgctcagcgctggcgacagctttgacggcagccatggagggatgcactcgtcacggcttgataggatcttgcgggagatcgtgtcggactccgtgcctgccatggctcaggtcctgtaggatttccctagcgaaaccctggaggtgctgcgggaggtactgaaccttggctctgatcagaatggaacgatagttttagggtccaaattctttagggttgaacattgaaaaatctatttctctcatgctgaatagtggcctgcttattacatttggctcac

SEQ ID NO: 3222 - DNA, 516 bp, Zea mays
tgcacgcaattactttgtatgaggcaaacccttagggactatggctacaaattaaccaaagtccctctcctatgtgataatgagagtacaatgcgcatggcggataatcccgttgaacacagccgcactaagcacatagccattcggtatcactttttgagggatcaccaacaaaggggggatatcgagattgcttatgttagcaccaaaccattagatgagaaaacctttaccaaacttaggaatgagctaaacattcttgattctcggaattttgattgatactttgcacacatagctcatttatatacctttgatcatatttccttcatgtgctatgactaatgtattttcaagtaaattcttatgctaagtcatagattgaaagggaaatggagttttcggcgaagacaaggcttccactccactccatcgtattatttacccttcaccgtcttgtaacaccccaggtgttaccatggctagagcccaccttggcactaaaggctatgatca

SEQ ID NO: 3223 - DNA, 456 bp, Zea mays
ccgttggccgcgagcgttgttggctcgccggatagtccagtgcacaccggacagtccgatgaactttagccgtggcgcctccgctttttctcgagagcagcgagttcgtcgtcgggccagcctgggcaccggacagtccgatgcgcctcaggctggttctgatttggctgaacatagccaactcttttccacttcttttcctcttttcttggcaatgtctctagtacttagataaacatgttagtacccaacaacaatttaatagggctacaaacataccttggttcttgatgtgcacttctaaatcacttggcacatatgaacttagaacaatgtgttgggcatctaatcaccaaaacatttatcgaaatggcccaagggtacatttccctttccgcaggttccaggcagagtaagacaagggggcgctaacattcgaaatcctacccattagca

SEQ ID NO: 3224 - DNA, 381 bp, Zea mays
  misc_feature (276)..(276): n is a, c, g, or t
  misc_feature (342)..(345): n is a, c, g, or t
gagcccccggatgcataaacctacaaaacaattttagttcttgactttaggtacccaaacggttttgggtcctttggcattagatacaagaactttgggtacccaaacacaagtcttggagcccttgtgtttgcccccaacaaatttggcaactaccttgccggatttgttagtaagcacataagatgcatcaaaagttttaaatgaaatggcatgatcatttgatgcattaggagttttcttcttaggcaacttagcacgggttggttgcctagnactagatgtctcacccttatacataaaagcatgattagggccagagtgagacttcctagaatgaannnncctaattttgctctcaggatagccagcagggtataa

SEQ ID NO: 3225 - DNA, 509 bp, Zea mays
attaggcccacctacagttgtccttgtctcacagacatcagacaaccctgtaggtgcccctgaactacttgacaagttcggtatctttccttaccttaccaggaacgtttcacccgtcttgtagacattacaaaacatcggagatatagaagtgcggaagcaattacataaacttacatttatttagaaagtaagatcaagttacttattacagaccagagctataaacgagtgctgagtacacatatcaagggaggcaaaaactcctcccaagtaattatcaaacaaaaagatcctatgtggaggaccaagtcctcccgtatcttcattcttgtttttcttcattagataccaccttggagcaaaagcaataaaactttgtcgcttcctcacctaaaaacaacaaagggataaaccctgagtatggaatactcagcaagtcttacccgactaaggaaaagactctcaagggtatgctggataaataggagtcaaggagaggctttagc

SEQ ID NO: 3226 - DNA, 524 bp, Zea mays
agagccttcgtcttccagcggagagttcgaagggggaccacgccgttcttcatccattccacgccttcgccttcactacacgacggttcatttacagcgacctacggttggttgctaaaatggccttcagcgacctaccgttggtcgctaaaaacttttagcgacccataaggatggtcgctgtaagtgtcgtcgctaaaggctttagcgaccgacatctttttagcgaccgaccgtccgttgctaatattgtatatttagcgaccaaccgtgggttgttgtactatagatttagcaaccaatcgtgagtcgttatactatacatttagcaaccaacataaagttgccccgagttatagtcgttaataatgataatataccattaattagcattcaacaactgttacatatacaaaagcatcacgaatcaccaatttttatacacataatcacgtagatatacaaatttaattagtattgcataatgatagatccacatcacataaaccatcaacaagcaccac

SEQ ID NO: 3227 - DNA, 445 bp, Zea mays
acattccttatgacaaataatttagctctcatgtttcttcctcttttacagttgatatatggcttcaataatgcaagtcatgtttttaacccaccattccatatcaaggttgcttttagttttcacattcgtttttgatacattgttacatttgtatttttttctttttactttactcttctttttttttcattttagatactttgagaaacagagtttgaaagctgcatttgctactgcactagctgatccaacagtagacctaaacatgcaaatgtaagtttatagccttgctgaattaccaaatctaaactgcacttggagtaagtcatgtatggatttctattccaaatgtcttcactgctaatgatgcttgttttagaaatgtagtgtgaatgacaatgaaactaaccccacttgctgatgatgtagcaatcatcattct

SEQ ID NO: 3228 - DNA, 533 bp, Zea mays
  misc_feature (524)..(528): n is a, c, g, or t
ttctcttctgtgggttccccctcaagaatgtgaataacagcattcaacatattcacctgcacttttttctcaggaatatcaaaaccaaagaagccctgctccggaattccaaatccaaacaacctaagtttcttgttattttggcattccgccgccatatgcccagactctttacatttgtagcatagagggtcattcgggcagtcagcttgatggtgtccagattgagagcaacggaagcatctaatctccttgaccagaccttcctggattttagaatccctgccctgctgcattccaactccaaaaacagaaggtctccccctctctgaacatggctgagagccttgttccctatcacgattttcttggtttttgcttcccctaccccctgtctcattcctatcaaaagaacgattacccccaaagccacccctggctggcacaaaattcccacgccctctccagaaaccacccctccgaggaattttgttacctataaagcttccttgacgatgatgccnnnnntcttg

SEQ ID NO: 3229 - DNA, 357 bp, Zea mays
ctattggaaaacttgtaactactatgactttgtggtcgtcaaagtagtgacgcagcttgcgggcagttagaagtactgcgtataatagcttctgaacttgagggtactttttctttgaggggcctaggacttcactaatgaagtaaacaggatgttgtactggataggcatgtccttcttctactcgctcgactaccaacgcggtgcttaccacgtgagtcgtgcaagagatatacagtagcaaatcttcagctggttgagttgacgtagctcgccggggtggtttcagtactggtggtgttgtcaagaattttttcagagcatctagagcttcttgtgcttctgaagtccattgaa

SEQ ID NO: 3230 - DNA, 371 bp, Zea mays
gtcgtccagatggagctcctctaacctctcgagtttgcctatggactcagggatgctggcactgaaactgttccctccaagatcaaggaccaccaggtttctgagctcgcttatgccaccgattgacccttccagctgattgttaggtaaagacaagtgctccagcagggtaagggtgaagagctcatcaggaagagtgccagttaggtcgttgttcccagcgtcgagagacttgagcaaggagcaattactgagacccgaagggatccgtccgctgaactggttgtagctgagatgaagcgaggccaaggacggcgcgctggcgctggcacataggctgctagctggtatctggtctgctgaagctgttg

SEQ ID NO: 3231 - DNA, 500 bp, Zea mays
tttctactgtgatccagagttgccagccactgtaattgatcagtgtgtagatggtgttcgcgtcgtccatgcagacaagccctgctgttgcgcctgaccgtaaacggcctgccgacgctgctgctggcactggcagcaactctgacaacgtgacgacgtcccacgacgacgcgagctcgagcgtgccgaacaaagtatcggaggagctgctccggtgcctgctggccatcttctcgcagatggggggctcggctgctggcggcggccgaggactaggagacgaggaccagcagcaggcgctgtccccgtcgtcggtctccggctccagcgagagctcggcgtcgtcggaggcggacgcgtacccgcaggacccctacggcatcctggagctgggcgccagggacatcggcgcctacaagcggttccacgtggtcgacgccgcgtccttcgacggcaacggcgacacgcctctcgttcgtcggagactcaagtgagtgagt

SEQ ID NO: 3232 - DNA, 445 bp, Zea mays
ttctagaattaaaaactaatttctataattatttctcgggttttaatcccttctggactgggcctcaaataccagaaagagcaggggccctggtgcaattaatcctaagacacagttgacccacaagctggactgcgggttgatactcaacttctgcggggacttttatgcaaaacgctatcgcgaaggggtatccaacgccgagagccatacgattacaaacggacggccctgattagatcatcgccacaacagatcggtctacaaccatagccccaggatattgatccaacggttactgacttcgaaccccgctcaaagcacccgaccgttcgatcttagatcaacggtcgatcgtccactcaccgaatcgttatcttggaaataatcgcgcacgttgagctaggatccaacggttaccaaccaactctatcgcccaagccga

SEQ ID NO: 3233 - DNA, 445 bp, Zea mays; identical to SEQ ID NO: 3232

SEQ ID NO: 3234 - DNA, 236 bp, Zea mays
gtagtggactaaatcttgtgtataggatggatcaatgaatatatgtggttgggagggcttgagtatgtcaactagatgacttggaatgttgcttgggctcccacaccttgaagtggccggttggggtggtatttatagccaccaaccaaaaactagccgtttggtggggttgtctgtcgcatggtgcaccggacagtccagtgcacaccggacatgtccggtgcgccagccacgtc

SEQ ID NO: 3235 - DNA, 506 bp, Zea mays
tgtatgctaatgaatcgtctttgggagtccaattttactccccaaagggttattaggtagtctaagcttattgcacttatgctttttttcgaagcattacatattacagattaaaatttcatgtgactttttatttgttttttgccctccatttccaaattgtaattcgttttgctttgtcctaagttaaactttaatatctttgtccaaatttatagaaaaatacataaacatatttttatagcccatttattttgtattgtaccctctctgtttcaaatcttaagattttttttcttttttggtacattatttttactgtgtatctagacatagtgtatatataagtgcgtagcaaaaagtcttatgatttggaatggatggataagtatatgttaatattgtgtgttttttttctggggattccttcatagacaatattaagatgacttacaatttggaactgagggggtatttggaatataaatagggatggcattgcaaca

SEQ ID NO: 3236 - DNA, 506 bp, Zea mays
  misc_feature (109)..(109): n is a, c, g, or t
  misc_feature (276)..(276): n is a, c, g, or t
  misc_feature (283)..(283): n is a, c, g, or t
  misc_feature (361)..(361): n is a, c, g, or t
  misc_feature (392)..(392): n is a, c, g, or t
  misc_feature (410)..(411): n is a, c, g, or t
  misc_feature (416)..(417): n is a, c, g, or t
  misc_feature (429)..(429): n is a, c, g, or t
tgtatgctaatgaatcgtctttgggagtccaattttactccccaaagggttattaggtagtctaagcttattgcacttatgctttttttcgaagcattacatattacanattaaaatttcatgtgactttttatttgttttttgccctccatttccaaattgtaattcgttttgctttgtcctaagttaaactttaatatctttgtccaaatttatagaaaaatacataaacatatttttatagcccatttattttgtattgtaccctctctgttncaaatcntaagattttttttcttttttggtacattatttttactgtgtatctagacatagtgtatatataagtgcgtagcaaaangtcttatgatttggaatggatggataagtanatgttaatattgtgtgtnnttttnntggggattcctncatagacaatattaagatgacttacaatttggaactgagggggtatttggaatataaatagggatggcattgcaaca

SEQ ID NO: 3237 - DNA, 401 bp, Zea mays
atgtgtattcgttgggcgttgtagatttccttgatctgaccaacttgtttgttgcctaggactagcatcgaaatccacactgcttagtcttgcattatatacaatctagctcctgaataattgaattaaggtccatgtttcttttggacttaaaaaggttgtcaaagaacataatccctgtaccgtggttgaacaatcagtgtcttgtctggtagagttgcttgtcttcttgaatgggattgagttctgatatggctactactgtcaacaacaagggggtacaataataatacttggttatttgctaatacaatggctatgggcatttaacctcgacttgagagtcccttggatatgactacaagtactatcatcaggaggattgttgctaaccatgaagc

SEQ ID NO: 3238 - DNA, 414 bp, Zea mays
tgaacttgtgtgagttgcttgttcagtgcgtaactgtcaagaataatgaacttttgtcatgtgcatctgttatgtcgagtggtactcagttgttatggaactattatgcagctttatgcagttatatgcagctattatggagctatttgcttttgtctcaatgtttgttgtaaaaagagagagatggagtctatctttttaatccgaatttgtgatttgttttctaatctgttttgcaactatataatatgttttctaattgttttgtagttatataatttgttttgcagttatataatctgttttctaatatgttttcatgttcttataatctgactatttaactcttaattaatgacatgtagacgaacccttctccaactgttgttggaagtggtgatggtgaggattcaa

SEQ ID NO: 3239 - DNA, 345 bp, Zea mays
tgtttggtgacagacctgacaggcgtgccgcctgcaaggttaccctgacgccgtctgccagcggagtggacaggacgcattaaatgctgagagggcacatcgtctgtcagcgtggtggtaggcggcgcgtcctctccgtattaaatgcagagactgcgcggctttaggggccttacgtcaggctccgcccgttggcttatgtcacgggccacaagccacgcggcagcagcgggtctccgcctgagcggggagcgtagggcaaggcctggacacgtgccagcgccggacccttactcatgctggggttccccccatcccgggtccttgtagtggtccggatcttac

SEQ ID NO: 3240 - DNA, 454 bp, Zea mays
gccgatccttcaatggccgaggcgactaagaaggcctgcgatttctggggtgttccatgcaccgatgttcttcggcctactgtcgaagccattgcctctcacatcggtgttgctccatctggaattccacgaagctctccgagtcgaaatggtcggctatcagaggattacttccaacggatcgatgctatcgatttcaccatcaaacaagacgacggggctctgccacagaacctctaccgcgcagacatcgtgcttgccggcgtttcgcgtacagggaagacgccactgtcgatatacctagctcaaaagggatacaaggtggcaaatgtcccaatcgtgatgggagtggaccttccaaagtccctttttgagatcaaccaggacaaggtttttggactgacaataaacccagcgatccttcaggcgattagaaagaccagggccaagactc

SEQ ID NO: 3241 - DNA, 1053 bp, Zea mays
  misc_feature (636)..(637): n is a, c, g, or t
  misc_feature (665)..(665): n is a, c, g, or t
  misc_feature (694)..(702): n is a, c, g, or t
  misc_feature (704)..(820): n is a, c, g, or t
  misc_feature (824)..(1048): n is a, c, g, or t
tgttgtgacttgtgtgcgtgttggtactctgatttcgtgtcttgtgtgcgttgctcatccctcccttactccgtgcttctttgtgaacttcaaagtgtaagggcgagaggctccaagttgtggagattcctcgcaagcgggatatagtaaagtgaaagcaaaacaccgtggtattcaagtgggtctttggaccgcttgaaaggggttgattgcaatcctcgtccgttgggatgccacaacgtggagtaggcaagtgttggacttggccgaaccacgggataaaccattgtgccatctctgtgttgatctctttgtggttatcgtgttgtgcaagttctactctctagccacttggcttattcgtgctaactcctaatcaagttttacggattaagttttaagtttttacaggatcacctattcaccccccctctaggtgctctcagttccatccatggaacatgccaaggattgtgtcgctactatgttcccagtgacctcttagcaccacatccagttgcttagggggtcccgatgcatggatctccaagatctaggaccacctaaaagacaacatccttcccaaggatcatgtatccgttgagcacatagtgtcattgtctaagcgatacaccnnggtagaggggaacctctatcatcgtggnaccaatggcatttcatgcagtgcattagnnnnnnnnnannnnnnnnnnnnnnnnnnnnnnnnnnnnnnnnnnnnnnnnnnnnnnnnnnnnnnnnnnnnnnnnnnnnnnnnnnnnnnnnnnnnnnnnnnnnnnnnnnnnnnnnnnnnnnnnnnnnncccnnnnnnnnnnnnnnnnnnnnnnnnnnnnnnnnnnnnnnnnnnnnnnnnnnnnnnnnnnnnnnnnnnnnnnnnnnnnnnnnnnnnnnnnnnnnnnnnnnnnnnnnnnnnnnnnnnnnnnnnnnnnnnnnnnnnnnnnnnnnnnnnnnnnnnnnnnnnnnnnnnnnnnnnnnnnnnnnnnnnnnnnnnnnnnnnnnnnnnnnnnnnnnnnnnnnnnnnnnnnnnnnnccccc

SEQ ID NO: 3242 - DNA, 464 bp, Zea mays
taattccccactgccatccttacaaagactacccaaatagaatcaatacctctcattctcctcgtgaatccaatgctcttagttttttttaccgaataatgctcagttttgacagaggaatctcaatggatctgactggcccagcacatagccctgccatggctacggttctcttcacctcctggacgggcggctgatcactttccccttcccttctctatcttgcactcttcgctcactccctggcctcccatattgctttgaacctttagttttgcatttgatgcagctttgaggtgtccaatataattatataagtctcaccatgtctggtgatacaagtcaacgcggcaaaaaaaaaggacatgcaagtccttgtaacgctgatctagaatatacaagataatgagcatgcttcgccattaaaaaataaagcctagggcagaaaaaacttgaggaaacaa

SEQ ID NO: 3243 - DNA, 464 bp, Zea mays
  misc_feature (80)..(90): n is a, c, g, or t
  misc_feature (424)..(424): n is a, c, g, or t
taattccccactgccatccttacaaagactacccaaatagaatcaatacctctcattctcctcgtgaatccaatgctctnnnnnnnnnnnaccgaataatgctcagttttgacagaggaatctcaatggatctgactggcccagcacatagccctgccatggctacggttctcttcacctcctggacgggcggctgatcactttccccttcccttctctatcttgcactcttcgctcactccctggcctcccatattgctttgaacctttagttttgcatttgatgcagctttgaggtgtccaatataattatataagtctcaccatgtctggtgatacaagtcaacgcggcaaaaaaaaaggacatgcaagtccttgtaacgctgatctagaatatacaagataatgagcatgcttcgccatnaaaaaataaagcctagggcagaaaaaacttgaggaaacaa

SEQ ID NO: 3244 - DNA, 558 bp, Zea mays
cgaaggtcgaagggtataatcataattttttatttgtttcgagttattctatagacgcttcacgtgtgccttgaaaccaaaggtgtttgcattcagttagcttgcagcttctagttttcctaaaattactgtttgctactattgagatgcagtaggattttttgtagatgttcattagtatgtgatcatggtgaatttggtattgaacagataaggacttgagctatgaccatttggcttctggactgaagtcagccttggagaaagacaaaaatgcccttgattcagatcgtctccagaattacactggtatcttccttctcattgggatcttgttaggtttaagagttccttcattagcattttctgaacttctgcttctggttcaagggaatgcttctcagcttctatgataaactgtcgttttctggaaatgtcatttaactgtgtaggttgtggtaccagatgaatgaacagttacaagttgtgcttaactggatgttatctgatcctctcagtctgagtacccttttcatccctttattcttctgttgatag

SEQ ID NO: 3245 - DNA, 477 bp, Zea mays
agttgaaaaaagtttgagtttgcggaaatccttgaaagagcttcagaacaaatgcttaaactttggcaacactgtgcgtgcaacggctgaagcaggttttcaactcagttggtgctagttctaaaaaatttgaaccttcggctgaagacctgccaagcaccttcgaacatattgagggcgaagttgaggcgcttgacgaagttatagccgggcatggtgacttctgtgccctgctagcttctcgcagcacaactgtagctttcaagaagactggttgcatgcacgggaagatcgtaaacatgccaaacttcagcttatcaccaggagacttggctgacatcccagcctggcccaaagcattagaaatagatttataacacaaatttggacgaagggtgggcgaaacttagctggtgacgaagctcgaagtcatctcaagtcggtattaaacttgtacccgttgcttactttcacctg

SEQ ID NO: 3246 - DNA, 327 bp, Zea mays
  misc_feature (55)..(57): n is a, c, g, or t
  misc_feature (91)..(93): n is a, c, g, or t
  misc_feature (95)..(102): n is a, c, g, or t
  misc_feature (152)..(154): n is a, c, g, or t
  misc_feature (203)..(203): n is a, c, g, or t
  misc_feature (210)..(210): n is a, c, g, or t
  misc_feature (262)..(264): n is a, c, g, or t
  misc_feature (304)..(305): n is a, c, g, or t
actccaaattactccattccagttcctaaaattttgtaattttattctctatcannnagagcctctgttttgtcatgaaaacagtaagaannntnnnnnnnnacttaatcctattttaaacccataaaacctttgaaaattcataacttaannnctataactccaaaaattatgattcctgttcctaggattttattttaatntgtagantatttctgtgtattttgtttatatgtttggtgtaatgttaatttctctatannnactgtgcttgtttgtattgtggcgagtagaagagcccgtnnctgaggatcctggtgagcagca

SEQ ID NO: 3247 - DNA, 336 bp, Zea mays
  misc_feature (326)..(330): n is a, c, g, or t
acataaaaaattcagaagataggattatgagactaggtgcgaaaggagaaaaaaagaagaataggagatgccaattgtgtggtatagcagatggacataacagcagaacgtgtctgtctgtggaagagaacagggcaaggctagcaaaactggctaatcgaaagagaggacgaccagccggatcaagactaaacaataaaacaactgctccacagtggaatgaaacatcgactgctaaaaaacatcgtattgatgaagaagtggaaaatgaagaagtcgatgagcatatggaattgggcgaataatttgaagtgtgactaaagagnnnnngatgta

SEQ ID NO: 3248 - DNA, 336 bp, Zea mays
  misc_feature (140)..(140): n is a, c, g, or t
  misc_feature (277)..(277): n is a, c, g, or t
  misc_feature (326)..(330): n is a, c, g, or t
acataaaaaattcagaagataggattatgagactaggtgcgaaaggagaaaaaaagaagaataggagatgccaattgtgtggtatagcagatggacataacagcagaacgtgtctgtctgtggaagagaacagggcaagnctagcaaaactggctaatcgaaagagaggacgaccagccggatcaagactaaacaataaaacaactgctccacagtggaatgaaacatcgactgctaaaaaacatcgtattgatgaagaagtggaaaatgaagaagncgatgagcatatggaattgggcgaataatttgaagtgtgactaaagagnnnnngatgta

SEQ ID NO: 3249 - DNA, 390 bp, Zea mays
caatgacgctccagccaccgccaactcaagaatggtatatggatacaggtgctgaaactcacatgacatccaactccggtaatctttgctcctctcaatttccttctttttctactccatccaatattgtcgttggcaatggttctcttttacccgtcactcatactggctccgtcacttttcctgccacatgtggtcctcttcacctaaataatgttcttgtttcgcctcacctcattaaaaatcttatatccgttcgacaattcactattgaaaatagatgttctgttgaatttgatccttctggtttttctgtgaaggacctccaaacccagaacgtgatcgtcaggtgcaatagttccgggccgctatatccgctgctgtcatcag

SEQ ID NO: 3250 - DNA, 509 bp, Zea mays
ctgtgttcataaagcaaaagagaaattcatcacccgagttggtgcaaacaaaaaaaaacagtacataaaaaatggaagaccccttactcctgtggctagaattgtattagaagcacggaaacggtgaagagttccatcttccatgtttaaggcaatgactccttgacactttcctacaatattgttgctagttaattaatggatggaattataaccatacttgaaagttgcaataagcttcatatatcgttgagtcaaaacagcagcagaagaaatacagtgacgtgaactgcattgtaaataaaagtgcaattatataggagtaaccaagtactaccaactactggtactggctttcaacaaccacaagaaaacaattataagctaaagccaaggttcatgaaagtgtattgattgaaacagaccaacttagcaacaatggactaaagaaccaaatgctagaaaatctaaaacaaaacatctaataggaccttaaaggcatgctcctc

SEQ ID NO: 3251 - DNA, 455 bp, Zea mays
tctagctgcagcagcaatgctactccgagcaatgccggagccatccaccaccgaggggcagcgtatccagggagaactcaagaatctcctagaggatgccgcagcccaacaggccgagagctctgcctcccgaaggcgaggatgcccctcggagcatcgcgcaacgccctcccgactcatgcgggaggcctcggtccacaccgagcgcacacgggacaggacgcctgcagccccggatcgcctcggcgacgagcaacaccatcgcgaccgtcgagcccgcctcgaggaaagggtgcgccgaggctaccaccccaggcgcggaggacactacgacagtgaggaggatcggagcccctcgcccgaaccaccaggtccgcgggtcttcagccgggccatacgataggcgccgttttcagcccgtttccgagccccgactaccatcaccaagtactcag

SEQ ID NO: 3252 - DNA, 382 bp, Zea mays
aggtcagtcttataaatgccataagccaacgccgtggcagttgtctcatggaatagccgcaacggccggaggccggcaatagtagcagcatcaagaacagccctgcgctgcaaatcagtgaagtacacagggatgccaatgcagcaatcaacaaccgcagtcttcaggttcccctcggcaatgctcttcagattggacagcaccatggcaagcagctgagtgggggtgaacgtccgctcctcacccaggaaccgtacatggaccaggggaaatccatcgggcccctccgagacacggaacgggaaggaggcgatatcgctctgcacctccgggtcggagaacttgcggccgagcaggcgcttgatctgagagatggagtttc

SEQ ID NO: 3253 - DNA, 583 bp, Zea mays
gaacgttgcttcctcgtcctcctcggacacaaggacgcactgcacaccgcggcgggcgccgagtcagaaagcagaacactctcggaactcaaacacggacaataatcgcaggtggacaaggagggatattcgtacggtgcgaccgctgctgacgagggccttgacgaacacctcgttggataggacgtccagcttcttctgctcctctccctgtcgagcaaccaaggcagcggcatcgtcacatctcgatcaatctctctgaagaaaaagctagctagccgtacagcgcacttgcctgcacgttggtctcgccggcgagcccgatgagctgggcgagcccggccttgttgacggcggaggcgacgaacttgcagccgaggacgatgtgggagagcaggatggtgaagtcgccgcgggactcggggttccggctctgctcgttcagcacgtgccgcgtgatggtcatcaggtccgtccggtgcgcgtccgccgcgtggtccatctcgcctccgtccccccctcgctcgagcctggctccgaattcagctacctagctagcaggatagcggtgtggtggtgatca

SEQ ID NO: 3254 - DNA, 397 bp, Zea mays
ctagagattgatctctggtcgcttggatgcattttggcagaactgatgaaactggaggctttgttcccggggatatctgatattgatcagattagtagaatcatcaatgtcctgggcgatataacagaagaaacctttccaggctgttcaaacttgccagattacaacaagatttcctttaacaaagttgagaaaccgacaggccttgaagcatgtctgcctaacagatctcctactgaggttagcatcataaagcagctaatttgctatgacacagcaaagaggaccagtgctgttgatctgctgaatgatcggtactttaccgaagagccattgccggcacctatagaaggattacatgtcccggcatcaaaggacgaggatgatgacagctcaa

SEQ ID NO: 3255 - DNA, 210 bp, Zea mays
ctcttggcgtccttggagatcttggcgttggccgggagcgccttcttcatgatccggctcacgttcgcgatcggcaggaaccggtcctgctcccgcggcgacgagaactccgcgttgctcggcccgccggactcgttgtcggagtccggcatcgcggccgagccaccgaacagcactgtccggtcaagtcaaacagctctgaggagaaac

SEQ ID NO: 3256 - DNA, 406 bp, Zea mays
aagcatgaacccatgcatccatccaatggtttctgcagacccaaaatttggtagtagtgccacaccacagacttttcctcataattatgctgcctttgctccaatgatgcagtgcaactgcaaccaagatacgtacaggtcattcaccaacatgtcatccacgttctccagcatgcttgtttccacgttgttgtcaaaccctgccatccatgcagctgccaggctcgcagcatcatactggccagcagctgaaggtaacactcctattgatccgaatcaagaaaaccctgcagatggcgtccaaggaaggaacataggctctcctccaagcatggcttctattgtagcagctacagttgctgcagcatctgcatggtgggcaacacaaggtcttctccctttcttc

SEQ ID NO: 3257 - DNA, 509 bp, Zea mays
tcttgttgaggtcaactgccactgtggtcacttcatcttcctcctccttggcaacctccttcgagtctactgcttgtgggggagaaaagctttgcggaagcttttccctactgaacagcgcatcgaaagccagacgaccctgtcaacaaagaagtgaatcagaaaggcaatgatgcgtgctcaaaaatttggacagagtgaattagcatgttgttggtagattacaacctcttcggaaacttccttccatgaatcacttgtgcttccattgcttctaaatctgcggtggttagtgtcaccagctgaagagttgctgcaggaggcttgcttcgccttctcattagcattgtcctcctcaggaacattgcccgcatctacatcactacttgaaggtgtgttagaaccgcatgaagagcgatcctgctttttcttattcctgaatgcatcatttgtgccagctcctgtggtaggtgtggcatcagcattctgggcaggagatagctttaact

SEQ ID NO: 3258 - DNA, 429 bp, Zea mays
tagctaggtggactcttcgcccaacttctggtggtccttgacgaacctgccccagtaccagtggcgcgcgaagacgtgggccatggactcgagcggcacgcccttggtctccggcacgaacgccacggcgaaggcggtcatgacaaccagccacgacgcgtagaagaggaaggtgccgtacttgaagcagcacagcatggccaggaagaactgcgcctgcaagaagttgagccccaggttgagcgccacggccgcgccctgccccgccgaccgcacctccacggggtatatctcgccggggatggtccagtacagcgcgccccacgaccagctgaagctcgccgagaagatcagcgccaccaccagcaccgtcaccgcgtaccccttgggcatcttgctcccgttgccgaggtgtgatccgattatgct

SEQ ID NO: 3259 - DNA, 222 bp, Zea mays
gggcggacgtgatcctcttacgcataagaggaaagaggcagcgggcactcgtgcctggatcggctaaactaaagcggtactccgacacacagcgagaggggttgtttttttaagcgagatctagaagggggcggcgccatcagaccagcaggtggtggagcgatccgatctgatctggttagacggacgcggacacaccttacctggggcagtcgcgggcga

SEQ ID NO: 3260 - DNA, 429 bp, Zea mays
tgtacctcctcatcgaaagggcaggctagcattgcctcctttattaaccccaagcccaggccagatcacaaactagacagcgaaatctagttctccatgcggatgatgcagcggatgccctcccccttggccatcaggtcgaacgccttgttgatctcggcgaacgggacgctgtgcgtgatgaacttctccacctccagctcctgtgcagagccaagcagaattgcaggaacgattcttaacagtttttcagcaaaagctcggcaggtaaggaaactgaagaaacagcactttgcattttacctttttcatgtacagctccaccacatttggcagatcagtgcgtggcttatagttgccaaagaaggtccccttcagggtcctttcgttcaggaagttcatcgggtgggtcttgaactcagcgtcctt

SEQ ID NO: 3261 - DNA, 482 bp, Zea mays
accaacggctcctaaaccgaaaacagccactgtcgaacccttcggaggttttgcaacattaattgatgcaccaagacctaaacagagaaagaatttgtgtaactcagcatctcaagataaatgtactccagcatccacaccaaaatgtagtaattgaacttaccagtagaaataccacagctaaggacgcaaactttatcaaggggagcctgagggttgatctttgcaacacaaccgacatgcatgacggtgtactcgctgaaggtggaagtcccaacaaagtggtagataggcttcccattgattgaaaaccgcgacttgccatcgccaatcatcacaccgcggtcagtgttgatcctgagcaaatcacacatgttgctctctgccgacttgcagtgggcgcactccttgcactccccagtgaacacaggaaggacatggtcgcccggagctacgtcagtcacaccctctccaacactctc

SEQ ID NO: 3262 - DNA, 258 bp, Zea mays
tagagcaaccactgacatgcttctcaaatccagtgaataataccagtccacacggacttagtgccaactagcggcaacacaaagcaatggggaactaattcgaacactaccagcctactaatataaaaaaaagaagtgagggaacaggaaatcagctacaataatagcacggcacagcttcagcttcgacagcatagagcatctaaaacaatgggctcgaacaatatgcgctctcccaagattactgtccgtcaccag

SEQ ID NO: 3263 - DNA, 416 bp, Zea mays
tcttgctttaataatatgcgaactatgttgaggaatgaaataaaataagttcgggtaaaaattcaagtttctgttgtcctgaccggtggtcccgcctgcatgcacactccccagcgcgggcacgtcctgtgccactgccttgtgggcccggccgcatgcaagcgcatgccttggagttacggttggagttggaggttcccccacctggcgacgcgaattagggctgggcaaaaaaaaacccgaaatccgaattttgttcgggaattttgggtagtaacttgcaaaacccgaatttattttgggcatcataatcgggtacctgaattacccgaactttcatgtgtcatgtactcacgtcgtgtttaattattaatttgtacatctataattatgtgtacgtgtgcataacttgtgat

SEQ ID NO: 3264 - DNA, 994 bp, Zea mays
tattttatcagaaaagggagttttgttcttgacatctgtccttattataggcttatagcctccagtcctccacccttacacactgtttcttgtagctgttggctatgatcggcgaacaattcgactatggtgatgaaatttgtggagcagtggtcagcgtgcgtagcaagcaggaaagaatagctatctggacaaaaaatgctgctaatgaagctgctcaggtacggtcgtatgggtgctgcagtcgcatctctttctaagttgcttttaaaaacagcttgtttcctttctcctatgaaatcatcacacttttatgatagttttcggtttcacgatgaatacttgtacaacaacttatatattttccatgtttacaaataatatactttttccctgatacaattcaaatattatcatgcatgcaaattgtcaggtttgagttattattacatataagcgtgctgtgttatcgatgtaaccctgatatacgaaagaataacgaggaaaacagaagggggtgttggttggggatccggctggtagttggccatttccatggtgctatgttgagaattgttttttgacaccatggtttgcagtattattttttttgggggggcttatgtaagttcatttggatgccagcatcctcctgacatgcttgacataaggttctgaacatgtccccccttcctttcagataagcatcgggaagcagtggaaggaatttctggattacaaggactccattggattcattgttcatgtgagtaccagtgcttattgcttaagccaccggcccctcctctcataaggcgtgcctactctcacttggctctctttggctgcaggacgatgcaaagaagatggacaagggactgaagaaccgttacacggtttgatcccaaagagtagtagcatgtagggtggttctatccgattccgtagcaccttgcagagtgtgttgaaggttctctatttgctgaggagttgc

SEQ ID NO: 3265 - DNA, 994 bp, Zea mays
  misc_feature (46)..(58): n is a, c, g, or t
  misc_feature (73)..(73): n is a, c, g, or t
  misc_feature (152)..(152): n is a, c, g, or t
  misc_feature (205)..(205): n is a, c, g, or t
  misc_feature (277)..(277): n is a, c, g, or t
  misc_feature (298)..(298): n is a, c, g, or t
  misc_feature (329)..(329): n is a, c, g, or t
  misc_feature (389)..(389): n is a, c, g, or t
  misc_feature (406)..(406): n is a, c, g, or t
  misc_feature (418)..(418): n is a, c, g, or t
  misc_feature (428)..(428): n is a, c, g, or t
  misc_feature (449)..(449): n is a, c, g, or t
  misc_feature (472)..(472): n is a, c, g, or t
  misc_feature (549)..(549): n is a, c, g, or t
  misc_feature (556)..(557): n is a, c, g, or t
  misc_feature (576)..(576): n is a, c, g, or t
  misc_feature (585)..(585): n is a, c, g, or t
  misc_feature (592)..(592): n is a, c, g, or t
  misc_feature (596)..(614): n is a, c, g, or t
  misc_feature (617)..(617): n is a, c, g, or t
  misc_feature (642)..(643): n is a, c, g, or t
  misc_feature (657)..(657): n is a, c, g, or t
  misc_feature (662)..(662): n is a, c, g, or t
  misc_feature (664)..(665): n is a, c, g, or t
  misc_feature (667)..(669): n is a, c, g, or t
  misc_feature (671)..(672): n is a, c, g, or t
  misc_feature (678)..(678): n is a, c, g, or t
  misc_feature (687)..(687): n is a, c, g, or t
  misc_feature (698)..(698): n is a, c, g, or t
  misc_feature (724)..(724): n is a, c, g, or t
  misc_feature (782)..(782): n is a, c, g, or t
  misc_feature (795)..(795): n is a, c, g, or t
  misc_feature (797)..(801): n is a, c, g, or t
  misc_feature (834)..(835): n is a, c, g, or t
  misc_feature (837)..(837): n is a, c, g, or t
  misc_feature (908)..(908): n is a, c, g, or t
  misc_feature (935)..(935): n is a, c, g, or t
  misc_feature (944)..(944): n is a, c, g, or t
tattttatcagaaaagggagttttgttcttgacatctgtccttatnnnnnnnnnnnnncctccagtcctccanccttacacactgtttcttgtagctgttggctatgatcggcgaacaattcgactatggtgatgaaatttgtggagcagtngtcagcgtgcgtagcaagcaggaaagaatagctatctggacaaaaaatgctgntaatgaagctgctcaggtacggtcgtatgggtgctgcagtcgcatctctttctaagttgcttttaaaaacancttgtttcctttctcctatgnaatcatcacacttttatgatagttttcggtntcacgatgaatacttgtacaacaacttatatattttccatgtttacaaataatatacttnttccctgatacaattcnaatattatcatncatgcaaatngtcaggtttgagttattattncatataagcgtgctgtgttatcnatgtaaccctgatatacgaaagaataacgaggaaaacagaagggggtgttggttggggatccggctggtagttggcnatttccnnggtgctatgttgagaattnttttttganaccatgntttnnnnnnnnnnnnnnnnnnnggnggcttatgtaagttcatttggatgnnagcatcctcctganatgcntnncnnnannttctgnacatgtccncccttcctttnagataagcatcgggaagcagtggaangaatttctggattacaaggactccattggattcattgttcatgtgagtaccagtgctnattgcttaagccncnnnnncctcctctcataaggcgtgcctactctcacttnncnctctttggctgcaggacgatgcaaagaagatggacaagggactgaagaaccgttacacggtttgatcccanagagtagtagcatgtagggtggttctntccgattcngtagcaccttgcagagtgtgttgaaggttctctatttgctgaggagttgc

SEQ ID NO: 3266 - DNA, 552 bp, Zea mays
  misc_feature (36)..(36): n is a, c, g, or t
  misc_feature (70)..(70): n is a, c, g, or t
tcgctggggtggggaggagagccctgctgctctccntgctggcgccggcgctcctgctcctcacgcaganggtggtgcagcctctccagatgacatcgagcacgtaatcctgcggaggcaaagatagagatagtcatcagaagtgcgcgtgtggacgtagcagcagcagcagcagcagctaaacagtagataaacactagagtacctggaggcaaaccgaacaggcgatgagctcgccgctggcgtcgacgttgctgcgctcggtgaacctaacgacggggagcgcgtccatggcgaccctcgccatgccgttggtgccgcccgtgtcgaagatgtcggcgtggtctgcatgcaaggccggtgtgtccgctgcgctcatctgcaggaaccgacgagggcgtgccgccatggaagagagtaaggtttgaggtgactccgtgactgtgtggcgcgcgcggacgcacctggctctcgacggcgctgagcacggcggggtccaccttctcgcgcacaaggcggccggtgagcaagctccagatgacatcgagcacg

SEQ ID NO: 3267 - DNA, 271 bp, Zea mays
acggacacggacacgcgggttccactgccgcaactgcaacggcggcagcagcagtaaccacccaacctaacccgcgcccgtcaaactatcacggacggaaacaccgttccggtcaacacgacagagagatgataggaaaaagaaagagaacaggcagagcagcacagacactgaaacaggaagcagcggccgagcagagcattagcaaccacgcggcacgccgccacgcgtccacgcgcgagtgctggagtgtccatggaggtcgtcgagt

SEQ ID NO: 3268 - DNA, 373 bp, Zea mays
atcgacttccctgagtttctcaacctgatggcacgcaagatgaaggacaccgactctgaggaggagctcaaggaggccttccgcgtgttcgacaaggaccagaacggcttcatctctgctgctgagcttcgacatgtcatgaccaacctaggtgagaagctgacggacgaggaggtggatgagatgattcgtgaagccgacgtggacggtgatggccagatcaactacgaggagttcgtgaaggtgatgatggccaagtgagatgatgtgcctgttttgaagctagttcctctcttgatggtagtagctagtctagtgttggagactgactgcatttggtccgccttgttcctctcgctgcatcaatggacat

SEQ ID NO: 3269 - DNA, 627 bp, Zea mays
tggtcggtcttggcgccagatacaaggtgcgtgcaggctttacatgtgaccctacgttagagcacgctgatgattagttctctgatttgtcctccaaactgccgtttattagaacacattggcacaaagactgctgtccagattcggagccatgctcagaagtttttctccaaggtgcttaaccctcatgtggctgtgctcaatttagctgctgtcactgcattcacagtattttaccatcacatgtgcttgcacagtgagattatctagaagctaactctgagctaactacgcaggtcgtgcgtgaacctggggccagtaattcaattgagatcccaccccctaggccaaagagaaaaccactgcacccataccctcgcaagtgtgccgactccaccgtgacaaatgctccaatgggcgaaccgaagaatgctcctgtttcatcaccatctggttctgaccaagagaatggttcgcctgtctcggtgttatctgcaatgcagtcggatgcttttggttcatcaatatcaaacccatcaactgggggcacgtctcctgcgtcatcagatgatgggaataatgtccctgagatagtgaatggggaggaaaatttgctcactcagcaaa

SEQ ID NO: 3270 - DNA, 273 bp, Zea mays
acacgcttgccaaataaatccaggggaacaataccagtccacatggactagcggcaacacaaagcaatggggtactaattcgaccaataccagcctactaacaaggaaaaagaagtgaatggagacgaaatcagctacaataatggcacagcacaacttcgacagcatagagcatctaaaacattggggctcgaacaactttgcaccccctccgaagattactgtccctcgcctgcatcacctttcggggcatctttgccctcatcagcacca

SEQ ID NO: 3271 - DNA, 511 bp, Zea mays
  misc_feature (490)..(494): n is a, c, g, or t
  misc_feature (499)..(506): n is a, c, g, or t
cgactctccggctgctccgtctgcctccaggtaactaccgagcgatcgatctttggcgtccatcgatctacagtctacgatccgatcccatctcagacgacgggagtcgctgttctcgttcgtgaatgtgcgcaggatttccaggtcggggagaaggtgcggagcctgccggactgctggcacgtgttccacgtgccgtgcatcgacggctggctcatcaagcacggctcctgcccgctctgcaggaggaagctgtaggcggatcgaccggacgacgccatggacgatgttcttctctgcgatcgagccgatgatgtgtgtgtgtgtgtgcccccgccgccgccaccaccgatagctgctgctaggatcggaggagggaggagggagaagagactgacatctatagaacccttaatttatagagagggcttttgctttgctgctacttgtacgtgctctactacgtacctattgcatctttttttttgannnnncatgnnnnnnnnccttc

SEQ ID NO: 3272 - DNA, 511 bp, Zea mays
  misc_feature (56)..(56): n is a, c, g, or t
  misc_feature (59)..(59): n is a, c, g, or t
  misc_feature (65)..(65): n is a, c, g, or t
  misc_feature (73)..(73): n is a, c, g, or t
  misc_feature (78)..(78): n is a, c, g, or t
  misc_feature (106)..(106): n is a, c, g, or t
  misc_feature (283)..(283): n is a, c, g, or t
  misc_feature (329)..(330): n is a, c, g, or t
  misc_feature (342)..(344): n is a, c, g, or t
  misc_feature (367)..(367): n is a, c, g, or t
  misc_feature (375)..(378): n is a, c, g, or t
  misc_feature (385)..(385): n is a, c, g, or t
  misc_feature (477)..(477): n is a, c, g, or t
  misc_feature (482)..(494): n is a, c, g, or t
  misc_feature (499)..(506): n is a, c, g, or t
cgactctccggctgctccgtctgcctccaggtaactaccgagcgatcgatctttgncgnccatcnatctacantctangatccgatcccatctcagacgacgggantcgctgttctcgttcgtgaatgtgcgcaggatttccaggtcggggagaaggtgcggagcctgccggactgctggcacgtgttccacgtgccgtgcatcgacggctggctcatcaagcacggctcctgcccgctctgcaggaggaagctgtaggcggatcgaccggacgacgccatgnacgatgttcttctctgcgatcgagccgatgatgtgtgtgtgtgtgnncccccgccgccnnnaccaccgatagctgctgctaggntcggaggnnnnaggaggnagaagagactgacatctatagaacccttaatttatagagagggcttttgctttgctgctacttgtacgtgctctactacgtacctattgcanctttnnnnnnnnnnnnncatgnnnnnnnnccttc

SEQ ID NO: 3273 - DNA, 418 bp, Zea mays
tcggtggacccaatggtcctggctttccccttggttttggtcaatctagggccaagtttcagatggaacccaacactggtgttacatttgatgatgttgctggtgtcgatgaagcgaagcaagacttcatggaagtggttgagttcttgaagaaacccgaaaggttcactgctgttggtgctcgcattcctaagggtgtactgcttgtcggtcctcctgggacgggtaaaactttgcttgccaaggcaattgcaggagaggctggcgtgccatttttctcaatttcaggttctgagtttgtggagatgtttgttggtgttggtgcttccagagttcgtgaccttttcaagaaggccaaggagaatgctccttgcatagtgtttgttgatgaaattgatgctgttggaaggcaaagagg

SEQ ID NO: 3274 - DNA, 361 bp, Zea mays
tggagggtaaaccagcatcgcgtaatggaccaatgccagctcggagtagaagaatgccatgttctcaagctgcgccaaaagcaccgaagaaaatttcaatatctaaatgtgtggtgtggtgctaaaacaacattacttggacaactatacctctgtgtcacacattgcggctttcaggtacctaacaatgaacatgtacattgttggaaccgtcaggttccaatggagcctgtccaggatggccttttccttggtcagaacctggtctctggtaaatgcgttgtcacagaggcacatcaagtccttaacctgtaaaatatcgctgcttgttgtgtaagctaatcgaagaatggactatagc

SEQ ID NO: 3275 - DNA, 745 bp, Zea mays
acagctcagcttttgctgaggctcataatgattcaacagaggaagcaaataaccgtcattcagcaacagatggttacgatagttcaaggaaagaagaattcgtcaatgagaatttatgcaagcaggaggtgtacttgagatcatggaaggcaattgagcagggacttcttgtgaaaggattagagatttttggaaggaacaggttgggtctttctcctaatatccaactctagatagctcatagtgatcagattggtgttccttgcacaaggaacttaggaaatttgtttcccttgatctccaaatttcttgaaattcatctttgtactgtaaatttgtttcccttgatctctttaccttgtgacaccacataaacgtatccgagatctttgtactgtaattgtaaaaaaacaatttaatcttggtttacctaatcttaatagttacaatgaacccatggtttgtctttcacacagttgtttaattgctcggaaccttcttggtggaatgaagacgtgcaaagatgtttttcaatatatgaattatattgaaaacaacagtgcctctggagctcttagtggtgttgattctcttgttaaaggatatattaaggttggatgcactgtgacccttatttgttgatacttacattcaagccggtaacttaatttggtgttgtccgtgttgatgtcccagggtactgagttgcgcacaagatcaagatattttagaaggcgaggtaaag

SEQ ID NO: 3276 - DNA, 251 bp, Zea mays
accgccgctacccaagatccagtctccgttctccctctcctctcgcttcatacacaccagggcggcagcggcagcggcagcggcaggggcccgccatcaccaacccacctcccttcaattataaacctataaaatatcatcattgacccaagctgaggcgactagtgggtattgatttttggtggggcagatcaaggagggggggagggggttaacttccaaggaaccagttcattgctggtttctgctag

SEQ ID NO: 3277 - DNA, 386 bp, Zea mays
cttctggtacagaggatacaaacaaggaactgctttgctagcttcttccaaacaattctgcatgctatgccaatcgttctgtctctgtctctctctctaataacaatgacaagaatctcaagtagcagttcaatcaatctgtgcatgctatggagtatgaacaagaatcaattttgatggaaagttagtcggcggtgagagtgagacattcgagcaccctggcccctgtcaggctggcaatttgcccaggtcagctacgttgttagattatagtatacgtgtgcatgcatggccaggtcaggtgccgaggtgttgctgcagcttgctcagatcagacgccgttggatctcgggctggcgccgccgtgttgtgtgtcgacgttgacg

SEQ ID NO: 3278 - DNA, 386 bp, Zea mays; identical to SEQ ID NO: 3277

SEQ ID NO: 3279 - DNA, 430 bp, Zea mays
tgctgtatctgcgccatcaagaactcatgtggatcatgccgctcttaccggtgcctctcatccagcttctacggtcaagacacgcatgtgcaccaagtacaacactacagaaggctgcaagttcggtgataagtgccatttcgctcatagcgaaagagagcttgcgaagccagcctacatgtctcaagaaggacctcctatgggtggtcgatatggacgagctgaacctatgcaaccagctgccatgggccctccagcaggaaactttggtgcctcggcgactgccaagatcagtgtggacgcctctctggccggtggcataatcggcaagggtggggtcaacactaagcagataagtagaattacaggcgtcaagctctccatccgcgaccatgagtctaaccccaacctaaagaacatcgagctggaa

SEQ ID NO: 3280 - DNA, 708 bp, Zea mays
catggatgatacatgctctactgctaacttgaaagtgacaaggaaaagatctagcaatgatagtgcgttcaatgttccctcatgttcatcctcattagtcatggaatcacggattcatcataatgaacctagttctgttctgtattcaggctacttccagaagacagcagacagagatggcactagtaaggtactccctccattccaaaatagtattcgttttagctcttaattttttatatctatattcaacagatgatgataaatgaagacacatatatagaactacattaagtattgtataaatcacataaaaagacaaaacgaatttagagacctagataacacaaccaaaaaatataaaagtatatggactagaaatgtgtatgttgagagtttaaagactgggatgatacaacataacaagtttaaagatcttagatgtgtactttgggagtttaggtactgagatgatacaacactataagtttaagtaccgccagtgtatatttattctattcttattatagacatctgaataactccttacaggttgaagataatgacagtgaagatagtggtacgagcatctctaggccatccaagaaagctgcttagcattagcgcattgaagatgttgcaaatcttcaatgagaaatatttaccgtcacatgtaatttagttggtgcgtttgtagtgatcatgcaa

SEQ ID NO: 3281 - DNA, 619 bp, Zea mays
  misc_feature (557)..(558): n is a, c, g, or t
  misc_feature (569)..(576): n is a, c, g, or t
  misc_feature (590)..(600): n is a, c, g, or t
  misc_feature (602)..(614): n is a, c, g, or t
gggagcaccttccagggtagtactgcccgtagtctgaggggcaccatatgaagatagggaggacagagccccctttcgccgccgctgccaaggccgggttgtcctcgatcctgaggtctctcctgaaccaaacaacagtcttctccggtccagccatgctcagcaaccaatcctactgttcccaatcgaccatgacaagcccaaggacggggattaccatgtaacagaacttctcaaacccacctcgtcgaacatggcccgtgcacatgcaccaccggaggaaccagcacgcaaattgcaacagaagtatgagtcaaggacaaatgatggattcgatggttgcgccagagatctgctgcaagaagataggaaggaaagccgtcacgacgctcggtccataagcgacaatattcgaggatcagggaggaggcgaagcggaagatccaagattgaggggcaccaaccgaatcgcaacttgtgggtaggagaacaggatcacgagctaggcggccacagcagcatgggcgcggggcaatctggtgagtagcgacaagtanngattcggttgnnnnnnnncaatcttggatctnnnnnnnnnnntnnnnnnnnnnnnncgaat

SEQ ID NO: 3282 - DNA, 1108 bp, Zea mays
  misc_feature (1073)..(1073): n is a, c, g, or t
cattccttccgacattgtatgcatcatttcaggtttgttgcatgataaaattgtgtaatattattaatacggtgctgggattgttaatgtttgttctacttgattttattatacttagattatattatggtttccatcatctcaatattgtcatatatatgttgcagacaaagacacatatatgtcttattgttgactattgtgctggtggggaactctttatgctccttgataggcaacctatgaaggttctgaaggaggatgcggtcaggtaggcattggcatttaacttgattcttgtgcttagatttagtgaaaactctttatgcttcttgattgtcatggatatgctactctgtcccttatttggttgttgctacataacataattggtggtcgatacaagaagacaagaagtattgtttgatataattatccatggttgttgcaggttctatgctgcagaagtggtcacagcacttgaatacctacattgccaaggtagtcatatatgtcatatactacctccggtctcgaatatttgtcgcttgctagttcatgtttgaactataacgtaacaaataaaaaaacggacgaagtactaattacattctctttggtggtggtggatagtatgcatgtcatgggtagtgaaacacaaccccatattcaataaccatattgtttcccttgaccaataataattgttttccaacatctcgaatgattgttttaggtaagaatttaaccattcatgatagtggtagacttccttattagacaaaaggggggaaagggtcccttgcacttattcatcgcattttaccagtgaaatttgagatgttcactatttcttagtatttgatcccttttttttctcaggtataatctacagagacttaaagccagagaacattttacttcatagagatgggcacatttcattgacagactttgatttgtcttgcttgacatcctgccgaccacaagtaatgtcacttcattaatataccttaatggacaattcatggctattagtttaactccttggtctatttttcttagttgcactnaagtcactattattgttgtttgataggtgtttctt

SEQ ID NO: 3283 - DNA, 505 bp, Zea mays
aaccttatggaactccctcaccatcatcgggtacgggtgcggaccggcaacagagcccaagatatagtgtgtggtctccacatttgtgacccagtcacggatagcctctgaagttgcatccttcagggttgctgtcccagaatgtaccgccctgacctgttccagcaaaaaggaaacaatataccataagaaaaacattaagggaagtataacaaattattttttttcttcttccctgaagaacaagtgcagatacagactcaatctaacaaacagatgcctccgctgtacctctgcaccaagaagcctcatccggaaaacattgagcgcctgcctctccatatcctgtgcgcccatgtagatgatgcactgcagcccgaaacgggcgcacacggtggcggtggcgacgccgtgctgaccagcccctgtctcggcaatgatgcgctgcttcccaagtcgcttggcaagcaaggcctgcgccacggcattgttgatcttgtgggca

SEQ ID NO: 3284 - DNA, 420 bp, Zea mays
atgagtacaacaacttgattacaactaaaccattaatgcatctgtggtaccgaagttctactcaaatggctctatatgagtaagagatctttgtacaaaatgatcttttttaagtaaaaggaaaatgctttgagcacagctggagaatagcatataaataattcagtgtagttttcatcaagtggtcttcaacattgaatcttaagtcaagtcggcctcatataaataattctgttatacatgtagcagttctctcattgcattgttaaaacataaatgtgcagtctagttctttcctgattaggttagtttctactttggagtttgcaaagacagtttaaatagtggaaaagtttggttgtttattaccttagcttgataataatgaatatttatttatatgtgttttaatgggagaac

SEQ ID NO: 3285 - DNA, 418 bp, Zea mays
aaacagaagcatttatgtttgcttaatttttgcctgccgtacaggcttttgcgaaagtctccactagtgttttcaaattaatttgagggctcttttggcaagttttctgaagtgtatttgctggcgcagaattctggaagcaaattcctccaaacgagccctaccgggtgatactaggccatgtaagggacaagctgtacaacacacgcgagcgtgctcgccatctgctggcatctggagtttctgaaatttcagcggaatcgtcatttaccagtatcgaagaggtaaatatcgtcatgtatatatattatatatattcatagtatgacatcagcactgcaactaacaaaaaaaatcactatactgtcgtgcatgcatgcagttccttgagccacttgagctgtgctacaaatcactg

SEQ ID NO: 3286 - DNA, 379 bp, Zea mays
ccgcacaccggggtcgcgctcgccgccctgttcaagctcagggaccagcgcgtcatcgggacgaacgaccgcaccgtggtcgtcagcacggctcacggcctcaagttctcgcagtcgaagatcgactaccatgacagcaagatcgaggacatggcttgcaagtactccaacccgcctgtgagcgtgaaggctgactttggcgccgtcatggatgtgctgaagaagaggctcaagggcaagctctgagcgcctgtgcctggctaatgcaatcaactgattggaatgcagtggtttcgtcggtatcggggggtcttttaggcttcagaaattctgtctgggttagactatctgtttgtggagttagcaggagaatggatgt

SEQ ID NO: 3287 - DNA, 841 bp, Zea mays
  misc_feature (772)..(772): n is a, c, g, or t
  misc_feature (774)..(774): n is a, c, g, or t
  misc_feature (827)..(827): n is a, c, g, or t
  misc_feature (833)..(835): n is a, c, g, or t
  misc_feature (838)..(838): n is a, c, g, or t
gctggccgacttcgccgccgccgtcaaggaagccggcgtgcacggcctcatagttcccgacctcccgtatgggaactcgtgcgctctcactctcaggaccgaagccatcaagaacaacctcgagctggtatgtgacatcaattatcaaggagaagcacgtggcgtcgtctcctactagttcttctgcgcaatataaaattgagaaagcagcgtctgtctcacgacatgaacaatggctgaacgcatgcaggtgctgctcacaacaccatctacgccagcggacaggatggaggagataacacgagcttcacgaggattcgtctatctcgtaagtgacacaaaactttccgtccaggagtttttgctagcgactgaacttgccggccgatgacatgcatgcatgctcatgtatcctacttgaccatcacaggcgagcgtcaatggagttacaggtccacgcgcaaacgtgaacacacgtgtccagtctctcattcaggaggttaaacaggtaataatacgtcatgtcaatggaaaaggagaagagagagagagagagaagatgccatttttattcgtttttgttgttaccaatcacaatcactgagctggctggcttgtgttttttttgtttgctgcaggtcactgacatacccgtggctgtcgggtttggcatatcgaaacctgagcatgtaaagcaggtaggcaaaacttttttaaaaaaaatgcctcaaaaacttattcacatatttttttatagtaacaaattctaacngnatatatattgcgacatatttttttatagtaacaaattctaacagtatatatantgcacnnnacnaga

SEQ ID NO: 3288 - DNA, 855 bp, Zea mays
cgctcaatacagatacaagactgagcagtcatcgacgatgaacaagcaagcgaaccttgagctcgcatccagagtttaggcgtgagcgaacaccaacaatagagtgctcgatggcacactcacgcaagaagcagccgtgtgaaatgatcgcgtctttaatctgcacacgttgaatccaaaggtcaaataggcacaagctcatactacagtttacaggtcacaggcaccattcattccatgcataggaagcgcgtaccctgcacttatccgacttcgttggtggcaagtaccgaggggaagtgaagaatggtgttttcggatcgtaaaactcgaactttggaggctgcgacggggcatacgagatgaaaactgtattagtctggatggaaatctatcatttcaagatattttcagtctaaatgcactggacagttaagagcacattagaccttggaaagagaaaacagaatatacctgctcgcagagggccatgtttgcatcaaagaaagatctgattgttccaatgtcctcccagtagtcagtgaaaacatatgcctgacaaacgaagtcacatgaactgcctgtgcatttggtgcgatactgctctaccctaatagagattggactcgtgcaaagctgactgggcccgtgatttaccgaataatggaagtgaatcacaaaggaaactgttttacctgtacattgtgctcatgcaaagccttgggcagaatttcagaaccaaagtcatgcagttcagcataccgtgacctataagaatgctccagttagaatgcagactatggggaactgtatggaccacaaagaaaaaaaaactcttactttagaaggtctaac

SEQ ID NO: 3289 - DNA, 867 bp, Zea mays
  misc_feature (505)..(505): n is a, c, g, or t
ttatgccactgttgaaacagttgctcatggggatatcaataagcctgtaacatcctccaataggaacctaagtaatgcaacaaaaggaaagaaacaagattcagaccactgattcaatgcaacaaaaggatggagatggacaaagtagtggaaggaatcatgtgcggtggggccctgctaataattaataattaataatttaaacatacggaaacctcgctactgcaggaattatggtttaactacctttatacaaatcaattaccatgtgaatatttctagcaaagccacatacttttggtgccttctgcagtagaggtgtatctacttgaaataaaataaagctggagattgctagagatctctagatcctgtctacttaataagaccgaagatgattattaaatcggtacttcttgcaacatgaagccaataaagtcaaagtgtgccatcttacagcaggggtggcccttgtgcttgtgagagggaaaagctgagtcccggnaccaccacccaaaatgacggcagcgacttcgttaggatcagcataattcctccgaaaggatgttcggacgacctgtaagtttttgcatccagaaattgataattatagcagctaacatcaagtcaaataaaaaaatacaaagggctgtgatgaaacaccaatactattatcgacaggatgagacttacaagagtgtctgggccagcatctgatgtgagcacacactgggtgctgctcacagcaccccttgcactgaaacacatcctcctcagtgccttgttgcgtctgatgctgcagcagttgatcctcatcctctcactcccataacctccactgcctctcctcactgggctcatacacgc

SEQ ID NO: 3290 - DNA, 809 bp, Zea mays
tgcaagtatggtttaattccttttgctctgctttcaagaaagcaaatattcagtatggtttaatttctcaaccgttgaatcatctgaatgttatttggtttggtaacctcttatttcttctttttttagtatgagaagttcctaacctcttagtatttctttaagcaaatgtttccttacatgagttattgaaggagatggtaacatataccatttcacttataagacctctgtcagaatttaatgccagttacataattcagtttatggtactctcaagtaaaaccttccgagttgacgccgccttggcaccctttgcttccatggacagcccttttactgccgcgaggtaccacagcttggtcattgagcaagaaaccttcccacatgatgctttggaggctactgcatggactgaagatggacttatcatggctgctcgccacaagaagtacaaacacatccaggtacctctgtttccaaatgttttgtaccaccccccgttcccattggatgttctccttggagttctggacctgtattatagtggctgctaactgtagctgttttcagggtgtccaattccacccggagagcatcatcacccctgaaggcaagaaaatcatcctcaactttgtcagattcattgaggaactggagaagcagcgttcgtaggggaggtagacgcgacaggtggtttcatttcatagatcagacggaagcagagacaaggcgcttaaagctgcgccaggttccggggctggcagttgaagcatagctaggaaacagctttccctctcttaattctg

SEQ ID NO: 3291 - DNA, 425 bp, Zea mays
taagccgatcctaagggacgggggaaacccggcagatagcgcgatcacgcgcgtcacccgaaagggaatcgggttaagatttcccgagccgggacgtggcggcagacggcgacgttaggaagtccggagacgccggcgggggcctcgggaagagttatcttttctgcttaacggcccgccaaccctggaatcggttcagccggaggtagggtccagcggccggaagagcaccgcacatcgcgcggtgtccggtgcgcccccggcggcccttgaaaatccggaggaccgaattccgtccacgcccggtcgtactcataaccgcatcaggtctccaaggtgaacagcctctggccaatggaacaatgtaggcaagggaagtcggcaaaacggatccgtaacttcgggaaaaggattggctctgaggg

SEQ ID NO: 3292 - DNA, 422 bp, Zea mays
ctcttggtggagtggtacctcagcagctccgcaatcttgttcctgttcgtggagtcctcatggatgccaagcttcaggttcttcgagaaggactcatagaacttgttgtagtcctccttgttctcagcaatctcaaagaacagctcaatgcacttcttcaccaggttcttccggatgaccttgaggatcttgttctgctggagggtctcacgggagatgttgaggggaaggtcctcagagtcaacaatgcccttgacaaagctcagccactctgggatcagctcctcacagttgtccatgatgaagacacggcgcacatagagcttgatgttgttcagtttcttcctggtgtcgaagaggtcaaagggggccctcttcggcacaaacaggacagccttgaactcaagctgaccctcaacaga

SEQ ID NO: 3293 - DNA, 367 bp, Zea mays
agcggcgcaggtgagtggcgatcttcataaagctcagagatttcgcatcaatatgctgctgctgctgcttctcagccaaaccatggccggcgagaacgaaacctccctccagcgcaaggaaccccggagaaccccaacgcagaggtttgtttggatctctggccccgggagagcagcagttcctggactggcgaaccgggcagagcttcggtcctgggaagctggcctgctcgatctctggcggagaaacgagctgaaatctcgacaagctcgtgctggctgcggggaagaaggcgagccactccaattggaggcggagaggagggaagggggaggggatcaggccgagcggggaggtgtatttaat

SEQ ID NO: 3294 - DNA, 367 bp, Zea mays
  misc_feature (14)..(14): n is a, c, g, or t
  misc_feature (64)..(67): n is a, c, g, or t
  misc_feature (145)..(145): n is a, c, g, or t
  misc_feature (164)..(164): n is a, c, g, or t
  misc_feature (197)..(197): n is a, c, g, or t
  misc_feature (220)..(220): n is a, c, g, or t
  misc_feature (235)..(235): n is a, c, g, or t
  misc_feature (286)..(286): n is a, c, g, or t
  misc_feature (309)..(309): n is a, c, g, or t
agcggcgcaggtgngtggcgatcttcataaagctcagagatttcgcatcaatatgctgctgctnnnncttctcagccaaaccatggccggcgagaacgaaacctccctccagcgcaaggaaccccggagaaccccaacgcagagntttgtttggatctctggcnccgggagagcagcagttcctggactggcgaacngggcagagcttcggtcctgggangctggcctgctcganctctggcggagaaacgagctgaaatctcgacaagctcgtgctggctgcggngaagaaggcgagccactccaatnggaggcggagaggagggaagggggaggggatcaggccgagcggggaggtgtatttaat

SEQ ID NO: 3295 - DNA, 340 bp, Zea mays
ttctcgaagatgtcgttgatgaaggagttcatgatggacatggccttggaggagatgccgatgtccgggtgcacctgcttcagcaccttgaagatgtagatcttgtacgtctccacgctcttcttgcccttcttcttgccacgcttgccctcgccgccctccttgccggcggacttgccagcggggacccgcttctccgccttgggcttcttcccggcggtcgtcttctccgccgcgggctcctcctccgccggcttcttcgccgcgggcttcttctcggccttgggcgccatcggtctttggttgggagggggataggcaatcggttgcaaggaaatgc

SEQ ID NO: 3296 - DNA, 579 bp, Zea mays
acgcggactgcgacgagcaggacgggtatgatgaggccatctgcccggtggactcgttccagaagggccccatcctggacgacgagatcaacgagaccatcgtccggccgctggtgcccggcgccaagctccacgccgtcgtcgacgcgtgccacagcgattccgtcctcgacctccccttcctctgcaacatgtccaggtaattatatttggaagctcgtcgtccggtgctggaaatccccgtgcccggccgtacatctaaaacatatctccattcctctctctgtctgtctaggaccgggaactggcagtgggaggatcaccgtccaccgtcgggcgtctgcaagggcacgagcggcggccaggcggtgcttatcagcggctacagcgacggcaaaagcaagttcagcatggtcagtgcactgcactgcacacccatcctatactcctactatatatggtcgccatgaacgtaacgctcgctcgatctaatctctttgcgattggttcgacacgcgacgcgcgccatgttctgttgcagacgccggaggcctgcgcgacggtgggggccatgaccca

SEQ ID NO: 3297 - DNA, 410 bp, Zea mays
actcttacagacttgctcggcgaagaggcctcttcctccgtggttgccaagctggccaacgatggctctggcattggagctgctctccttgcagcctcacactcccagtatggcgagagtgactagtcttgaaaacgggtgtggatcgaacttcgagtgtagctctcatttttatctttttttcccttcaaaacatccctaatattccggctctcctcggggaatttttcggcttcctttcttggctattctgtggatgcacttaaggctctgcagcgggatatagctagtatagagccaatcagtttggaggttatctaatggcataaggtttggacggcaggaacatagaaatggaagctgaacaatgccattcatgttctgcccagtttttcttctccttgtatggt

SEQ ID NO: 3298 - DNA, 1326 bp, Zea mays
  misc_feature (708)..(708): n is a, c, g, or t
  misc_feature (742)..(742): n is a, c, g, or t
actttgtcccggcctatcttcttcaggatgctatatatacctgcggcagccaagcgtgctccacgctctgcgacaaggtcacagatgtgacgggtaatgtatcttacttccagggaagtatctgcgacctgaacatgatatcaaatatttcataagtgatcaagacaatttatggtaaccaatttggcacaaacaagtcataccccaactatatccttcagtttagatccaagagttttgaggtcatgcgaagagtcatgatgcatggctgacatatctggcgtcctgttataccacaatgattgtattcagaaaacatatcctattagatacataagaagtttcaacttactaagcataaaagagcacaaaagagctggtgtgaaagaatgttaagcgtcacaaaaagatgacgttactaatggcatggggggttcaacatgcctcaaatatgctatactccctccagccctttttaactgtcgttctcatatttcgagaaatcaaatatactcaactttgaccaaatataagaaaatattaatgtttattgtacataattggtaccattagatatatagttgatttttttataataaacaaaattagagatacaaatgttgctagtattttctacaatcctagtcaaacttaagaaagtttgaccagcacgtattccacagcgacaattaaaaatgagggagtacnactcaatacatgtatggaatacatgttaatatanttaggagagataaagggtgattgtttattttggctccaggtcaataccttattagccctgaaatataatataaagctccttgaagcaagctgtttctaggcatacgatttctcatgccatcaagatagttaacttgcagcatatcagagaccatgtttattgaaaccaattgaaagaaaaagagagttgaccaaaaataattttcatgtcatcttctttggattacttactgatgtgacatgtaacttataacataggcagccccctgtctgttcaagtacgactttactgccgcatactaaatatgatcaaggggaaaatccaaactctaaatgtcaaatgtcaatgcgttataattcaatgcccatgatcatgtaagctgagaaaacaggcacgaacagctcgatgtccacaggacaagaaagcatacctcaatataaatggctgctccagcttagttggaacaacatctccaaatagagaagcgtcatgtgccaacttgagtaaaattcttcgaacaatctctcccagatacatgccagaaatcattttttcgtatatctgttggaagctatacattagct

SEQ ID NO: 3299 - DNA, 148 bp, Zea mays
gtagttgacgccgcgcttgagcgtgacgcggtcgttcccggtggtgagcgccctgacgcccctcggcgcgctgcacgagctgtaacccgccgagctcacgggcaccacgttgtgtgccttggggtcgtacttgaacactaggacgtcc

SEQ ID NO: 3300 - DNA, 485 bp, Zea mays
gcgttccactccagcagcggccacgtatcccacaggtccggagtggcgcagacgaaggggtcgtgcaggccatcgtactcgtacgcgacgtggtcgtagtactcgccggtcgccgccgagtcctcggaggcgtctactgcagccggcggcggcgtggcgccgtcgtcctgcacgagggagctggtgctattgttcctcttgtcgtccgccgccgcctccgcgtcgttgacctcgcagctgccgctctggtcttgccgctcgttcagcctcccccgcagctcgtctacctggaaaccaacatcgatggatcgtcagcgatcgaacgtcggcgtatatatggagctgtgaaatcaggaatcaagcagacgactggtagtggtacctgcgcggcgagcgcgatcttctcctgcctgagcgactcgacgcgggcgtgcatcgcgtcgaactgagcccggagcgcggcgtagtcatgctccagctgcttg

SEQ ID NO: 3301 - DNA, 678 bp, Zea mays
  misc_feature (625)..(630): n is a, c, g, or t
  misc_feature (654)..(661): n is a, c, g, or t
ttttgggatgtagcttgtggcatctaattcagtagttcatcaaggtcagtatttgctatggaacatctcagggtcaatcaccatgggttccaatggctttcacaactgaacaaatactcgtccccttctagtcatgttacccaggtcgtgctgacagcctaaattttgctccatttaataataaaaccaaatctttgttcaccttaattcgtctaattatcctttcttgattgccttgagttatcaaaacatttcctggtcgctttccctgagctagcagaacatgtggacagtggttctaatgcatggctgttaaaaacattgcaggtaacagtcgaagagaagtcctaccataagtcatgcttcaaatgctcccacgggggctgcgcgattacaccttccaactatgcagccttggagggcatcctctactgcaaacaccatttctcccaacttttcaaggagaagggaagctacaaccacttgatcaagtgcgcgtccgtcaagcgcgctgctgaagcacagccagaacaaccggcctctgattcctcctcctgaccacgccatttaaacagtgggggtttggaggcgagagagttgggaagcctcctgtttctacttaaannnnnngtgatgtatgttattccatctatnnnnnnnngatactagactactact

SEQ ID NO: 3302 - DNA, 316 bp, Zea mays
ctgaggggagggtccatggtggtggcctactgtcacttctcggtggcagcttcagggacgccgacgtggaaaagctttgaagattttgtcagtttgtttgtacataaacaggccgcgttcccgcctatagaattgttattgtgccttttcttgtctagataaacatttcaaccttcatgtaccggttaaatcaatactggtttagtccattgtaaagtggtgactgtcaattgtcgtgaacgcttttagcttgttggttcggttcggttgtagtctgtctgtttgtgcgtattcttaagaaactcgtctggacttt

SEQ ID NO: 3303 - DNA, 110 bp, Zea mays
acgtaggtacacaaaatatgctgtagggaatgctgatgtcttaacagattacataacaaaatgggagagtaatccacaagcaggttgcaatcgccaactagtccactcgg

SEQ ID NO: 3304 - DNA, 370 bp, Zea mays
tcgatctagccacggtctctactcgctgccggggggcttgtaggcgatgaagctgacgcactgcgtctgcctgacgttgtcgaagccgatgacgcggtggaaggcgtccgggtacgcggcgatggcctcctgcagctccttgtacacctgcgtggcgtcggtgcagccgaacatgggcagcttccacatggtccagtagcggccgtcgtagtagcacggggaggtggagttctcgcggtacacgaacccgagcttgctgaactcgaggcagggtatccagccgttgcgcagcaggtagtccacctgcttcagcaggtcgtccgtcgacagcggcggcaggtacgacagcgtctcgaacttcttgttgccg

SEQ ID NO: 3305 - DNA, 247 bp, Zea mays
  misc_feature (44)..(44): n is a, c, g, or t
  misc_feature (64)..(64): n is a, c, g, or t
  misc_feature (118)..(119): n is a, c, g, or t
atgctgacattctcagttttcccctcaccgaaagtatctgatancgtggttgagccatacaatnccactctttctgtccaccagttggttgagaacgctgatgagtgcatggttctcnntaacgaagccctctatgacatctgcttcaggactcttaagctgaccacccctagctgtaagcagactctttctttctcaattttatctgctcagcatgacacatatatgcctgcttgtgctagtgtat

SEQ ID NO: 3306 - DNA, 546 bp, Zea mays
tacatttgcgagttacgggacccctacaggaggttgccagaacttctctgtagggaattgccatgcatcgactgctctagacttggtggtagaggtaagtttgacgagcaccaacatgcatcttgtagacatatatctgttctcagcaacttggcctctgttatctctgcacatgttaatcctgtatatgcgtccatgaaacacaaataaacaaaggcaataatttcatttgaaaaatccaccagacatcaaacctgtaatactcactttactgtattcccaggcctgcgaaggcaagaacagatgcgcgatcagtgttaccaacgaagtattcggagatccatgccgcaaagtcgtcaaggatttggcagttgaagccgagtgctccccgccatcggttaaccaagaacctcgatacgatatatgatcacggtactgtattgtggtgctcaggtcttggaagagctatggtggacgttgccgcagctttgcagggccgtgcacaatggtcctgcatcgttgtctcctatacctctgcacccatat

SEQ ID NO: 3307 - DNA, 405 bp, Zea mays
ctgcacccatgcatcaccatggtcatcatggcaatcatcaccatcaccacagtcatgacgacaacaggcatctagctcctgctccagctccagctccagctccagtacattttgctatgccgcaacccagatatggtgctccacctccatctgggtgtccatacagcaaaaacaagccaaataaaagagggcccgttacaattacaccagctgctgagcctgcagctaatgatcaccgatctacttccattgctttaccaccacatccatcgtcaccttcatctgctagtcgctctcgacatggtcccagtatgcagggtggagctcctgtttctcaccctcctgctctaccagagccacctttgcccaccgtttcgttcgctcatccacatcttccaagtgaac

SEQ ID NO: 3308 - DNA, 852 bp, Zea mays
  misc_feature (846)..(847): n is a, c, g, or t
gcttcgagaagctgggcctcgaccccaagcccgtaacagaatgctacaaaagcgagcatggccacaaggttcgtcctcgattcttcttcggctagctttgaagtacttcttttctttgtgctgctttagataatggaaaaaatactccctctgttttaaaataatagtcgttttagttttagatttttatgtccatgttcatatatggtaattatgaatctagacacatgatatatagaacgtatgaaaccggtaaaaagtaaaatgggaattttaatttgggacggctttagataatggggaaaaaaattctgtatccggagggtagggccaaacttctttgtgctgctagctataccaattctgttctgttcatgtctcttttctcttgtaactgtaattcaatgcatgtcctaaaactaaaagcagtatgaatttgcaacttgttcactggtttcttccagctcgagctcaagtacgcgaaccagaccgacgctctcgagccgccgcaccggtacgtgccctgggtggtcgtcgacgggcagcccctgctagaggtaagttcctttctttcccctgaacttcaacggcgccgcctttgcccaactgtctgatcaaagttcattcccccgttggtgttggtggtgatgatgaacatgttctcgtcgatccaggattacgagaatttcgaggcttacatctgcaaggcttacaagggcactccaccgaaggcctgtgagggcctggaacgtctgcagatggccctcgagacagcggcggaggcgcgcaacggcgtcagctacaactccggtgtcagcaagcttgcgactgctgaagatgagggtnngagca

SEQ ID NO: 3309 - DNA, 539 bp, Zea mays
gtgtgtgctccgttcctcgttgttttgtttcttcccagcaccctgaaataaattaaccagtggcttggctttggcccctgctggccgcctagctagcttttgacacagatcgatgatcgatcgttcccgtctctggctgactgatgaaagaggctggactggattattagacctttgcctccgcaccgtcatccggcacttgggacgacgacgccggattattgtccgccgccttgtcctgctgcccggcttttcccggcgggccgctgatcttgttcatcaggtcgtcgtcgtctcgctcctcgatgctcttgccccagaacacattgtacaggcctccaaccagcaacgccccggcaaagatgctgcatccggacgcatgcatatatatttttttttaaaaaaagagacaaatacaagtagataataacgaagtaatctgcatcacctatatatatgtacgacaacagaacagcatgtatatatgtaccgaccttcctaggctgactgcgtcccctatgacgaaggaggatatgacg

SEQ ID NO: 3310 - DNA, 510 bp, Zea mays
  misc_feature (502)..(502): n is a, c, g, or t
tgagaaaagggacctgctgcatatgctgtgagactccgattgactcccttctgtacaggtttggctcgcattgaccacattctattatttattggacgagtgttgaatcatagtctatatgttggtagtagctgtgaacctgttttttgtgtttattactgatcagatgtgggcacatgtgcacttgctcgaaatgcgcaaacgaattggttcgaggtggagggaaatgcccgttgtgccgcgcacccataatcgaggtcatccgagcatacttcatcatgtagatacaaaaggaagacagcaagaagatagaagaggcccaaattgtttttggtctgtgtggagtcgttagcgggttgtgtattcaattttgttcattctctctaatgcgtttggttaagtttttttccggcttcatttcgttttggtctgcttgccctattgtaagtaatgtacggttttgggtgtggcggcaggacgggaaggtggtcttctctcattnggacttgg

SEQ ID NO: 3311 - DNA, 424 bp, Zea mays
atgtctattcgattggctttaatacgtacttctacatttttctgtctctatagactaacagtccaaacgacaacccttaatagtagactacactgtactcatacagcaacagcactagctagctagtagcacataacaggagcatcactctcttcaaaatcagcagcacctcacaccacggagatttacaggaagatgacgtatatacatacaccgttaacgcgtagtataacagaaccgtgaccagaagctctctgttaagcaggtcgcatggccgggggggcctctctgttccgatcctccttcagtccgctagctgctgctgatggtggctgccttcctccatccttgtgctgtgtcctcctcgtcttggcccggccggctgcttcagcggtccagcgaactgatcaccacccagtcgtac

SEQ ID NO: 3312 - DNA, 307 bp, Zea mays
cgtcgtcatcctcggcgtcggcctcaacgccaagcccgacctcacgatcgagacctgggcgcacgagaaggcgctggaacgcctcaagcagcaggagctagccgccgtctccggaggcggtgacgccgatgccgacgccgagtgatccgctggtcagatcacccgcaactctagagatattgttttttcttttcttttctttctggttccctgcttgtgtcgcgcggttcaataaggctgtctgtcagtctgtactgagatgcatgtcatgagattgagagattccagaaatggatggacatcagac

SEQ ID NO: 3313 - DNA, 503 bp, Zea mays
gcgcgaagctccgccgcgtccacctccttggcgccacccgccgggcggtagtagccagtgactgggtccggcacccacggcgtcttctccccggaggcagccgcggtgttcacctccttgcccatgatgcgcttggccaccttctccacggccttccgcccgcatcccttcaccacgaccgcggccacggagtagcacctcctgcgccatgtcgcaggcatcatcaagacatacagttcgctcagaagacatgcatgcatcgtacgtattcgtatataacatgcatgcatgctagcatggctcagtacagctggctgacctttgtgctaggaggctagcgcagcttgacgcagctctctccatatggaagcgaccagagaagctagttgatcgaggacgaagaagcgcagctcgttatctcttcagagtctcttctgagcgagatctcgctgctgtgcaaatacaattgcaataatgtctgatgtcctcgcttctgagcgaga

SEQ ID NO: 3314 - DNA, 448 bp, Zea mays
  misc_feature (414)..(443): n is a, c, g, or t
gtggacgttatgatgggcgtccatggagctgggctcacaaactgcgtgttcttgccgcagaacgccacgctgatccagattgtgccgtggggagggttggaatgggtgtcccgcaccgacttcggcaaccccgcggagctgatggggctgcactacaagcagtacagcatcggcgtgcacgagagcagcctcacggagcagtacccgagcgaccatgagatcttcaagaaccccatttctttccacaagaaagggtttgacttcatcaggcagaccttcatggacaagcagaacgtgaagctggactgcaagaggttcaggcctattctgttggaggcactggacaacctcaacgcgtaagaccgtaaaagcttgtgcttgtgctcaattggtactgggcatggcaatagagannnnnnnnnnnnnnnnnnnnnnnnnnnnnnccccc

SEQ ID NO: 3315 - DNA, 597 bp, Zea mays
cacatgtggtgttgagttgttatgagctgtgtactgctgtcggcatatggataggcggtgccagtatggtagagaacagaacgcgccaaagttctctttatggtggtgatgatatggatgcatgcaggcacgccgagggcgggttcgaggcggccgccggagctgagaacggcgggtgcaagtgcggcgccaactgcacctgcgacccctgcacctgcaagtgagactacgacggtggcggcgatgacgctgcagggtctgcagcctgcagggcgtgatggggtcctcggaaggactctttatctctctagctaattaataagctgatctagtatataatattctagcagtgtcgtttgttgtgttttgttcgagtcagtcagacagtcagccgcgtgccatgggccatgcccatggcatagcatgccttgctctatctgctccatcttcttctacgcatgccttgttctagtggtggtactggtgggggaacgaataattgtaccgagatgttggcgccgtgtcgtgtcgtgtcgtgtcctgtcctgtcctgtccttcctggggctcatctagcagtcagactgtgttgtgttgtg

SEQ ID NO: 3316 - DNA, 597 bp, Zea mays
  misc_feature (67)..(67): n is a, c, g, or t
  misc_feature (69)..(72): n is a, c, g, or t
  misc_feature (74)..(80): n is a, c, g, or t
  misc_feature (82)..(82): n is a, c, g, or t
  misc_feature (84)..(87): n is a, c, g, or t
  misc_feature (89)..(113): n is a, c, g, or t
  misc_feature (116)..(132): n is a, c, g, or t
  misc_feature (135)..(135): n is a, c, g, or t
  misc_feature (144)..(144): n is a, c, g, or t
  misc_feature (190)..(190): n is a, c, g, or t
  misc_feature (199)..(199): n is a, c, g, or t
  misc_feature (214)..(215): n is a, c, g, or t
  misc_feature (219)..(238): n is a, c, g, or t
  misc_feature (240)..(248): n is a, c, g, or t
  misc_feature (251)..(251): n is a, c, g, or t
  misc_feature (253)..(255): n is a, c, g, or t
  misc_feature (258)..(277): n is a, c, g, or t
  misc_feature (279)..(290): n is a, c, g, or t
  misc_feature (292)..(297): n is a, c, g, or t
  misc_feature (299)..(310): n is a, c, g, or t
  misc_feature (312)..(334): n is a, c, g, or t
  misc_feature (336)..(339): n is a, c, g, or t
  misc_feature (341)..(346): n is a, c, g, or t
  misc_feature (350)..(352): n is a, c, g, or t
  misc_feature (355)..(363): n is a, c, g, or t
  misc_feature (365)..(365): n is a, c, g, or t
  misc_feature (381)..(381): n is a, c, g, or t
  misc_feature (430)..(430): n is a, c, g, or t
  misc_feature (448)..(460): n is a, c, g, or t
  misc_feature (467)..(467): n is a, c, g, or t
  misc_feature (484)..(484): n is a, c, g, or t
  misc_feature (534)..(540): n is a, c, g, or t
  misc_feature (551)..(557): n is a, c, g, or t
cacatgtggtgttgagttgttatgagctgtgtactgctgtcggcatatggataggcggtgccagtangnnnnannnnnnnangnnnnannnnnnnnnnnnnnnnnnnnnnnnnatnnnnnnnnnnnnnnnnnccnagggcgggntcgaggcggccgccggagctgagaacggcgggtgcaagtgcggcgncaactgcanctgcgacccctgcanntgcnnnnnnnnnnnnnnnnnnnncnnnnnnnnngcngnnnggnnnnnnnnnnnnnnnnnnnnannnnnnnnnnnnannnnnncnnnnnnnnnnnngnnnnnnnnnnnnnnnnnnnnnnntnnnntnnnnnngcannntcnnnnnnnnngntttgttcgagtcagtnagacagtcagccgcgtgccatgggccatgcccatggcatagcatgcctngctctatctgctccatcnnnnnnnnnnnnngccttgntctagtggtggtactgntgggggaacgaataattgtaccgagatgttggcgccgtgtcgtgtcgtgnnnnnnnctgtcctgtcnnnnnnntcctggggctcatctagcagtcagactgtgttgtgttgtg

SEQ ID NO: 3317 - DNA, 415 bp, Zea mays
ggcgagtggacgcactggctcaaggtggccggcggcgtcttcttcaacttctgggtgctcttccacctctaccctttcgccaagggcatcctggggaggcacggcaagacccccgtggtggtgctcgtctggtgggccttcaccttcgtcatcaccgccgtgctgtacatcaacatcccacacatccacgggcccggcggcaagcacggcggcgcgatcggaaggcacggcggcgacgcacaccaccatggcaagaagttcgacggctactacctctggccgtgaagcgccgagcagccagcatcgtcatgcatgcacatataccgcctgccctgatggtgacgatggtgagccgccaaggtgaagagtgtacacgttcccgttcatccatccatcgtctccttagtactgctgc

SEQ ID NO: 3318 - DNA, 349 bp, Zea mays
accccgccgtgtccttcggccccgccctcgtcagctgggagtggggctaccagtgggtgtactgggtcggccccctcatcggcggcggcctcgccggcgtcatctacgagctgctcttcatctcccacacccacgagcagctcccctccaccgactactaaaagccgaagccgaccgacccaggggtgcgcagcgcagcgcagctagcatccagctctctctccccggcccgctcgccgccgtttagtttctctcgtgcacgtgcatgcatcgtagactgtctcaggccgccgctgcgccggcgccgctcgcatcgtttgcttttccttggaccagcagtcgtcgccgt

SEQ ID NO: 3319 - DNA, 420 bp, Zea mays
atcctttgtcctggagcaccttcatcacgtaatgccggggcatcagccggcgttccagactgtacatcaggattgtgggcttgtccagaatgaagttggtaccgacaccgaccacattgatcaggaactcacaggcgcgctgaatcgtctccatggagcgcctcagcaccaacgggttcttttgcaccattctggcaacctcagcctctgagcacccgagaatattggccatcatcttgagcttagatgcaaaggtctccggacagaggcccgccaccgcggtcacagcgtgcctgaacaaaagcgtcttgcggggcacgcccatctcaccggcacgcacgaggacggccctgattctgtccggcttgctggtgagcagcctcgggttagccacgcacaggctcccaatctcctggatag

SEQ ID NO: 3320 - DNA, 407 bp, Zea mays
cctactgcgacgcctacagcaacccgcaggcgcaggagatcctgcagctgctgccgcaccccgtgtggggcgagttcggctacccgacggccaggggacaggggtgggtcggcgaccccagggcgtgggacctcgacgtcggcgccatgtcccaggcgctctacttctaccaggaccccggcacgccgccggccaggaggcggtggacgtcgctcgacgtcggcacggagatatacgtcagcgacagggccgaggaggcggagtggacgctcagtggcttcgacatccttgtgccggacaagtgtatcaagtcacagcaacgggccagcaacagctgctggtagacagacactttaatgtcactgtacgttacgctgagtagcatagcaggccaaagtgttcttcgt

SEQ ID NO: 3321 - DNA, 409 bp, Zea mays
  misc_feature (269)..(269): n is a, c, g, or t
  misc_feature (277)..(279): n is a, c, g, or t
  misc_feature (342)..(342): n is a, c, g, or t
  misc_feature (374)..(390): n is a, c, g, or t
  misc_feature (396)..(400): n is a, c, g, or t
gctgtacggaggctctctgctggcctcggaaccggcggagcagtccccaaggcagtcgcctctcatctctctggcacacgcgtccccgtccgcaaggcagatgcagaaccgaccagagacaacacccaggtcccacaccttcgacccaggctactacagctcgtcggggtcccagcacgacgatggctacgacgcggataggagggccggacggctgctgcggagcttgaggcgctctggaccgctcgacttcggtgcgagcagaaagncgaagaannncgtcgagggctccagctccgggagcagccatggagctggctcgctgcagaggttcgcagtgtncagatctggccctctatcgtacagataggggnnnnnnnnnnnnnnnnnctctannnnngtagatctt

SEQ ID NO: 3322 - DNA, 637 bp, Zea mays
gcgtcgggcgcctggaagggcaccagcggaggccacgccgtgctcatcagcggatacagcgagggcaaaggcaacttcgccatggtcagggacatgatacatacatacatactgctgatcgagctctgctgccttgcatctatctatataactaacatgcatatgctgctgcttggacgacgcgcggcgtgcagatgcccgacgcccacgcgtcggtcgtcggggccatgacgcacagcttcgtccggacgctggagtgccagccgcgcggggtcacctacggccacctgctcagctccatgagggccatcatgaagaaccgcggcgggggctgcgatctgcagggggccatcggcgcacccatccgcaccgtcgccaacttcagcggcgtgcaggtaatccatgtcgagtctctgtctgtctgtcaacaacaacatcctcggctagctagctgctgtgcccctccgatcccctctcacttgtttgctgcactgcatggttggtttcatctttttgcaggagcctaacctgtcctcttcggagacgtttgacatttaccgcaagcagttcgtcctgtagacaccacgccacaccagtgtttgccccgccggccgcttgtaatgaattgccgtcgtag

SEQ ID NO: 3323 - DNA, 346 bp, Zea mays
gatgtaacaggagtctcaaggagtaacatagttgagtcgtttacatacagccagccaggcccaggtggccaggcaggaactcaactattatgtagccagggccaaggacctgtctggtcagcggccagcagccaccacactccatccaggtgctgctgttcctcctcaatcctggccagatgccaccgctacagctactactgctacacgtccaattctcgtaacaggtctgtctctgaaggtttccatctggacatctttagatccacgccttaaaaaccttgcagaccaaattgtacccaccagaaaaatatattccgtttcgcttcgctccacatgctacgta

SEQ ID NO: 3324 - DNA, 346 bp, Zea mays
  misc_feature (63)..(66): n is a, c, g, or t
  misc_feature (69)..(70): n is a, c, g, or t
  misc_feature (74)..(74): n is a, c, g, or t
  misc_feature (77)..(79): n is a, c, g, or t
  misc_feature (92)..(92): n is a, c, g, or t
  misc_feature (108)..(110): n is a, c, g, or t
  misc_feature (114)..(114): n is a, c, g, or t
  misc_feature (120)..(123): n is a, c, g, or t
  misc_feature (165)..(167): n is a, c, g, or t
  misc_feature (171)..(171): n is a, c, g, or t
  misc_feature (199)..(207): n is a, c, g, or t
gatgtaacaggagtctcaaggagtaacatagttgagtcgtttacatacagccagccaggcccnnnnggnnaggnagnnnctcaactattatntagccagggccaaggnnntgtntggtcnnnngccagcagccaccacactccatccaggtgctgctgttcctcnnnaatnctggccagatgccaccgctacagctacnnnnnnnnnacgtccaattctcgtaacaggtctgtctctgaaggtttccatctggacatctttagatccacgccttaaaaaccttgcagaccaaattgtacccaccagaaaaatatattccgtttcgcttcgctccacatgctacgta

SEQ ID NO: 3325 - DNA, 862 bp, Zea mays
  misc_feature (850)..(858): n is a, c, g, or t
tttctgtgcgatcagcgtcagctgtagtgttttcctggaacatttcgtctgctgacgatgtcacgtgctacaggttcatttgctcatggattcacgtactccggccatccggttgcctgtgctgtggccattgaagctctgaaactttatcggtatgtatgccgcgccgcgctttccagaacacgtattcgagtgttatttatctgtttgttcctgacgaatggtttgcaaaaataaaataaaataaataaatggtgtcagcgaaagggacattcccggccatgtcaagcaaatcgccccaaagttccaggacgggattagggcgctggcagacagtccgattatcggggaggtacgcgtctgaatctctgaatcaacccaaggggctgtttgttcgaatacataactgcaatgctcctgtactccagatacgtggcttggggatgattatggggaccgaattcacaaacaacaagtcaccgactgatctgttccctgccgaatggggtaagtcaatgtagcagctacagccagtacacaaaatggcatggccatgaggccatggcgtgttcccctgccccgccgaatggtctgtgtgtatgatgtgggatgatgcttcttgtcaggggttggtgccatcttcggcgaagagtgccagaagcgcggcatgctggtgagggtcgctggcgacgccatcatgatgtcgccgacgctgatcatgacgcccggcgaagtcgacgaggtttgccatcagcggttcacagtgcccgccaactcgccactgtcgtcaagcctcgcctcgcctcggtagcaacccggtaacaaaacatcaatggccttgtcttttttnnnnnnnnngcgc

SEQ ID NO: 3326 - DNA, 348 bp, Zea mays
gtgtgttggcgctgctgcttctccagctgatggtagctccgacgacggcgacagcccgcctcctgcaggcggatacctcccccgtgttaggcctggacatcatggcgagggagtttggccatccagatggagccatcccctgtggtgaatcctgtgtcttcataccatgcgctacgtcagtctttggttgccgatgcgaaaacaaagtctgcgtgcacgactgaagaagccttcttcagtcgggacgagacgaggccatatctctgatctctgtctcgtcatttgcgtgctaagaaccagctcacaaatttgtgttgggagaaacagaaagacggtggtgttcaactt

SEQ ID NO: 3327 - DNA, 311 bp, Zea mays
cgacggcgccaacgtctggaactggccggtgtcgtacgacaaactcgggatccggtaccggctgtggagggacgccgtcgagaggggcgccgacgaccggttgccgttcagcagcacccaagctgagagtttgtcgtagcgaccggaacgggacgggacctcttcctcgtcgcatttctccgcaagacgacggacggacagccagagttaatgtgacctaggcgtacgtgcgtctctctctctctctctgcgcggttcatcgttcacctcgggctgctgcgcactgaaggattctggaagggtgaaggttg

SEQ ID NO: 3328 - DNA, 595 bp, Zea mays
ggcgagacgtcatgctctgtgccgtcttcgaccagaaaacggtcatggggttggggcggctcacgtcaccgtagatgatcggaggcttgacgcaccttgacccataagactgcacccagccattggcagtgaacgcaaaaccggagagctgctcaccgaagtactcaaccatatcgtttctctgtagaacataggccaataaagtcaattaaatgcgactacactcatggtatgggggtttatcttcttagacatcaaaaaccagcagaatggattcaagagcactgacctcaggctcgccatgcacaagcacatcaatgtcaagctcttcttgaagcttaacgaccttgttgatttcctccttgatggcagtgacgtattcctcctcagagatcctgcgatgtgaatctccaataagaaaaccagccaaaatacagacaagtgaagctaggtattaaatgacaactcacttttttgccttgtactcacggcggaccctcctgagctcaacggtttgtgggaacgaaccgattgtagtggtgggaaggatggggaggttaagcttcttctgctgggcatccaatctagcactaac

SEQ ID NO: 3329 - DNA, 472 bp, Zea mays
tcctcgagcctcggtagtaacccagccgcatcaatggcttttgcctttttcagctggtgagcatctacggggaagccctgagggccacagaggagagggtggcagacctgaagatgaagtccaagaagaactagccaaaacggcgaggacgacgacgacgataacgataaacgccgggcggcaacggaccatatttgatgtacaggtgaataaaaggttcgtggctgcgagacggaaataatgcgcgggaatggtcgacggtcgtctcttgttcttggagtgcaaggtcaagctactcggtcgctaaagcaatggtgactgaacttttaaacggcacgcagatgatttttttctttaagggctagtttgacaatctcatttgttcaaaggggttttaagtgaaattacttaagaacactttaaaaaaagggagttgccaaactagcctaagcaatgacaatatctcaaatgt

SEQ ID NO: 3330 - DNA, 647 bp, Zea mays
  misc_feature (623)..(624): n is a, c, g, or t
gctggtgtaagcacctggaaaaacataacaagttgtttattgctaactgaactgtgctatttgcaacagtcgaacaacgcctacattttccctggatttggcctcggtcttgttatctctggagccatccgtgtccacgaggacatgcttcttgccgcctgtaagtacctcccgtccaaacggaaaccttgatgagactagggaccaaatctcatgttccgttcgttcaaacagcggaagcactagctgctcaggccacacaggagaacttcgacaagggatcaatcttcccgcccttcaccaacattagaaagatctctgcgcgcattgccgcagccgtggctgcaaaagcttatgaactcggtacgcacgtgccctctgttttgctttgcagtgcagacaccattccacaccttggcgttcaccacaccgtcacttccctctgcaggtttggcgacccgtctgcctcccccaagggacctggtgaaatatgcacagagctgcatgtacactcctgtctaccgtaactaccggtagtgctgctgggatcaattctgcagtaataaaatatgtcgacgcagatgatcctgcaatgttgtagtttattttttcatttgttggcnntgctgctgaccacctttgtggct

SEQ ID NO: 3331 - DNA, 426 bp, Zea mays
gtactacgccatttgcgccaagcggttcacgttcaagccagtgcagctcaacaagaaagaggaggaagaaggcggcaaggcacttgtggagttgcaagagaaggtttaatttgagcagcatgcactttcagctatgtgcaggtacatgtctaatagaaaggaagtactcatcagtgctaggaagatcctcagaaaaactcccaaggtattactatataaatctatgtgagcatcttcccctgtattagtcaagtagatcaagaatgcaggaaggttgttcaggcaagcaacctcagaaattgtcaaggatcacatgacagctttgtggatggcagaagctatctggtctggtcctgagacttggcacaggtgcaaaacacaactcgactatatttgtaattagaaagcaggcacgaggcacatgtc

SEQ ID NO: 3332 - DNA, 362 bp, Zea mays
ggtcgggtaaagacggcaagtacacggccctcccgccgttcgacgccatcgcccagaaccccgaggccaggttcctccacatctgctccaacgagaccatccacggcgtcgagttcaaggactacccggagccccgcaacaggtcgggcatcctcgtcgccgacatgtcctccaacttctgctccaagcccgtcgacgtctcccgcttcggcgtcatctacgccggcgcacagaagaacgtcgggccctccggcgtcaccatcgccatcgtgcgcaaggacctcatcggcgccgctcagcccatcacgcccgtcatgctcgacttcaagacgcacgccgacaacgcctccctctataacacc

SEQ ID NO: 3333 - DNA, 689 bp, Zea mays
  misc_feature (63)..(63): n is a, c, g, or t
  misc_feature (300)..(300): n is a, c, g, or t
aaatgcttaggcaagcagaataggcaacccgtttgcaattttttctccttcattaacaatcantttttccaatagttgcttcatatacagaatcggcaggcaatagtcttccttttggtgcaatagacttgtctccttacggcattccacgtcacttcctttcagggtaaagagccagctgaaacgattggcacgtcccatgtactcgaacccccctattcacggtgccaagatagttgccaacgttgttggtgatccaaccatgtttggtgaatggaaacaagagatggagctaatggntggacggatcaagaatgtaagacagaagctctacgacagtttgtctgccaaggacaagagcggcaaggactggtctttcattctgaggcagattggcatgttctcctacaccggcttgaacaaagcgcaggtaacgctgcttccgcttgtgccgttgtgcagacatcatgcgctaaatcaagttcaatcaccggtcacacactctttgttgaaacatacatatcatctacaaaaaaataacgtaaatgcataatttcgctttttcgtctgcagagtgacaacatgacggataaatggcatatttacatgaccaaggatgggcggatctcgttagctgggctgtccctggctaagtgtgattatcttgccgacgccatcatcgattcctt

SEQ ID NO: 3334 - DNA, 1175 bp, Zea mays
  misc_feature (607)..(607): n is a, c, g, or t
gagatcaaccaaaattcaaatacaatacatgccttcggaagttagctatcactttcttccacggaggcatgagtaagggtgacaatgggctctaaattttatactacaaaatgtaaggatcagatcagattaggatcgggctatatttctattcattttagaactcaaaatattttagggccctgacaaattgtgaagaaacatttggatcgcgatccattaccacccctaggcacgagagagttaatatgcttaaaagatttgtccaatgctattacactacctgaatgatttgtccaatactaccttctctaggtgaggatcaagtaattggcattaaacatgtacgatataaagctaaaaaaagcatgaaggttggatccattccaccaaaattcatgtgatgaactcatgaatcatgatggaccatctcaactaaggatgaggtgattcctcaaaccaaacagccccataattcattgataatggttctgcaagaaaatctatcttactgttccaggagaatatatgtccccagttcggaacccatggttcagtgtttcagtaactgcagcttcaattctgttcgcagcattttcttctcctnggccatatctcaatagcatcgctgcactaagaattgtagccaatggattggccttgtcctgcactcaacacataacaggagggaaagaaaatttgagacaaacataatttaaacccatctagtgtcagagtttttgaaatagatgtcatctcaacctgtccagcaatatcaggggcagagccatgaataggttcaaaaagaccaggtccctgcataggaacagaaatggcattttcagctgcccttttaaatttgcagcagaatataatggtatctataaacaattcagagaacttcaaagtactggagggattcaattaccgattcaccaacactggcagatgggagcattccaatacttcccgtaatcattgatgcttcatcagataatatgtcaccaaaaatattgtttgtgacaattgtgtcaaactgcagcaataaagaaaattaagatcaacattcaatatatcttcttgatgcttagccagggtacaatgagttacgtcaagagaaaggggggggtgaagagaagcaaacctgcttaggattcctaacaagctgcatcgca

SEQ ID NO: 3335 - DNA, 566 bp, Zea mays
  misc_feature (553)..(555): n is a, c, g, or t
cacgtcgacgatcttcttgccgtcgacggtcgactggtagagggtctcctcgaagaggatggcaccagagatgtactgtcccaggcctggagcgctgacgaggagggtcctgtaggcctggcggttggcctcggtgttctcgaggccgatggagtcgagcctcttcccgcaggtcgcgttcgactcgtccatggcgaggatgccccttcccggcgacgcgatggttttctgcagcaatataattaagagaattgcaaacttaagtgacgatattctgagccatcatatagaaaaaattgctattttagctcttctaacgtaggctctctgctattatgtgaccctggctcaaacgatcgtcgtacataactgaagcaatatatatatataccgcggtctggacaagctcgtcagcgtaggcgctagcgcgggcaaccatggagacgacgacggtcgccggcctgggatgagcggcaaccagctggggcttggatccccattcagccttcttggggaggaatgacgacttgaggagagtagcagcagatgccannnctgctccctgg

SEQ ID NO: 3336 - DNA, 696 bp, Zea mays
tatgtgcgtacgtatgcgtgtgttaattctcgtataggttcttagatctgtcggagctagttggagtctcgccctccttcaagaccaggagcagtacttagcattattcctctcatgttctgctctcaatctcagggtcttgtgccactcgctggctccaacaacgagtcatggtgccaaggtctcgatggccttgcttcacgtgaggcagcctactaccaggccggtgcccgcttcgccaaatggtgagaaacattggcggcgcagttactttgtgtacctggtgtgtggtgatccccatgatgcgtgtttgcttaatgtgacgtgaacttgtgttgtcacatcacaggcgcactgttgtcagcatccccaacggtccatctcaactagccgtgaaggaagctgcctggggcctcgcccgctacgccgccatctcacaggtacctatccttattccttcacccatgcattttcaacgccggaattctcagcgcgcggtagaaaaactcatatatctgtggaaatgaaatgaaatgctaggaaaatggtctggtgccgatcgtggagcccgagatccttctggatggcgagcacggcatcgagaggaccttcgaggtggcgcagaaggtgtgggcggagaccttcttctacatggccgagaacagcgtgatgttcgagggcatcctgctgaagccc

SEQ ID NO: 3337 - DNA, 499 bp, Zea mays
gtctacagcagcgggaacgccctggacgtgttgccacgaggtgcaggcaaggggcaggcgctggtgtacctgctcaagaaactggattccaacgggaagccgcccaagaacaccctcgtctgtggcgactccggaaacgacgccgagctattcggtgtgccgtctgtacatggagtcatggtgagctagtagctgaagttcatgttcagctctgtctgtctgatgttcaggtccatgcatgcattaatatattgtttcatcaggtctgcaacgcccaagaggagctggtccagtggtaccaagagaacgcgagggacaatcctaggatcatccaggcgaccgagagatgcgctgccgggatcatgcaggccatcgggcacttggggctagggcccaacgtctctgcgagagaccttgttgggttccctgcttattatcccaacaacaacaacaagaagggggcagctgccaccgctaagcccgcagatgtggtggtgag

SEQ ID NO: 3338 - DNA, 683 bp, Zea mays
tgtggatgatgatagtagtactatcttgacagcatctgattcatgcaacctcgatcttatccaggtatattttcccttactatattctactctctgtagcaggaggtacacaatctaattttattgacgcattgcttgtagcttcatggagatagctcccgagaactacttcctctgctttggaagaacaacaggattatatatgtgctaaatgctgatgaggatggtaaacttatcaatgctcctccaagtgaggaatatgttcttgattggtttttggtggacagtgcaaaaggtggaaggtacaaaattctgcttacatggttggtgacttggtgtgttgtctaatgtctcgatgtttgctcttggactcctaaatgattgatattcttaaaagttgttattcatcccactaaatttaacattggcagtgttttagttttgattttatctatttgtgaatatcacatgttcttatttctttataggatttggtagttaaaatttgttgattgtggagaaagctggaactgataaaatctattcggatgcatttacagtggcaaagggttcaactgggaaaaattccaaatgccaactgttaaaagcaagaacgggtggttattagcaggaggccttcatgcagataatgttcacgaagccgcttctgctctaaagccaaa

SEQ ID NO: 3339 - DNA, 726 bp, Zea mays
  misc_feature (688)..(692): n is a, c, g, or t
agacacacggcttaattccaccagtacccagggcaatcagataaagaccaagaaaaaagacagtatactgaaaagggcttgctgctgggcaaaaggatccttcacaagatggaggcatgagcataggaactgatgctgaaagagtcagcagtgtcatcccctataaattgaaaagatgatgtcaagttaaataataacaaactaacagggaaattccaggattagttgaatgtcgcactatgtgtatgggctaaacatgaattacacaaaagctcgtagtctactaagaatttgagggcctactcatcagtcaaaaaaagaaacaaattacccgcatgtccctttccaagagtgttaccatggcacttctgagcaaagatgacttacaatgaagtatactgtggaaaatgttgcaattgtccagtacctcccccagtatgcatcagccaagattgctccaataagtggagttaagtagcaagttcccgaccatgtagtcacactgctagcagcagaggcattgccagcatgcagcttttttgtcaagtaagtaacaaggtttgtggagatgccatagtaggccagtcgttcacagcattcattacctaggttaaccttaacagttaattgcaggttatggggagattaaattggaagcacacagttagtaaatttactctggacaatnnnnnatatgaatggacatgccttccatctacccgttct

SEQ ID NO: 3340 - DNA, 415 bp, Zea mays
tggcgctgaccgtcggcattccagcagcaataggggccctggtactaaacctaaccacaattatacttgcacagtagtaaggaaaaagcaaagcaaagtcggggaggaatgatgtgtgctcatttgctctcgaaccatgttatactgcagctattgctaaagaataaggtccagacgaaaggagtgatcaggcctctgcaaccggaaatctacgttccaggtgtgctacgtagtttttcatgcttgtccttgtggaattaccatgacgtgtaacggtgctgacccgtgtgtttgcgtgtctgaagcattggagatcttggagtcgtcgggcatcaagctggttgagaaagtggagacttgaaagttccctgatacacagataaagatagtatgatatagcagggcacatgtatca

SEQ ID NO: 3341 - DNA, 614 bp, Zea mays
ctgctgccaagttctctcctccagaggctggcaagttggtgtccgtggttgctgagagatgagccgaagcagcctgttaaggttctcgtcaccggcgctgcgggtacgttgtaattattcagagcaacacgcaccaaactacaaagaaacacaaacacacatgcggaccaaggctctgagctctggagaacaacatagcttccctgaaacgcacttgcgtggtggattgtgcttgcagggcagattgggtacgccatagtcgccatgatcgcgaggggtctgatgcttgggccagaccagccggtggttctccacatgctggacctccctaagtcggcggacgccctgagcggcgtcaggatggagctgatcgatgccgcgttgcctcttctcagaggtgtgctcgtcgtttgttgtgttcggcgttcatctgctgcctgtgtgtgctcggtgttcatcgtttgctgttgtgcgttgttgcaggtgtcgtggcaacgagcgacgaggccgaagcgttccgaggcgtcagcttcgccgtcctgatcggcggatggccgaggaaagaggggatgcacaggaaagacctcatcgccaagaacgtttccatataccag

SEQ ID NO: 3342 - DNA, 577 bp, Zea mays
tgctaagatttgacattagcttattttagtacctgctatctttcagttattccaagtgctaatatgtgtgcataaataggtcgtgatggccaatgattgcattggtgaagaagttgagaagttggctgccgctttgccagaaggtggagttctgctcctagagaatgttagattctacaaggaggaagagaagaacgaacctgagtttgctaagaagctagcatctgttgctgacctttatgtcaatgatgcttttggcacggcacacagagctcatgcttcaaccgaaggagttaccaagtatttgaagcctgctgttgccggcttcctcatgcagaaggtaataaaatgtcacccatgctcatgatcttttaagtgtatttaggtactgttaagtaggatggggtaaatatttttgtacctttcaaaagagaccaataaatctttttaacatttcagttttttcataaataaaaaaaggaaaggtttgacaaatgactttattatctcaggaacttgactaccttgttggagctgttgccaacccaaagaagccatttgccgctattgttggtgg

SEQ ID NO: 3343 - DNA, 557 bp, Zea mays
tctgttggtgggcagccagtagttttcgactctgtaaagggttctcgtatgtgggatgttgatgggaatgagtacattgattacgttggttcctggggtcctgcaatcatcggccatgcagatgataaggtacataattgattatgttggttctggccaatatgttttatgtgaatatgaagtatttcatcataattattttgttagttaatctctgggtctgcttctgtttcctatctcattgttctttcatgatagttgatagagtagcatacttgtatttcctataatagttgattaattagactaatctccatcccatttgtgattgttctaaaatttctgaacctctatatgtatcataaaattttcttggtctgattttgtaaatcaaattggtgaaatccatgagggtttatagctttacttcaccttcaaatatttgtcaacttatagtgtgatttttgaaccactgtggaatattggaaaaatactatatttgattcggcaacatttggcttaagctggcttgagaattgacaaagctaaatttaaat

SEQ ID NO: 3344 - DNA, 517 bp, Zea mays
cctctagctgcttcttcttccaggatcggggatcggagcttgggctgctactgctactataccagcgctagctagcagcagccgccggccggccggctcgcgcaagctaaggaaggatcgacatgacgatggggctccgcgtccgcgactcctccgcgctgctggctctggccgtcgcgctcgcctgctgctccgttgcaggttcggttcgtcgtcgcttcgttgccatatttcattcatctgaaaatgtaaacagtgtcgatcggtcgatgggcgacgctcaccttctctcctctcctgtcgccatggctggcggctgctgcacacactggcacttgcgcagtggtggcctacgaccccctggacccgaacggcaacatcaccatcaagtgggacgtgatctcgtggacgcccgacgggtacgtggcgatggtgacgatgagcaactaccagatgtaccggcacatcatggcgcccgggtggacgttggggtggtcgtgggccaagaaggaggtga

SEQ ID NO: 3345 - DNA, 517 bp, Zea mays
  misc_feature (43)..(43): n is a, c, g, or t
  misc_feature (117)..(117): n is a, c, g, or t
  misc_feature (134)..(134): n is a, c, g, or t
  misc_feature (210)..(225): n is a, c, g, or t
  misc_feature (285)..(285): n is a, c, g, or t
  misc_feature (329)..(329): n is a, c, g, or t
cctctagctgcttcttcttccaggatcggggatcggagcttgngctgctactgctactataccagcgctagctagcagcagccgccggccggccggctcgcgcaagctaaggaaggntcgacatgacgatgggnctccgcgtccgcgactcctccgcgctgctggctctggccgtcgcgctcgcctgctgctccgttgcaggttcggttnnnnnnnnnnnnnnnnccatatttcattcatctgaaaatgtaaacagtgtcgatcggtcgatgggcgacgctcacnttctctcctctcctgtcgccatggctggcggctgctgcacacantggcacttgcgcagtggtggcctacgaccccctggacccgaacggcaacatcaccatcaagtgggacgtgatctcgtggacgcccgacgggtacgtggcgatggtgacgatgagcaactaccagatgtaccggcacatcatggcgcccgggtggacgttggggtggtcgtgggccaagaaggaggtga

SEQ ID NO: 3346 - DNA, 653 bp, Zea mays
tatctgtgttatcaaacatgcgtcagtttgtcaagtacagccgtttcaagcaattcgcgcttcgggtaattacagtgattacaaaaaacaacactgcatcgtttattttttcctcacaatatttcctcgtggcatggtcaggctctggcgagcacccttaacgaggaagagctatcagatctgaaggatcagtttgatgcaattgatatcgataaaagtggatcgattagtatcgaggaaatgcgtcatgtaggttctgttagtgtttgctgatgaaaatgccttagatcctgaactactctgcggtgctgattaatctgtgcatgtttcggtaggcccttgcaaaggatcttccctggagattgaagggtccccgtgtgctggagattattcaagcagtaagtttgagccttcttctggatccagccctttctttgttaccccccttgtttccaagaaaatagctggccttgttctgagggtataaccaaaactgcatcttattttgtggtagattgacagcaacactgatgggctcgtggacttcaaggagtttgttgcggcaactctccatatccaccagatggcggagctcgactcagaaaggtggggcatacgctgccaagctgctttcagtaagtttgatcttgacg

SEQ ID NO: 3347 - DNA, 830 bp, Zea mays
cagcacaaaagactttcagtgattttgaagaagctgttgaaaaggatgcaacaaagaatattcatactgatggaacagttcatcctttaacaagctatgtgatcaactatgttaagtttttgtttgagtaagtatctaatcaaatccgcatgcaatttatgtgttgttataaatgaataggtgtacaagatttgtccttatccatgtgcctttccttttctaattatggactgttctttctagttatgcatcttatgcaattatttccaccatgtgtcatttcttatgtgtagcctcctgattcgccaagagccacattttttccccatgttgcactgtttttgatgaccagaacaacactcatttgtagcatggtagttgtaggtgaacttcttatgcaccattcttgttaagacccttttggcataaatcacaaatgattttcatgttagcctctttcaacaccccaggcacatatgcaagcataaaagtcgaaaaaactgacaggcactgttgatgtctgtgcagctaccagtcaactctaaagcagcttttccaggagttcaaggaagatgggacaggttctgagctggcagctgtaacaatgaaaatcatgcaagccttacaaaataatttagaagcaaaagcaaaacaatacaaggatcctgcattgatgcacatatttttgatgaataacattcactatattgtcaaatctgtccgcaggtatgttcttataccaagtaatgctaggaagaaagtaacaatagtgtgtgtactaccttatactctcttttctgtcactcagatcagaagccaaagatttgttg

SEQ ID NO: 3348 - DNA, 864 bp, Zea mays
tcggtgaaaatgatgtcagaaccaggagcaacatcatgagctgagttatatgtggccgatggattcagcttagccaacaaaaaccttgcctgcaaagatttgtatgatatgcgacgttaataggttgaaggcacttgcttcaccaatgtaaggaattttgcacaaaataataatatcacgtggggagaatccaggtaatttacaagatgaaaaaggtactaattttcgaagcatttgttgaatgtttgcaacatgaaggtggcagaaagcaaatgcaacataaagcgtgtaaaattcacaaacctgcgagccatgttggtcgcagaccactagtcttggaactggaaatcgaccctttattatcatctgtgcctcctcatgtggtgcttgtaatagttgtgcaaattgctaaaaaagtgaacagaaagcatcagaatgtgagaacacttaaattgtgtgcacatcagccctgaaaaagaatgaaaaacaatacatgcaaccacaatgtgttctcataaatgacagcacgtaaggccattagtgtgaaaccagcacgacagtggcttccaacttctagcaaaaatgcactccataaaaaagaacatagctctcagcatcaaaacatgggctcaggctagtaataaaggaacatgggctcaggccagtaataaagagaaggaattgttgtggattattctagttacctcatgctcaggttggttctgataacccatgtttctccactgagcaattgtcattccatgaaaaatgacaacactaaagtacgcatcaagtagcagtatacgatctgctgctattgatgccacatctagaaataccggagatggaggtgaatcaaaagaa

SEQ ID NO: 3349 - DNA, 388 bp, Zea mays
tttcgactggaacctgaagcaggagatcagcgcgctgtctgcggtgaggtcaagaaacgggatccacccggggagcgagctgaacatcctcgccgccgacggggatctctacgtcgccaagattgacgacaaggtcatcgtgaagatcgggtcacggtacgacgtcgggaacctgatcccctcagacttccacgccgttgcccatggcaacaactactgcgtttgggagaagcacggtctgagagttccagcggggcggcaccactagactagactagacccatattccgcccaactcctacagataattctcttttcaggtccattttgaacctggaaaagaaatttaagagaggctaaataaccggaatacgattgtgtactgagc

SEQ ID NO: 3350 - DNA, 481 bp, Zea mays
aagccaagcccacattgtttccgcagctaggtagaggggaggggcaaaggaggagtatagcggagaggttgatgcgtgacggaggaggcgccatggacgtcgacatgcaagcccgcggtggcggtggtagccatggcggcgaacttgacgacgacggcaaggagaagaggacaggtaatttaaaattaactgatgccgaatccatctggaggccgggggtttcgtcttcctcctcattgcatgttcttgtatgtatgcatggggcgcagggacggtgtggacggcgtcggcgcacatcatcacggcggtgatcgggtccggcgtgctgtcgctggcgtgggcgatggcccagctgggctgggtggccgggcctgtgatcctgctgctcttcgcggccatcacctactacacctcctgcctcctcaccgactgctaccgcttcggcgaccctgtcaccgggaagcgcaactacacctacact

SEQ ID NO: 3351 - DNA, 749 bp, Zea mays
caaacaagctaaaagggtttccatcggcaatgactaaataattatttgtgcatatgttcttctaggtcctggctaacgccgatacccctgatgatgcattgactgcgcgaaacaatggggcacaaggaattggattatgccggacagagcacatggtacgtccgatccgacatagtttagcaggctagggatacttggacattttactcttcctttagtttctttgtcctagacaagaaaaacagtttcatgtttttttctcccccctgtacttggggcagttctttgcttcagacgagaggattaaggctgtcaggcagatgattatggctcccacgcttgagctgaggcagcaggcgctcgaccgtctcttgccgtatcagaggtctgacttcgaaggcattttccgtgctatggatggtaagtgaaaaaccacaatgcatacatgttacatgcaggactgcatggcctgaacattctcttggtatcttgcgtttcaggactcccggtgaccatccgactcctggaccctcccctccacgagttccttccagaagggaacatcgaggacattgtaagtgaattatgtgctgagacgggagccaaccaggaggatgccctcgcgcgaattgaaaagctttcagaagtaaacccgatgcttggcttccgtgggtgcaggttggaattctgctactatattcacagcaaaaaaaagaaaaaaaatcactggtgatgcctgattgactaat

SEQ ID NO: 3352 - DNA, 749 bp, Zea mays
  misc_feature (9)..(10): n is a, c, g, or t
  misc_feature (14)..(16): n is a, c, g, or t
  misc_feature (40)..(42): n is a, c, g, or t
  misc_feature (49)..(50): n is a, c, g, or t
  misc_feature (169)..(169): n is a, c, g, or t
  misc_feature (179)..(182): n is a, c, g, or t
  misc_feature (433)..(433): n is a, c, g, or t
  misc_feature (438)..(438): n is a, c, g, or t
  misc_feature (444)..(448): n is a, c, g, or t
  misc_feature (469)..(469): n is a, c, g, or t
caaacaagnnaaannngtttccatcggcaatgactaaatnnntatttgnncatatgttcttctaggtcctggctaacgccgatacccctgatgatgcattgactgcgcgaaacaatggggcacaaggaattggattatgccggacagagcacatggtacgtccgatccnacatagtttnnnnggctagggatacttggacattttactcttcctttagtttctttgtcctagacaagaaaaacagtttcatgtttttttctcccacctgtacttggggcagttctttgcttcagacgagaggattaaggctgtcaggcagatgattatggctcccacgcttgagctgaggcagcaggcgctcgaccgtctcttgccgtatcagaggtctgacttcgaaggcattttccgtgctatggatggtaagtgaaaaancacantgcatnnnnnttacatgcaggactgcatggnctgaacattctcttggtatcttgcgtttcaggactcccggtgaccatccgactcctggaccctcccctccacgagttccttccagaagggaacatcgaggacattgtaagtgaattatgtgctgagacgggagccaaccaggaggatgccctcgcgcgaattgaaaagctttcagaagtaaacccgatgcttggcttccgtgggtgcaggttggaattctgctactatattcacagcaaaaaaaagaaaaaaaatcactggtgatgcctgattgactaat

SEQ ID NO: 3353 - DNA, 400 bp, Zea mays
agacatgccggtggaggagggcgggccgggcgaggagatggagaagttcctcaagcagccggagacgacgctgctggacatgctgcccacgcagatgcaggccatcaaggtcatgacgacgctggacatcctctcgtcgcactcgcccgacgaggagtacatgggggagttcgcggagccgtcgtggctggcggagcccatggtgaaggcggcgttcgagaagttcggcggcaggatgaaggagatcgaggggttcatcgacgagtgcaacaacaacctggacctcaagaaccgctgcggcgccgggatcgtgccgtacgagctgctcaagcccttctccaagccgggagtcaccgggaggggcatccccagcagcatctccatctgatccatcctcaga

SEQ ID NO: 3354 - DNA, 430 bp, Zea mays
  misc_feature (251)..(253): n is a, c, g, or t
  misc_feature (275)..(285): n is a, c, g, or t
  misc_feature (308)..(310): n is a, c, g, or t
  misc_feature (337)..(339): n is a, c, g, or t
  misc_feature (346)..(347): n is a, c, g, or t
  misc_feature (361)..(365): n is a, c, g, or t
cttggggctatgggatttggtttgccggctgctgctggtgctgctgtggccaacccaggtgtcactgttgttgacatcgatggagatggtagctttctcatgaacgttcaggagctagctatgatccgaattgagaacctcccagtgaaggtctttgtgctaaacaaccagcacctggggatggtggtgcagtgggaggacaggttctataaggccaatagagcgcacacatacttgggaaacccagagannnaaagtgagatatatccagattnnnnnnnnnnngccaaagggttcaacattccagnnntccgtgtgacaaagaagaacgaagtcnnngcagcanncaagaagatgctcnnnnntccagggccgtacctcttggatataatcgtcccacaccaggagcatgtgttgcctatgatcccta

SEQ ID NO: 3355 - DNA, 194 bp, Zea mays
tcccccttcctccgtgtgagaccaagaaccatgggcttggcctgggattagcggtggctttagttaaaattatcagtgagtagtagctagcttaagcagtgctccgatccgagatcagttcttccagcagacctgtgtaaatgagagtctcgccgccccgccccgccccgccccggtgtaacgcatcgtcatgt

SEQ ID NO: 3356 - DNA, 506 bp, Zea mays
ttgtcctgtaattgtgctaatttgacgggattccctactgtaggtggtcggcaaggcactcatgctcgatgagatcataaactacgtccagtcgctgcagcagcaagttgaggtgaggcgagggagggttccacttacatttggttacataataacacagtcatagctcgagattccaatcgtttttttttcttttgctgtttattaacactacttttattcagttcctgtccatgaagcttgccactgtgaacccagagcttgatttcagcaacctgtcgacactcctgcacaaagacgtgagcttgacccacacatcaatctctgatgctctgtacctacacatcaaatccgcccttgacacacgctattttatcctggttaattcagatgtaccaacagccatgtggtggcccttcggcaagttcggtctttccactggaaagcgccggcgcagcttttccattctgcgagcaggcggatcttttccacagctttggctcggg

SEQ ID NO: 3357 - DNA, 472 bp, Zea mays
ggttgcatcaacatcggctggcgagtagtagttggtacagcttccaaaagaatgcgctgattgcctacttgttgtatacatacagcagagtgttttgaaccaacaaagagatcaaaaaatcggatttctgtatatgcagcctctggcaattgaatctctcagttccccgtatatgttcgaatcctaccaagcaaaagggaatccaggccagagctggaaacatcctatcaagcaaacactttacaagaaaccttctactatcaagattgcttggtgtatgttcatccctgcagatgcaataggctgtgcttggttacatgagttacagagagattactgcaaacactgtaagtttcgggtgtttacctatacaacaggaatcttcagaagaataagtgagcagagatacaggcacactgagatggcgatcccagcaacgaaattttggtacagacggctattatccctactg

SEQ ID NO: 3358 - DNA, 466 bp, Zea mays
  misc_feature (413)..(413): n is a, c, g, or t
  misc_feature (429)..(431): n is a, c, g, or t
aagacacaggtgaaccatatcggaagcatccggatcagaatcttcacttcctccacctgggttaccgtacataatagccatgggcgatggctgtccttcatctcttggtcctctacaacgacagcagccttatctaagcacctgaatggatgagttcagatatgtttagtttaccagaattctaaacaaagaatggattacagaaaggacatcaatttacagaaaaagagtccataacatggcgctaaacaaaatcttatattaaagaggaaaacgacttaatcaatccagaaaatgtgtagttctacgatgagaaaggaacatgccttatctaacagaagatgacaaacaaatgccatcacagttaggagagagtatctaatatgaacagaaatgtccaccacatttagganagggacattaattttnnntcccatatgcaaacagggctacactgtatctttct

SEQ ID NO: 3359 - DNA, 359 bp, Zea mays
agcgtctagtactcgtcaccctcgtcgccgtcctcaccctcgtcaaactcagcaccgacctcctcgtagtccttctcgagcgcagccagatcctcacgagcctcggagaactcgccctcctccataccctcaccgacgtaccagtgcacgaaggcgcgcttggcgtacatgaggtcgaacttgtggtcaatgcgggagaagacctccacaacactggtggagttggagatcatgcacacggcacgctgcaccttggccaggtcaccgccggggacgacgctgggaggctggtagttgattccgcacttgaagccagtcgggcaccagtccacgaactggatggtgcgcttggtcttgat

SEQ ID NO: 3360 - DNA, 703 bp, Zea mays
tatttggtgccactgagtataccacagcgattgacatttggtctgctggatgtgttcttgctgagcttatgctagggcaggtaaggtgtctcaaatttttattgccatttttaaaaaggttttcaagccaacaaggtcctttcagttcacactgtcttacaagaactatttggacagcctttgtttccgggtgaaagtggtgtggaccaacttgttgaaatcatcaaggtaattttcggttctacaagcttgtgaattgtcttctatagaagcataaattctgatcacccttaaattgattttgtatggcaggtcctcggtacgccaacaagggaagaaattaaatgcatgaacccaaattacacagagtttaagttcccacaaatcaaagcacacccatggcacaaggtgctcaaatctttctacattttgttacaatactctaaaaaaactgttactgttgtcttactaatttactttttgtacattttatctttcaggtattccacaaaaggatgccaccagaagctgttgatctggtctctcggctactccagtactctccaaatctgagatgcactgctgtaagtgcatgccattgtacattatacatgatggaaatacccctgttgactttggttttctaagatctttatgaatgttttgtccagatggaggcacttgttcacccattctttgatga

SEQ ID NO: 3361 - DNA, 392 bp, Zea mays
accatcgaatcccaccacaaaagctcctttcgtcacaccggccagcacccagcttctcctctcctcacccccacgcccccaccccaccaaacaatggcgccggcggcgacttccacagcctctgcgccctcctccttccactccaccggtaggcatagggccagggtcggggcccggccatcgctcgtctctctccgcgtcagagcagccaatcccaacgttaccgccgatcccgcaccggccttccagtccgtcacggccttcgcgccagccaccgtcgccaacctcggcccgggcttcgacttcctcggatgcgccgtcgccgacgcctccctctccctgggtgacaccgtcaccgcaaccctggacccgtcactcccgcccgccaccgt

SEQ ID NO: 3362 - DNA, 537 bp, Zea mays
atacatgattcttttgattgtttactgtttattacacttcaaataatatgacaattgttctccctgactttgcagtgaaatccgcaagtatcagaagagcactgacctgctcataaggaagcttccgttccaaaggcttgtcagggagattgcccaggatttcaaggtgagatttcattttcataccgtcatgtaatctaggaattctgaagtaaacgtagaagtgcacttctcaacccgttgtatttgtgcagactgatcttcgtttccagagccatgcggtgcttgcgctgcaggaggctgcggaggcgtacctggtgggtctattcgaggacactaatctgtgcgccatccatgccaagcgcgtgaccatcatgcccaaggacattcagctggctaggaggatccgtggtgaaagggcctagattctctgtttactgctactgggagtggctccgtagtatggtttgcatctgttcgatgcttgctttttgtggaagttacatttgtgggtgttcgaattcgtaatattcatcc

SEQ ID NO: 3363 - DNA, 509 bp, Zea mays
ggtgttccaaccaaaaaggcaactgcggcgataacaaggcatatcgaggagatgccgaatccaagagaccaagcgacattttgctgtatccagacaagaacagtgccggagatgaacactccaaggttgacagccatgaagaaccaactgaagaacagttgcttgcttttactctcttcggcgttcgcatcattgtactgatctgctcccaagggaagtaaagctgacttgacgccccccgtaccaatggagatgaggtacaatgaaccaaagagcacaaaatactgaaaccctgttgcaggtggacatgaaccgccttcacacgaggcaggccgtagggacggtatgacggcagaggtggtaattatgagcaggccctatttgcagataatggttatgaacataagaaggggctacatagtggaagaggatcagtactgtatgaagacgaagatggtgcctgcacttacaacaacgtagaatattatggagatagctgcggtcttgta

SEQ ID NO: 3364 - DNA, 290 bp, Zea mays
  misc_feature (227)..(247): n is a, c, g, or t
  misc_feature (254)..(261): n is a, c, g, or t
  misc_feature (270)..(286): n is a, c, g, or t
tggttgtgggatgtagatagtgcgctggaatatatttgtatgatttagcagtcatgcattataatcaggaagcagcaaaacagataggagcaagaaaagtttaacctcgtgatagtgccttgcaagaaattcacctccgactcttaaagaaccagtacccgataggcactgcacggtagcaaccctattctcctgaatagcagggctattcgattcaaaaaaaaaannnnnnnnnnnnnnnnnnnnnaaaaccnnnnnnnnccaaaaccnnnnnnnnnnnnnnnnntttt

SEQ ID NO: 3365 - DNA, 413 bp, Zea mays
gcttgatgacatgctccttcaggtcagcagcgatctcatcattggtcactgtctcgtcgtgctgggtggagatgaggacggtgtggacacggatggggaccatggcaccaccctcattgcggtactcgactgtcacctgggtcttcccatcaggcctgagccaggggcaggttccgttcttgcggacctcggtgagacgagcacctagcttggtggcaaggacatggctgaggggcatcaactcaggggtctcatcggtcgcatacccgaacatgtgtccctggtcaccagctccaatctcctcggggcgcttggtgaagtggccatgcacaccctgagcaatatcaggggactgctgctcaatgttcacgagcaccttgcagtggtcggcgtcaagcccgacatcgtttgac

SEQ ID NO: 3366 - DNA, 207 bp, Zea mays
aatcacagtgctcttaatgtaatatcttgaattgccgtgccatgtgtaataagtaatatcatgaataacagttgctattatgggctctaaatgtgtattaacagccatccatgggccatggcagagttctcatattactttgctgaagtctttgttggaatatacatgacagaattctcacattgctttgctgaagtctttgttgga

SEQ ID NO: 3367 - DNA, 229 bp, Zea mays
ctgtagcagcggcgtcacgagtttatttcacgcagacattgttttcgcatcggcatcccacgactgacgaaatgcatggtacgaagacacaggattcaaaacaggggacggctccatctggatggccaaactccctcgcgatgatgtccaggccaaacacgggggaggtatccgcctgctgcagcaagcgggccgtcgccgtcgtcggagctaccatcagctggagaag

SEQ ID NO: 3368 - DNA, 269 bp, Zea mays
tgaagttctttgatggtcttcctgcttagatgtttatttgtgactgctaggggcgatgttttcttggagataattgaatttttctttgtcaagctcattttgctttcttgtggttgttatggaatgttactggatactggatagttagttcggcctgtaggcgtatcctcctgaacttacctctcattgctgttagttttggcaccaagtttgttcccaattgctatttacggaagttattgcataaagggctgtttggttgtaatctt

SEQ ID NO: 3369 - DNA, 668 bp, Zea mays
  misc_feature (325)..(328): n is a, c, g, or t
agtggcgatgtggtgcgactcctatttcggtaagatttgtgttgacatgcctaatagtttaggataagtacgaatgtagcgcctaacccatgtctatccctgcagtctatgatgactgtgcagcgatggtcgcgtggcccttcagccacccaaatcggaaagcctgctgttcacatggctagcgttgacttgaaaggaaaagcatacgagtaagtttaagaatagccttttgctatattttcatcagtgggtacacgtaccatggcgtggtctttgggcacctgccttagcttcttatctgcaagtatcttgtacatatggcctnnnntctcagtaacacctgcatttttgcagtgtattgaggcagaattcttccaggtttttgttggaagatgtctacaggaacccaggtccgctccagtttgaaggaccaggtgccgattcaaagcctatttcattgtgcgtcgaggatcaagactatatgggcaggataaagaaattgcaggaatacttggagaaggtagttttgatgcccctccccctgcatattttttgcttcaaactcacacgaggccacacttgactgacgagttttgccttcgccatgcctaatctgttttgctatgtggtgcaggtgaagagcattgtgaagcctgggtgctcgcagg

SEQ ID NO: 3370 - DNA, 392 bp, Zea mays
ctcttggaaagctgaggagggaagccgagcgcgccaagagagccctcagcaaccagcaccaggtccgtgttgagatcgagtccctctttgacgggaccgatttctcggagccgctgacccgtgccaggtttgaggagctgaacaacgacctcttccgcaagaccatgggccctgtcaagaaggccatggaggatgctggccttgagaagagccagatccacgagatcgtcctggttggtggaagcaccaggattcccaaggtccagcagctcctgcgggactacttcgatggcaaggagcccaacaagggtgtcaaccctgatgaggctgttgcctttggtgccgctgtgcagggaagcatcttgagcggcgagggtggtgacgagaccaaa

SEQ ID NO: 3371 - DNA, 698 bp, Zea mays
tcagaagccatgtacatgaaactaacggtacatacatttacctctgtaaactctagcctttgaatttcccgctttgtttaaaggagagaaaaaaagatgcggcagaattgtatgtctaaagaacgaacttttgcaggtcaaaaaacccggactggaaatggcaaccgaacaaagcgaactggatctatcgtatgggatgcggtacaatggcgtcaaaatcccagaagcatacgagcgtctcatcttggatacgtgcgtgatgttccatcctatcctagtcctagcgctaaatttgtttccagcacattcagttctctgaaacttgctggatgaagcaattcttccccagtcatggtagtatatattcacacccctgactatgttttcacaggataagaggagaccagcagcacttcgttcgccgagatgagctgagggtttgtgactggccatgcatttcctttgcagtggcttccttgtgaatttgcttattctgacaatgtgtctgttggtctcaggccgcatgggaaatcttcactcctttgcttcacgacatcgatggtggcaagctcaggtccgttccgtacaagccgggaacccgaggaccgcaggaagccgacgagttgagcaggaggatggggtatgtgcagacccatgggtatgtatgggttccgccgaccctttctaaggtttagctg

SEQ ID NO: 3372 - DNA, 414 bp, Zea mays
gtacacacacatgtatatatgtatgatgtatcccttcgatcgaaggcatgccttggtataataactgagtagtcattttattacgttattttgacaagtcagtagttcatccatttgtcccattttttcagcttggaagtttggttacactggccttggtctaataactgagtagtcattttattacgttgtttcgacaagtcagtagctcatccatctgtcccatttttttcagctaggaagtttggttacactggccttggtctaataactgagtagtcattttattacgttgtttcgacaagtcagtagctcatccatctgtcccatttttcagctaggaagttcggttgcactgaatttgtgaacccaaaagaccacaacaagccggtgcaggaggtctgtttctttacc

SEQ ID NO: 3373 - DNA, 420 bp, Zea mays
gtttaccagataattcaagtagtctgatttcacggttctctagtgggtgcattgtgctgtccgttttctgaaataattgctctgcttaattgcatgtatcatgtctccttgtccaactaccaagtccgagatagctttccttagttgtacatgatgaaagcgataattgatttttctaaaattgctgttatttactgtaggtgacattcactgggaactatggcgagtattttggatttgccactgatgttgatgcagtagtttacctaatgctggtaaacgatcttattcgtgggctttatccagaagctgtatccattggcgaagatgtaagtgttcacgatatttttgtgtttttcttttgtaaatactcttctcatagcagttaatttagttggtgcatttgtccccccccccccc

SEQ ID NO: 3374 - DNA, 605 bp, Zea mays
actggctggaaggctttttgttgttataggggctggtggtgcgggaaaagcactagcatatggggcaaaagagaaaggagcaagagttgtaattgcaaaccgtacctttggtatatgattcttccggacacttctgcttcatcagttttatgataattttccacacacactgattattgtgttgtgaaaatgtgattgataaacatgtatatgctgagaaatgaatcaactcttccactttccagcacgagcacaagaacttgccaacttaattggtgggcctgcattgactcttgcggatttggaaaactaccatccagaggaagggatgattcttgcaaatacaacagccattggaatgcatccaaatgtgaatgaaactcctctatctaaggtcttaatttcgctttcctggttttctgccatttgtaatcgagatattatgtcatttctgctattttctaatggctaaatataatcttgcagcaagcactcagatcttatgctgttgtgtttgatgcggtctacacaccaaaagagaccagacttctccgagaagctgcagaatgtggagccacagttgttagtggtctggagatgtttat

SEQ ID NO: 3375 - DNA, 429 bp, Zea mays
gttagttttggtaacacttctataagtagagagcagtcttgctaggcctattttatcacctatggtagctaacctttggaaaaccaatgatcggatgtgctgttaatattgttctctggagtgtgctagtccatatctgaaatcatcgttgcacataaatttaatgatattttccccttcactgaatagagaagcaaatggcatacttacagaggcagtccgctcggatttcagtcgcttctccacaaagctcgcaagcttccttgaataaagctcaccggcctcactgcataccaattattccatcacaagaaagccaaaagcagaatgcaaaatcaacatacaccaagagtctcccaaatattgcatccatgcaaacataagcaaagattaagacctcaaagaagagtctccaccgattcttcctct

SEQ ID NO: 3376 - DNA, 720 bp, Zea mays
gatctgattatttagtggcttagttttcttttgtgcttgttggccgcagccagttaagtctatgatggcagtacttatagcctcgggggtaactgagcatatcaatatcagcatacttgcttatagcctctggggtaactgaacgttttctggggcagttgatcactgtatacaagagtgaatttgtttgctcttcactagatttcttcgtttgttcttcactagatatcggtgtttgttgttattatttctgactcttagactaagcacattgagtgtttgttcttcactagcttatactgagccttgagctccatagtcttctcatcttttcaattctccattgcagatgagagtgtggttgctcttgccaacggatgtccgcacctgcgctcgctgggcctctacttctgccagaacatcacggaccgcgccatgtactccctcgcaaacagccgcgtgaagagcaagcgtgggaggtgggatgcagtgaaagacgggctcgcgaacctcaacatcagccagtgcaccgccctgacgcccccggcggtgcaggccgtctgcgactccttcccggcgctgcacacctgccccgagaggcactccctcatcatcagtggctgcctcagcctcacgtcagtccactgcgcctgcgccctccacccacaccgtgccgggagagccctgatggccaaccatgcgtactaataaacatgttgg

SEQ ID NO: 3377 - DNA, 423 bp, Zea mays
gtacaatacacaaaccatagcacacaacaaagagcaagtactcggtatttggtacatcaccattactagtgatacaaaagaagagcaatagaccttggataaccgctctcaaatggtgtagtccgaccattgacgtatgaaggacgtgtgatccatggactcccctggcatgtcctcgtcattcgcaccctcggccttcttcccaccaatcagcctggcagggttcccaaccgccgtgctcctcgccggcacatctatcagcaccacggatccggctccaatcttagccccggcaccaattttcacgttaccaagaatggtggcccctgctccaatcagcacgccatccccaatcttggggtgccggtcacccaccgccttcccggtcccgcccaaggtgacgtggtggaggatggagacgtt

SEQ ID NO: 3378 - DNA, 508 bp, Zea mays
ttctcccacaaatacggagactggatgcttcgaacccgcgacctgatgactcagctcaccactacaccaggtacacccttctctagcagaactagtaggagaaagaataaacaaaaacaaacctctcaacactctacttgggccctctgtttctacccaaaagagtgacaattgaaattgctcatggccgctcattcttttcattgcaagctatcaaagaagccaggcccagcctttgccttcagctcatgaccagcatctttgcccatctcaaccatgtcgtcaaaagagtacggtccacttctcgttgtctcaaatactgtaagcagaaccataaaagtgacaaggtgttgccgttcaatgatggaaacaacaaaatcactgtaagctcttttcagtcgaaaatcaaggatacctttagatccatctggggaagacaatagaccgcggaatgagcaattcccatcattgtcacggtaagcataggctgcaattggagttcggcagt

SEQ ID NO: 3379 - DNA, 418 bp, Zea mays
gttccggcagcagagtaccataagatgatggaggcttttggagggaaaggctatcttgtggagacaccagacgagctcaaatctgccctttcagaatcgttccgcgccaggaaaccggcggtgattaatgttatcattgatccttacgccggcgcagagagcggtcgaatgcagcacaagaactgaaggcgcttgcttggcttttgtaccataccatagcaggatgcagatgcgacttgatacaaataagcagcaaccgtcaatcaatccttttgtttcttttttacgacctcgcttcgttgttcgtgatacagacgtggggcgcttttaattggaagtcccatttgaaggcatgtgaatgtgttatgattatctaaatgccacgatgcaaactttaaaggcgtgttgatgaggatgt

SEQ ID NO: 3380 - DNA, 861 bp, Zea mays
gacaacttccatactcttatcaactcttgactctcagggctgttctggcttggctttccatacttgcacaccggaacaaggataagaaggtcggagagagattagtgtcagttgaagatattgctatggagcactggaaaacctacggcaggaatttcttttctagatacgattatgaggtatttaatcaaatggtttcctgatattacacttaaggccatatatcttggaaccacctgatcaaatttcttgcacagtcatagtaatctgaatttgccaagaataatttgagtgcatatttcttcttaattaaaaaaccacctaattcctcctaagttggctgagtttttttttgtttaaccaatgattttgtaatagtgcaggcgtgtgaatcaaacagtgcaaaccagatgatggatcaccttagagatgttattgcaaatagcaagcctggagagaaatacggtttgtttgcatgcatcctttttatctagttgctcttgattttactttgtaaggaaacctgctgaaaaatgatgctttcgattttgtgatgcaggaaattacaccctccaatttgctgatgatttcagctatactgatcctgtatgatctgcttctctcttccgctcccctgcatgtgtgaaatgaatggcataaatcaccctttgcttccatatcacaggtagacggtagtacggtatcaaaacaaggacttcgatttgttttcactgatgggtctaggattatcttccggctttcggtacatctgttgcttcgtttcctgaaaaatatataaaaattgttgacgtttgatctaaaacaatatgattaagtatgctcctgcagggaaccggatct

SEQ ID NO: 3381 - DNA, 570 bp, Zea mays
cgtaattgctccgcaactaccccgataccattcccaaatcctccgtcgacccctctacaccggcgatcggcggcgaacgatggggtgggcgacgcggttcctggcggcggtgtgcttctttgctgcgggcgtcctcttcgtcccagaggctatcggttccccatccggcgcaggagccgtcaccgccgccaagctggcccacgtcctctcctttgccacctcctggggcgccgccctctgggccaccttcatcggcggcatcataatgttcaagtgagctcccggctctaatagccccatctttctccccccgtcatcttgccccaatctatgaaccaaaaatcgtgaggggaaaatctaatccaagaattccatggattcattgaactgaaccgctactttgttctgtggtgatgtggaatcctgttctttgaatctttgtaggaacctgccgaggcacatgttcggcaacttgcagagcaagatgttcccggcctacttcacgcttatatctgcatgcgcagccatctccgtcgccgccttcgcgtaccttcacccgtgggaagacga

SEQ ID NO: 3382 - DNA, 603 bp, Zea mays
  misc_feature (595)..(600): n is a, c, g, or t
ctgacatgaaagtcgtggaccattacacgtaaattactagccacttgcattataattggaattactttcgtgatgcacaatttgtgatgttggtaatatggtgttgctactcggtgctcttacctaggtatgttatacttggggatggttgccaaatggaaggtgtttcgaatgaagcggcctctcttgctggtcactggggccttggaaaattgatagctttttatgatgacaaccacatatcaattgatggtaatacagatattgcattcactgaagatgtgcttgcacgatatgaggcactagggtggcatacaatctgggtgaagaatggcaacactgggtatgatgacatacgtactgcaataaacgaagccaagggagttaaagacaagccaactcttatcaaggtaactggcagtctggtattaatgttgttttatttattcatttacttgtcattttggtgctacttcatgagataaatggcacattataggtgactaccactattggttttggatctccgaacaaggccaacacatatagtgttcatggtaacgctttaggttcaaaagaggtagaggcaactagnnnnnncct

SEQ ID NO: 3383 - DNA, 1123 bp, Zea mays
  misc_feature (1059)..(1066): n is a, c, g, or t
  misc_feature (1109)..(1111): n is a, c, g, or t
  misc_feature (1117)..(1119): n is a, c, g, or t
catctactagctgattgcctcaggtctacatgttctctttctcgttttagtgcgcatgttataatgtatgccaaatatgaaaatgacaaccaaatttcctggtgacctttattttaaggtcccaaaaattacaatttggtattagttagcagatgtgaattttttcttttgagattgagaactactatagttaatggtgaggccttgttcggttatttcaattccatgtggattggtgtgttgggatggattgggatggattttgacttgctatggatttaaaccgactcaataccactcaatccacatggattaacggcgaaacgaacaagccctgaagtgtattgcagtcagaacgttgctcatgcatcagcatgtacctcccagtgaaagcgtgacattcagaataaatcacaggactaaattcaagggaatgttgttattgaacaaaattaacaagtccagattgaattagttaattatcttgccgagctttttttttctaagttcgcaaaggtgtgttgcatgaactccataaaaattgcctattaacctttttcttgcaaatagcttcttagttcaattgtttggtagtatggatgcgtttactgaaactcacattatggcaggcaaatatcttgttatctgaagcatcccccctaaccattccatttttcttgttgatggcaaatttgatttaacttagttttgttatgtgctatatacttgttctatttacatttatctgctcgccttttttgccaatttgcagctgggaagaagattatttacccacctcaaggtatacaaagggacagaacatccgcacgaggctcaaaaacctgtcccactcccgatcagggataaaagaatacaaaaaacaggatagagaattcatcgactgaaaaggatgcagtggcgaattcctccccagaaggttttgccctttgtttggaatgctatcctcataaccatgcttctgatcgggggaggggggagtataaatcctctttgtaatttagatgtttaccaatgcatgaaattcagtcaaatttctgnnnnnnnntagtcatgtaatatggtacggtttaaatcaacctaaaatcttnnntccagnnnaagt

SEQ ID NO: 3384 - DNA, 520 bp, Zea mays
agcaaaagcccaaaagatcagcgatgacagagagacgcactgcaccgcggctaacgatgctaaggtaaacactgtcacccatcccaaaagaacaaatcaacaggctgagtctagagctagaggtagacgtacgacgacgtcccgttcttgttggttaattagattagtatatatatatcagaatagatgcctactactttgagatccggccgctgtcggtcagcaactggtcagagaagggcagccgacgtccagagacgaggaggaggcgatcccgggctctccagctccgccgccggcatctgatcctcccacaccaaaccgacctcgtattccggaacatactcctgcgagaatcgcacgtgagaaacccgtccgctctacttggagagggaggggggctcgctttagggaatcggccgggtttaagttcccacctcaagcttgagaacaagctccttcgccgtgggagctgagacgacgatgcgccgagcgtcctccttgatgaacccttccttca

SEQ ID NO: 3385 - DNA, 735 bp, Zea mays
attgttggcgataatcccagcaggctttggctacagctgctttatgtaatacttggatccacgggacaagttgatacgttttctcctctgctcagggatagatccaattgagcactctgaaaagccacgtcgcacaaacctgcgacatctcaaaattaagcaaagtagaagcaagcatatggaaaactgaaaaaatgggagcattgctactatttgcacataatgatgagtcaagagaagaacagaggtaaataccaatctgcagttcgtgtagtaagcaagaataatttcttgagacccagggataatgccatcttttccacgtaatctgaagaatggcaaccaccatgagtaacaaaaaaaggacttcttagcttgttctagtacaaatgccacaagactgaaacccctttaaaatgggtgagaagatacgcttactgaaaaaacagagaacccccactttaacaccacattactggtaggcggtctgttatcttgttataatatttagggattgtatgtgcatgtgagaaagtgcacacaggaacatgtgggcatgtgttggagaaatggttgtggcaacctggtagaggggttgcaacaaccaatcaagagaatggattctgattatccatgtaagcaaagaacataccaagtaacttgtccccctgacctcttcctcggcattcttcagatacagcaattgcagcaacttcaccagattgttcctcaggg

SEQ ID NO: 3386 - DNA, 474 bp, Zea mays
gaagtttaaggtatcttcaacacagctcctgtactagtcatgcccataccgggcattgacgttgttccttgtcggtccattcctcgatggatttttgactaaccaaaatgtctttgctttcgactacacaactcaagttctggtaagcattaaaccaggctttggggattttgtgttaactgtcgatatcgctccatctgatcatgggtctgcatttgttgcatctgcagtttttcatcgtgctgtcgtgcctgattttagtctcggtgaacttcagcacttttctcgtgatcgggaagacgtctcctgtaacctaccaagtacttggccatctgaaaacatgcttggtcctcacctttggctatgtcctgcttcacgacctatttagctggagaaacatacttgggatcctaatcgtggtaattgggatggttctgtacttgtacttctgcactagagagactcagcaaatac

SEQ ID NO: 3387 - DNA, 1238 bp, Zea mays
  misc_feature (52)..(54): n is a, c, g, or t
  misc_feature (1230)..(1231): n is a, c, g, or t
atgagtgcagtatgtagaactcacttcagactttgtgtatccctacagaaannncgtacagcaacatatactttgttaattatatgtgttaatgtttttgcgaaattattactaacaaagcgtgattagttcagcgatttaacctttgtagtaatgaactatcagaatttagtttcctagccttacatgcatgacagacaataatgcgttgattagtaaaaaacctctttaacacacacgcgcacacgtgcatgcgtgcgtggacacacacacacacacacacacacacacgagtgttatgtttttgcaaaattattactagcgtgattagttcagcgaattaacccttgtagtaatgaactatcagaattgagtttcctagccttacatgcatgacagacaataatgtgttgattagtaaaaaacttctttaacacacacacacatatgacatatgtatgtatgtatgtgtacacacacattatttccttttgatgatgcattaaaattttggctcttgatagggtggatttgatatgatctgcagtggaagggacaagattgaaacaccggagcaggtatgtctctgggctctggccatgtttatgttcaaatgcttatgaaaaaactttgttactggatttcctaatctcgatcattttttctcaactacctaatacctgtgttggttgtgcagtttaagcaagctgaagacacggccaacaagcttgatttggatggacttgttgtcattggtggtgatgattcaaacaccaatgcctgcctccttggtgaatactttaggttggctgctaacgctgtgttttgacctttcaatataaggctgattgtgaatataacattgcgttggttgtttcttttttctgcttattcacaagcaaatcaaaattatgatttcaaattatgaacttgctccataggtcaaggaacatgaaaacccgtgttattggttgcccaaagactatcgatggggatctgaaatgtaaggaggttccgacaagctttggatttgatacagcttgcaaggtatctaattcttgattgttgactatgtatgaagtctcagtctaggtttttaattagctacaatggtgatgggctaattgctcaccgcacacctgctcaagcattctttcaatttgaaattaaggcattctacacagatgcatttgaaaacccatcatgaatatatcatgacaaggaatcatnnttcagat

SEQ ID NO: 3388 - DNA, 647 bp, Zea mays
  misc_feature (394)..(396): n is a, c, g, or t
  misc_feature (515)..(519): n is a, c, g, or t
  misc_feature (545)..(553): n is a, c, g, or t
  misc_feature (560)..(560): n is a, c, g, or t
  misc_feature (568)..(587): n is a, c, g, or t
  misc_feature (589)..(608): n is a, c, g, or t
  misc_feature (610)..(617): n is a, c, g, or t
  misc_feature (620)..(643): n is a, c, g, or t
cgacagtgtctgaaaaaaagaacaggccatcaaggttaagttcagcattcttgtttttaaccactgaatcggggagctgggagggacatctgcagaccattatggtgcctgccgcagccgccgcgcgcgcagtggcgtactcccctgaaggcagggtaaccatgcatggtttcagctccaaaaaaaaagaaggtgcagacaagaattcacaaagatcgttggaaggtgaagcttctcagttactactaaacatgttttgtttttttctagagaacatgttatgctgttgtgtggagcatacagccgtcaatgaaaccaaaccagagaccgaaacaaaaaccaaaatccttgcagcggcgtaccatctgggtgagccatcttctgcatagcagtnnnggcgaccatgatgggcatggagatcttgaaccccagcacggtggtggtcatgtcgatcttggacacgtcgatcagtatgcgcggacggaaccttagcaaaggagggaaaaaaagatgannnnncaggtgagcagctgcgcggctctgannnnnnnnncattcgnacgaaggnnnnnnnnnnnnnnnnnnnntnnnnnnnnnnnnnnnnnnnntnnnnnnnnccnnnnnnnnnnnnnnnnnnnnnnnnaccg

SEQ ID NO: 3389 - DNA, 959 bp, Zea mays
  misc_feature (65)..(66): n is a, c, g, or t
tcgatcttgctgtgaccccaaatttcattcaggcactgcaccgcccggcccccaccctcaacttnntttgggggagagggacggttaatctcaacttatgtaacattgacctttcttgtcagtgttatttacttacacccttatattggtttataatgtggggacttctccagccatcacaatatttggagggatgctcaagtgccacagaagacattcacatactaccatccagagtcaagagggcttgatttctcaggattgatgaatgaaatcaaggtggttcatttctttaacatatttacacgttcagtcttgtttcttttgacttcttccattcctgctgcttcctgtatgtattaaacttttgatggatttgttactaaatctcatggtcatggcctaccacctacaaatttagcttcacttgttaatttggtaacaattcagcctttctaatttagagttattgtgggcatttatagttctcttgatacccagccaccagccagataaaatttggaaatggaaccatgagagattattttgtgctcagtgaatctggtctgctgagtgctgacaatttgtctgaaattccttttgtttatgcttttctgtcatctgcagaatgctccagatggttcattctttttgcttcatgcatgtgctcataatcccaccggtgtagatcctacggaggaacaatggagagaaatatcccatcagttcaaggtaatgggaactgaactggggaacaaaaaagttgtatttcctgtgatcctacaagccacacctaccagatttcactcttgttcctctataggtgaaaaaacattttccattctttgacatggcataccaagggtttgccagtggtgatccagagagagatgccaaggcaatccgaattttccttgaagatggacaccaaattggatgtgctcagtcatacgcaaaga

SEQ ID NO: 3390 - DNA, 358 bp, Zea mays
ccgctggtcacctcgccgatcctctcccccgagccgctcaccagctcgctgtggctccgcgcgggcggcccctgcgtgaccatgcccacgcgcctgatctttgggccttcctggagctgcttcaggatcacgtctgcgcccaggaaaccgccctctgccctcctcctcttgccgatcgcccatgagaggccggcttccaccggcgtgatgtgctgctccatgtcgttgccgtacaggcacaggcctgcctccagtcggagactgtcacgggcgcccaagccggtcagccgcaccttgccttcggatttctctaggatggcctctgcaagatccactgcattctctgacggaacagaga

SEQ ID NO: 3391 - DNA, 596 bp, Zea mays
  misc_feature (549)..(551): n is a, c, g, or t
  misc_feature (565)..(568): n is a, c, g, or t
  misc_feature (586)..(586): n is a, c, g, or t
tacccaggcactgagccggatttgaaccattgggccatcccaaacactaggcgaagctgaacaaaatggtaccttccgtgctcaggctcggctctggagatctcaatgcttctctgaaacttgacccgagaccagtacctgcgcgacgccacgagggtgcggttctacaggagctacatcggccagctgaagaaggccatagaccagggagcgaacgtggctggctacttcgcctggtctctcctcgacaacttcgagtggctggcagggtactcgtccaagttcggcatcgtctacgtggacttcaacacgctcgaacgccacccgaaggcgtcggcctactggttcagggacatgcttcagaagcattgagatctccagagccgagcctgagcacggaaggtaccattttgttcagcttcgcctagtgtttgggatggcccaatggttcaaatccggctcagtgcctggctaccaaaatgggaacaaaggacagctaccccgatcaattgtgatgttgtgtgtttgtgggtatgttctctctggaannnattgagatctccannnncgagcctgagcacggaangtaccatttt

SEQ ID NO: 3392 - DNA, 845 bp, Zea mays
gcagtgagtttagcctttctcaatacttcactaataacaagaaatgatgtttttctgtgagtagaataatactagcaggaaatgaaagccaacctgcagccacggaagccaagcatcgggtttacttccgaaagcttttcgatccgtgcgagggcatcctcctggttggctcccgtctcagaacacagttcacgcacgatttcctcgacgttcccttctggaaggaactcgtggaggggagggtccagaagtcgaatagtcactgaaagtcctgaaacgcaacgcaaataccaaagctcaaacccagccctgcgcttcaaaaaatacgaaggcattgtgattttttttttcacgtaccatccatagcacggaagatgccttcgaagtcagacctctggtaaggcagaaggcgatccagcgcctgctgcctcagctcaactgtgggagccataatcatctgcctcacagccttaatcctctcatccgaagcgaagaactgccccaagtacaggttaggaaaagaaaagaaacttgaaactattttcctcgcccagaacaaataaatcaaaaggaaaataaaacatgtcggatgtagtaactgtaaccaagagtactaataataaaaacaaatacagataccatgtgctctgtccggcataacccgattccttctgccccgttgttccgcgcagccaatgcatcctcaggggtatccgcgtttgccaggacctagtagaacatacatatgcacaaaaataatcgtttctgatgaaaattgtgaaatgtggtttgagcttcaaaaagaaaaaggaaaaaacattatgttttttttgagtaatactagt

SEQ ID NO: 3393 - DNA, 406 bp, Zea mays
tatatattatacaattcgaggctactgcacactctctaccgctcgtctcgtcggaattctcctcctcaccctcagcccggcgttggcggccccggcgtgcggaacgacgctgctagtgctagcatacgagggaggcccgaagtgagggcgccgtggagaagttggtgcacgacgcccagcggatgacagactccaccgccacgtccaggtgctcccgcccgccgccgccgatcgtgtggttccgcctgccgttgacgccccgtggcgtggatcccctcgccgtcctcggagtcgaggaggcagcgaccggctgtggctcagctggctcgctgctgtcccgcgcgcagaagaacgagaagctcggcatggaagccatgggcatcgggaaccctcctcctcctcctcc

SEQ ID NO: 3394 - DNA, 365 bp, Zea mays
ttgctccttcttcctcctcctcgatcgacctctctccttggtgccgctgccgccatatatgaactgctagcgcgcgcagcagccagcagctgccgaccggcctacaatcagaaggccagaaaggatcgatggagaccatcaagtgctgcatcgcgtgcatcctgccgtgcggggcgctggacgtggtgcggatcgtgcactccaacggacgcgtggaggagatcagcgggggccccgtgctggccggggagatcatgaaggcgtaccccaagcacgtcctccggaagccgccgtccacgtgcccggccgacggcggcatcgtcgtgcagaagcccgtcatcctgccgcacaatgccgagctgcag

SEQ ID NO: 3395 - DNA, 189 bp, Zea mays
aggatgaccgtgtctaattacgcctgagtttagatgtacttggcgagttacaatatatttatgtggtgtctgaaatgttctagaacctctaaatctattactaagagcaacgatattgtcgcttcttaaaccttagtactacggatgttatgagctaataaatatatttcgctaatgtgatgcagttaa

SEQ ID NO: 3396 - DNA, 248 bp, Zea mays
gctgatgcacaagccacaatagcaatagcaaagctgaaacttaaccttcacatcacttattcacatctccgaacgcgacggagcggcgatgaacagataccggtacacagccgaccccaggccccagcctagggcagcaccacacacgacgaacaccaggatatttatcacgcactcggggaagacgaccaaaagacggttacccacgtacagagaagagcattccacgacgaccctgctgacattga

SEQ ID NO: 3397 - DNA, 851 bp, Zea mays
tgatctccttgtcttctggggagtacttcttcgctttgaggaaatcttccctcgctgattctgtctggccaagttcagatttagcttttcctcgcctgaacagcgctttgacattactttcatcttctgtcaaaacctgaataatatgtttacaaaaaggataatccatcaaatggtaattttttcgtttgattttgtatcaggaccatgggattgttcacttcatgaaacatcatgagaccaacacctttttgcaatagaaaggctggaaatgtgcaaatcagctgttcgatacctgtaatgttgaatctttcatgttgatatgagcttagttgctacagttttttaacaccatttaaaaaattatcatgctgttactgtcggaacatacaatcctgtatatttttttgctaaggtctatgcaaagccgtaaactgtaaaaatgttactgttggaacatacaatcctgtatagttttttgctaaggtctatgcaaagccgtaaactgtaaaaatgtacccatgaatgtaaatcgtgggttcaagactgaatgtacttatgggcatggtcgagtaacatacaatgctacactgcgcaatagcttcatcgaatctctttagtttgatcaggcatgcagccatattgagatggcatggatttttcacagccaaggccatgtctctgtactttccaaataattgaaacatgaaatcatctcccatgtatgcaatcgcctgtagaagagaacaggtcgactgaaatcagaatatgctgataactacaataatgtccaaagtatagcatgctactaaccatttcatattgctgcatggcctcctcaagcttctttt

SEQ ID NO: 3398 - DNA, 633 bp, Zea mays
gaggcgtgaccgatgtgttggtggttacctcctccgtggggatgctccacagggttcatggccacaccacgcaccttgggccagctgttcctcttcacacggtacttgtggtacgcgttaccagccttgagcatcggcttctcagtcctgcctccaccagcaacctgcccaatcatggcacggcagctgctggggacaatcttcttggcgccagagggcagcttaatcctgaaagaaatgaacagaattaagaatgcagacaaataacaaaaggtcacttggatacactgataaatgaaagacatccaagtaggcaactacattaggacatcaagaaggcattaagagtaggcagacagattaggatacatacaaggtattcaatcagaaaaacactccaactgaaattatattcagctgtaaaatgtaataatccgactgacatcacaatatgagaaacaggttacaatgtcatcaggatatatgatggagatgtgtaaagtagcacaataataatcacgtcatatacaatgtagtcattgcagaacatgcaaacataaggtgtttatttgataatctgcagcaccttgcaaaaaatcagctataaatatctacataaagactaaattttac

SEQ ID NO: 3399 - DNA, 1086 bp, Zea mays
ggcttcatttcaagaaaaggatgggatttagtattcacaatgcttgcactctgtgcactggttgctgctgtgctgttgtcaagtcatgtgaaaacagaaattcctcagatcatccagaagtggagagatcgctcgactaacgcgcagaatggaaatgcaggtaatgactataggcagaagtgttggatatgtcccattctaaatactatcatagttagggttgaaaacggacgggtaaaatcccgtcccgacgcgtaccgttttctacatttgacccaaccgtttcggtatttacggaaaagagagagtttatttcgtccgttttcgtgggaccccgtttttatccggattgaactcgtatttattccatatttgataaatatgggacgatcctaatatgcattatatacattagtatataaactaaagcctcatgtctttaggtgacaaattatagcacaattgaccattgtagtcatcgactcttttcaatgacaagtgatttaaagtcttaaacaacatcaaatatagttaaatgtacactattagcaaccaaacaacaatagaatgttgcctctatatatctatttgttttattctaatgtcatgtcaatcaatcactagtcaaacatcaataccatttctatttatattaaattatgagtttatgttagtatttctgtttccattcgttttcgcaattccgtttatctcgctcccgttttcattcccgactattctggacccgatcctgtttccgacgataaaatgcggatacggaaacgggagggtgatttttccgtccgttttcatccttaatcatagtatcataaaagtttagtgagttggtataattgcgctgatttttctccttgctccatgtctgatagatcctggtgttcagccacttcttgtggacgaaagttgacggggagatctttcggtgcggctcctagcgcgagacagttttgtagtgttgttgtgaggcagtgtgatggttctggagaaaagacaaatcagacgatgacgaggaaacggtttctgtccctaatgcttattgatctgagcaaacaaacatgagcggga

SEQ ID NO: 3400 - DNA, 367 bp, Zea mays
gccttcatcgatcgaccctatgtcatgtaaaaaaaaaggaccaaagtggtggttccttgaagatcatcagttcatcatcctatagtaagctgaatgatgaaagaaaacccctgtacattacatggaaggcagaccggctattggctccattgctccaacgtctgctttggctggcttgcctcgatggaccggatgcagtgaggaatccagccgaacgacagttttgaaggataggaaggggagctggaagcagtcacgcaggcagcctcgccgtgattcatatggaacaagctggagtcagtttctgctgtgccactcactgtttaccttaagattattacctgtgttgttgtcctttgctcgttag

SEQ ID NO: 3401 - DNA, 960 bp, Zea mays
  misc_feature (40)..(41): n is a, c, g, or t
cataccatgagatactcatgaactaataactgaagattannagaacccaatgcattcacgtagaaaatacaaaagaacccaatgcattgactatagaatcaactaaaattcaagctcactatttctaatgttcaagattgtacagtatctcatcatccggatgcaagtagagtacatagcaacatcaccaaacagatgacagcacagaaaaaatgaggcataaataatatggataggggcctaaaagtgaaaatactatgtgaaatacttccagtaagcagacaccaccagagcagcagaatgattacatcctatcaccaaatttcatagtttgtttaatatttttatttacagagttaaattttgaacatttacatagtccatgcataggcaatgcactgcttttctacttacctacacaaaaatcagtagcagcaacatcaattgtcaattttattcttccattatacccagccctctctattgccgcaataacaagatccaggccttcagatatgctaaacattaataaagcaacataaatatggcatattgaaatccatatgttggtcctcaattgtgaaaaaaagaaatgtatgatgtaaaaaaatagtaaattgtttctcacttgcctggaaatatttggagcaaacccaccatgatctccaatgttgcagctgtctgagccacatttctccaagataatatcctgtaaaagtaactagtaagtaaattctacaaaagtgagcaaacctttctggcagtctgaaggcaaagattgtaagggctaagagggcccttaatgtcagtactttgcctcaatgacaaccgacccaaatgaataaatatattatctaaattcagacgggaaaaagagagaaggaatcaggaaggctgagtgcaatattagtttttcattgagcacaatcttattatgtttgatgaacatcttgaacaaag

SEQ ID NO: 3402 - DNA, 418 bp, Zea mays
ttaaattgtaaaactcaacacaaacaacaaagcaactcaaaaactcacttcgttttgacactgacaccgtccgttccagcaatgatcactgaactcgccatgttcaagaacaacccatggtcaacaactccttccagagctgcaatttcctgtcctgctgccaacgcatccttgattggcgtcttgaagtataaatcgacgatgtagtttgagttgtcagtaacatagggcttgtcgccttcaaaccttagctttgcctcgactccttcctccttaaacagttcctgcaatcttacaaggttgtacttccagcagaactgcacaacttccactggcatggctagaccactacctcctaacccatcaactagttttgtctcgtcaacaataacaataaacttgtcagatgctgcctcaa

SEQ ID NO: 3403 - DNA, 287 bp, Zea mays
agcttcgctatcaccggatcccccctctgctccctccgcacctccaatctgcgctctctgttttcttccgcgcaccccggctgttggtgtcccgtccggcagcgttgctggtggctgaatccgagcctttgaggggtctgctgccgccgccgccgccgctgtcaccgctcttgagatctctttcttgatctggagggattaaagagggattcttgccttcctactggagcaagagaaaggggagaacgtgtttcttcaggcgtggttgaacagtgaggaccggtgaa

SEQ ID NO: 3404 - DNA, 603 bp, Zea mays
gctctctgttttcttccgcgcaccccggctgttggtgtcccgtccggcagcgttgctggtggctgaatccgagcctttgaggggtctgctgccgccgccgccgccgctgtcaccgctcttgagatctctttattgatctggagagattaaagagggattcttgccttcctactggagcaagagaaaggggagaacgtgtttcttcaggcgtggttgaacagtgaggaccggagaacaatgcgaggttcgggatttaaggtaactttttcctgttgtgcgatttcaatatgttttaggcgattcttcatctttcttttgattgagttcttcggattcttcaaagttggtgttgtccacactagctttttttgctgaaaatctctgggggaaaggttcgataatcttgccactgtgatctactcatcatcatctaacactttggttctatctccttacagatgttctggctttaggggcagttcttctgaagcaggggacgggcgattcgaccaccggagctcagatctgattacaaaacgttcagaaaacacaaggcgttctcacaccgcctttcacttcttgcttactttggcaaccactcac

SEQ ID NO: 3405 - DNA, 583 bp, Zea mays
caagaagtgaaaggcggtgtgagaacgccttgtgttttctgaacgttttgtaatcagatctgagctccggtggtcgaatcgcccgtcccctgcttcagaagaactgcccctaaagccagaacatctgtaaggagatagaaccaaagtgttagatgatgatgggtagatcacagtggcaagattatcgaacctttcccccagagattttcagcaaagaagctagtgtggacaacaccaactttgaagaatccgaagaactcaatcaaaagaaagatgaagaatcgcctaaaacatatcgaaatcgcgcagcaggaaaaagttaccttaaatcccgaacctcgcattgttctccggtcctcactgttcaaccacgcctgaagaaacacgttctcccctttctcttgctccagtaggaaggcaagaatccctctttaatctctccagatcaataaagagatctcaagagcggtgacagcggcggcggcggcggcagcagacccctcaaaggctcggattcagccaccagcaacgctgccggacgggacaccaacagccggggtgcgcggaagaaaacagagagcgc

SEQ ID NO: 3406 - DNA, 807 bp, Zea mays
ggcaacagcctggtaacctgcaacaaataagatcatgtaggcacatttactgagtaaatcaaggcacagtgaaaaaaaggattcagaaggtgaaacgtgggctcaaacatacaatgaggatcttcggagtgatatcaaggccttgctgcttaatcctcagaagcatctcattctccaaagcacggacctgatccagaatgtacacaacctgcaaagcgatcgcaaatgagaaacctggaaggtgaagtagctaagggcttgtttgggtaatctcaaattggagtggattgaggtggtatgtggtgtattgaagtgtaatataaactaatttttctttcaatcctctttaatacacctcaattcacttcaatccctctatacccaaacaaagcctaaaggaaatagtaatcactaagcttctgtacctgaccgccagtgtcagggtatccaagcacattggactgggcgaagtagccatgaggagacaggataacaacgttgaacatcattggtatagttccaaggaacttctccaagttggcaggatcaggggcctcaagaaggtcaagaagcaagtggagtgtgtcgagtacacgcttcgcagtgtcaccccaacccttctccaaaccaagctcttggaacctaacacagatcatagtggcattataggcagttaatccatttgtcatatttcaaccaaagttccatagcaagtacagaacgttttattgagcattcacctatggttgaactccgagtagggagtgtcttgaggaacactcagtagatactcctctgcctttctca

SEQ ID NO: 3407 - DNA, 400 bp, Zea mays
gtgatatgatataggactgttacaatgaaatatatcgatatacaaattctactttgcatgtgtctaaacgaccccttagtgttcttctacccgtgtctttactacctctgtgctgttcttagctttgtggtttctttgttgagtacaaaatcaaatggtgcatgaacaatcgattagtacttcacattagaaaattaactacatttcccaaaaatgtcttcaaataatatactgtatgcattgctggattttctgttggataaggttctacaaacttggcaagttggcattagggtactcatgcatggtggatactatttatttctttaatctgaagaattttacatttttaaactaatgggccagttatatctagtttgtggcagagggagttgatcca

SEQ ID NO: 3408 - DNA, 475 bp, Zea mays
cgcacccgtggctcaacatgttcgtgccgcgctcgcgcatcgccgacttcgaccgcggcgtgttcaagggcatcctgcagggcaccgacatcgtcggcccgctcatcgtctaccccctcaacaaatccatgtacgtgttgaatcgatcggctagctagctagctaggcacgccccggccggcctctgacgactcgaccggtctttctggggtttggtttttcaggtgggacgacggcatgtcggcggcgacgccgtctgaggacgtgttctacgcggtgtcgctgctcttctcgtcggtggcgcccaacgacctggcgaggctgcaggagcagaacaggaggatcctgcgcttctgcgacctcgccgggatccagtacaagacctacctggcgcggcacacggaccgcagtgactgggtccgccacttcggcgccgccaagtggaatcgcttcgtggagatgaagaacaagtacg

SEQ ID NO: 3409 - DNA, 624 bp, Zea mays
  misc_feature (553)..(557): n is a, c, g, or t
  misc_feature (564)..(570): n is a, c, g, or t
  misc_feature (575)..(580): n is a, c, g, or t
  misc_feature (591)..(595): n is a, c, g, or t
  misc_feature (608)..(611): n is a, c, g, or t
  misc_feature (613)..(621): n is a, c, g, or t
ttcctctccaaaacaattgatacttgttaatgttgaatggattggctggttgctggtggtgttgtgttgtgtgtttctcgttttgtttttctcctttgttaatacaaagaccggcagttatcctgccagattctcttcaaaattaatgtgggatggattctgcagaaggaggcggagtcttacctccctattctgatggcaaaggatggaaagagtttatgcatgcatgacttgctaaattcacaactgtggaccttcaagtataggtgtgagcttgtgaattatttggctttaatgcttgttacattgagcacactgaatccttatatttgatgaacttacttaggaagaatacaatgttatgatgccaagcagcttaaagaacaacctgtggatattagattaattagaaaatcaacacacattagtccttttcatgctttattcttaatgttatcttagcttgaattaaatgctatcaaaattgagtaagatatccagcagatgcagactgcagataagactgtggctttctctgatattgtgccctgannnnnaagtaannnnnnnctagnnnnnnggagaaatcannnnnactacatccaatnnnnannnnnnnnnttg

SEQ ID NO: 3410 - DNA, 454 bp, Zea mays
  misc_feature (13)..(13): n is a, c, g, or t
cgggtgcgagggnaagaacttctacacccggagcgcgttcctgagcgccgtcaaggcgtacccaggcttcgcccatggcgggtcgcaggtgcagggcaagcgcgagatcgccgccttcttcgcgcacgccacgcacgagaccgggcgtaagctggctctatctattaacctcgctcttcagcgcggcgcaggttctttgatttttgacccatcatgctgatcaattttttttttggaaaattttccgctgctgtgtctgtgtccacgggcagatttctgctacatcagcgagatcaacaagagcaacgcctactgcgacccgaccaagaggcagtggccgtgcgccgcggggcagaagtactacgggcgcggcccgctgcagatctcgtggaactacaactacgggcccgcggggagggccatcggcttcgacgggctcggggaccccggcagg

SEQ ID NO: 3411 - DNA, 744 bp, Zea mays
tactcgaagcctcgtagctgatttgtggcatgcacaataagggttaccatatataaaactatagatctgaaatacagtgaaagtttgaaacacaaggagtctacacagaactaagacattttctctttctgtttctgatacaaaacagaaaaaacccctacattctgtactacattatgacactttaaggtgaagaggtttttttttgtctgtcaaaataaatagatgaccgtaccttgttcttctgcgcaacggctgccagctctttcaggatgtactctttgagtccttcaagtttgcagatttcatcaaaagaacccttgtagccattggactctgcccacttcattgtgttttcttggtgtggattgactactgcaactaaacttgatctgaaactgtccccgtatacccagatctagaaaaaaaaatgacaatgttaaatgctggccaatattccctcttaattcagccatatatactatagccgctgaattagtttacttacatcttcaacgagtggagggaagccataaactttctccaggtactcaaccgcaacatactccccttgcgacagcttaaatatgttcttttttctgtcaatcaccttcaagatcccgtctggggtcatctctccaatgtcacctgaaaataagtgtgtttgagcattgtattgtggaaccttgcctacttttttttaaaaaaaacaaaccctcattaaatcgagtattcacctgtatg

SEQ ID NO: 3412 - DNA, 405 bp, Zea mays
acacccgttttttattcgtttttgcaaaattctgaaaaaactagaaaactgttgatagtaatttttgccagtttctcataatccaaaaagaaataaataaaatcatttactgacacccgaatactgtatcaattttggctcggaatctactagattttatagaaattacagacaaaaactcctttttttttaattccgaaactgatctaaagctgctcgctgtactgcactatgcactctctcacctccctttatatttgaccaccgcccctctccaccaagcgcatccacctcgacctccatccctagcgctctcgccccaaagcacgccgcaggcgcagagccatcaccaccatccttccccccctctatctctctctaccccatccctcctctctctcctca

SEQ ID NO: 3413 - DNA, 405 bp, Zea mays
  misc_feature (23)..(23): n is a, c, g, or t
  misc_feature (26)..(28): n is a, c, g, or t
  misc_feature (77)..(77): n is a, c, g, or t
  misc_feature (82)..(83): n is a, c, g, or t
  misc_feature (94)..(94): n is a, c, g, or t
  misc_feature (103)..(103): n is a, c, g, or t
  misc_feature (107)..(107): n is a, c, g, or t
  misc_feature (111)..(111): n is a, c, g, or t
  misc_feature (135)..(135): n is a, c, g, or t
  misc_feature (181)..(182): n is a, c, g, or t
  misc_feature (184)..(191): n is a, c, g, or t
  misc_feature (193)..(193): n is a, c, g, or t
  misc_feature (336)..(343): n is a, c, g, or t
  misc_feature (347)..(347): n is a, c, g, or t
  misc_feature (367)..(367): n is a, c, g, or t
acacccgttttttattcgttttngcnnnattctgaaaaaactagaaaactgttgatagtaatttttgccagtttctnataanncaaaaagaaanaaataaaancatntacngacacccgaatactgtatcaattntggctcggaatctactagattttatagaaattacagacaaaaactnntnnnnnnnnanttccgaaactgatctaaagctgctcgctgtactgcactatgcactctctcacctccctttatatttgaccaccgcccctctccaccaagcgcatccacctcgacctccatccctagcgctctcgccccaaagcacgccgcagnnnnnnnnccancaccaccatccttccccccntctatctctctctaccccatccctcctctctctcctca

SEQ ID NO: 3414 - DNA, 896 bp, Zea mays
atttctcgccacggtctctcatgtttgagattgcgcctgtgtgatgtgaagatctaaatgattgtttcttgctccttgccagcaaatccgtcaagggagttctctggtagcattgggaatgttgcctggaaagagagggttgatggctggaaaatgaagcaggacaaggggacgattcccatgacgaatggcacaagcattgctccctctgagggtcggggtgttggtgatattgatgcatcaactgattacaacatggaagatgccttattgtgagtttcaacaccctccttcagctcactcatgttttacaggatggtatgttgtttagttctaatgttttatttaattagcatggttacattcacaaaaaaggaaaacaaaaacttgagttatttcttctgtgcagatgaagttaagaattggaagtttgcctttatgttcccaaattaatgacttgtttacacttttatggaaggtcacacattgtattctgttattaagacgactacaaaatcaaactgaagggtgtactttagtctagaaagcggaatattatatttatatcctagaattgttaaatgtgcataacttcaactaatgcacaaacctgtcatgctcaaatcactgtaacggtgggcaattgtgtcaatccaaccctttattgctatgttttcttcagcacatatttgaacattaattttgtgccatctgaatttcaggaacgacgaaactcgacagcctctatctaggaaagttccacttccttcctccaggataaatccatacaggatggtcattgtgctgcgattgattgttctaagcatcttcttgcactaccgtatcacaaatcctgtgcgcaatgcatacccattatggcttctatctgttatatg

SEQ ID NO: 3415 - DNA, 675 bp, Zea mays
actgatgctgtataccatgaacatgaccaacaaataaaaaatttcctcattgttcaatgctgtaggtgtatcttttacaaaatgggcgattgaatacgaagagcctgctggtgaagcatttaataaaaatcatccagaggctgtggtctttgtagataactgcaatgtgattctaaagtaagtgcaaattgtttgatgccattattatattttttgttgttgaacagaaccaatatttttggtaatgcagggcgattatggataaatgtggggatactgatgattgtgtttcaacttctgaagctgctgaacaagcagcaaaacttccagaagtgaacattaataatcttccagtccctggcgaagttgaattcataaatggtggtcctccgtgtcaggtttgttattatctacagttctatgtataggccagaaaatcatcagtcacctgttcagttttgtcattcaaatgcttgaattgtttattcttttgttgtcagggattctctgggatgaatagattcaaccaaagcccatggagtaaagttcagtgtgagatgattctagcattcctctcattcgctgagtatttccgtcccagattctttctgttagaaaatgttcggaactttgtttccttcaacaaagggcagaccttccgtttggcagttgcat

SEQ ID NO: 3416 - DNA, 441 bp, Zea mays
cgacgattgcctactactactataaccaaagtctctgttctcatcctctctgagcatcgactaagctacgatctaagagatcccctaacgcgcttccaacgatagatttcgggagatgttctcggccggccggccggccatcgcggcctcactgctgctgcgcgacggcctgccgcatctgcatgaccttcttgtgggagttggagtgcaagcagctcacgaaggtggggctgttggcgggccggtactcgggcagcagcctgccggacttgaacctgacgccgcaggcgttgcacagggtcttgggccccagaggccccgccctccactgcggggtcttggaggacaggcagtgggcgcaccgcttctcttgctggtccgacgacggcggggcgtcgctgctctcgtagcacgtcttcttggccgccttcttcctcttcc

SEQ ID NO: 3417 - DNA, 308 bp, Zea mays
  misc_feature (296)..(303): n is a, c, g, or t
gcaggcgtgctacctgccgtgcaccgccgacgggctgccggtcatcggggagataccaggcgtgaaggggtgctatgtggccacgggccacagctgctggggtatcctcaatggtccggccaccggcgcagccctcgccgagctcatcctcgacggcaagtccaagatcgttgatctggagcctttcagcccggcaaggtttctcaagagaaggagcaggcgtggagtctgaccgtgtgaatgttcagattcaagctcgctaccgaataaaacactcttggttctcccgtttgcannnnnnnntgagt

SEQ ID NO: 3418 - DNA, 469 bp, Zea mays
acatacgcatgcaagacagccccagctggcagctggctccccggagggagcgaaggaatgaatatcatcaggggcacttgggcctggtgcggttgccgtgtccggtggtcatgtcgcggtagcatgggcactcgtccttgttgcccgcggtcccggacggcacgcagttgcaggtggcgcagcagatcccgcagtacttgaggcagtcgtcgtgccggctcgccttggagcacctcaccgcgcacttgccgtcgcagaaccctggtatggtaccccaaaatccaaaggaggaggaagaagtgtgaatagcgccgcccgcccgccctaccgcaccagaaccagaaaacggcgctggcagttacctgatccagccatggagacgcggagggaaggcagcgccaggaggaggacgaggaagaagaggaggccagcaactctggcggtggccgcaggcttcatgttgcccacc

SEQ ID NO: 3419 - DNA, 391 bp, Zea mays
ggacgtccacatgaagggcaaggacctcaggttcatcccgttcggctccggccggaggatctgccccgggatgaacttcggcttcgcgaccatggaggtcatgctggccaatctcatgtaccattttgattgggaggttccgggctctggagcaggggtgtccatggaggagtcctttgggctgactcttcgccggaaggagaagcttctccttgttccaaggattgcttcctgatcatcctccatatctgtaaaacttgtgtcttgctagctgtaccgggaacaagattaaataatgcaaggaataaagtgactctgttcttcgtcagtaactattaaattgtaggagtcctgatgatgaataatgggatgtcgtgatttgttgcaacta

SEQ ID NO: 3420 - DNA, 475 bp, Zea mays
cgagaagttctcgtcgcagacattgtcaggggcagccggcggtgttggcggggttggagacggcctgggagggttcgcgcccttcttcgtcgggtaggacgccatcatcgcgatcccgcacttcccagtgctggcgttgacgttcctctccatacggatgtaaccagcctcgccccacttcgggccccacgagttgcggacgatccagtagtccttcccgttctcggcgccgtagccgaccgcgacgacaccatggtcaaggttcgtggtgcagcttccgctgaagacaccctgacgaaaaaaaaaccaaagacacgttgttaagaacagtacagctgggccacagacacagggctgctagctacggcgaagttcgtttaccgatttgtagagctggaactcccggccaccggcctcaatggcaacgctaactggctggtgagcaaccgccttctgcagcgacttctcgtcgttc

SEQ ID NO: 3421 - DNA, 1009 bp, Zea mays
gtgcgttgtaggtgtgagaacactgcaatgcttggtgagagaaagaactgcaatttgccaggaattgttgtggatcttcctacattgactgagaaagataaagaagatattttgggctggggtgttccaaatgacattgacatgattgctctatcctttgtccgtaaaggatcagatttggtgactgtcagacaggttcttgggcagcatgccaagcgcattaagttgatgtcaaaggttcgtatatactatcactgtcgacctttaaagggttatatcagctatatttctgtccataatttggcacgactccattttttgtttgcatctctcgaatgaaaccttcccatcttaatttttgctgtgaacacatgataaccacatgctatgttatttatcatgtaacatatgaaagtagtatgttgagtacccttttaccaactaggatatactgcttgcccaggctgcaacttcacaagaattttttactttacagttggttagcgaaatgcaattctgttaacttgactctacatttccacctggtaggctgttttactcctaaccgaattctctggaatactggataattcctttattgtaaaaagtgggttctgcctatctgtcaaagctagagaggtcattttccctgattacgaagcacaagaattttttgaattctcaaattgttgagaatagttcatgtcatgcattgcttatttactgcaatgtctgaaatctagatggtttcctgctatactgttgttcgttatttttttggaggtaatccctgcctttatagaacatatgatcgtgtcagttatgctgtcatggatctgatttatttccttaatgatatggttctgctatgcaggttgaaaaccaagagggtgttgtaaactttgatgagatcttgagggagactgatgcttttatggttgctagaggtgatctgggaatggagattccagtcgagaagattttccttgcgcagaagatgatgatctac

SEQ ID NO: 3422 - DNA, 360 bp, Zea mays
ccttgacaaggtgattgggtacatcaagacggagtacaacatcagccatgtgaccattcaggtcgagcgtgaatagagggggagctgtcttttgggctgtcagggcataaatggcgtcacgccttcactggttatcttactctgtcggttaaaacttttttttggcacctgggaaggcatcaggcagccatcggagtcttgatgtgcttgcaagttcatctgtggttcaagctttgatggtcagtagtgttatctgttactactagtctattaggcgggggtaggcgtcaaccagtgtgtacgggtttgattttcggtcatgctgttaacagcattgcggttcgtcgaactggatatgta

SEQ ID NO: 3423 - DNA, 766 bp, Zea mays
tactggtatatgcatatcatacagctgtcgttttcttcgcttgctaccagaaattcgcaagaatcttttgacaaaaccttgtcatcagggggtcaaagcagtaattgccaagagtttcgagaggatccaccgcagcaaccttgtaggaatgggagtgttaccgctgtgtttcaaacctggtgaggatgctgattctctggggctcaccggtcatgagcgctacacgataaggctccctaccaatgtgagcgagatacaaccgggccaagatgtccaggtgctcagtgacactgggaagtcattcacctgcaagctccggattgatacaatggtgagttcttcggtaaaaggatgtggaactggtagtttcagtaaaatgacatattggttggctgaaatgttcacagcgtagtggtcactactactgaatactgcaataaagtttctgggcattacatttcatgattgcaagcacatacaccaattggattttgttcatcttgtgagatgaattaatgcctttccaaataccaaccttcaagcctagcaccaatcaaatttattgattttaaagtgggttgtgtaacgaatttattcacatgaattgtgtaacgaataacaaaagattgggttttgtaggtggagctggcttacttcgatcatggcgggatccttcactacgttttgaggaacctggtgaggcagcaacagcagtaaaacgctaaaaccgcatgcaaacatgtgaatatcttgtctgtttcgaaaa

SEQ ID NO: 3424 - DNA, 195 bp, Zea mays
aacctcaagcaaagtaaataataatacataaatacacattgacatttttgaaatgaaacatatcgtttttttgggggtgggggcaaacaaacaaaaatcagctggttggaccaattcgcactacgcgacagtggtatggatgcacaaggatgcagaagaaacgattaaaagtggaacactgaggaaaaaaaaaaa

SEQ ID NO: 3425 - DNA, 194 bp, Zea mays
tctcgtcctctttctagcaatggagtatgctgtgcacacttcactcagttccatcgatcgcgaacggtaattaacgtagacaaaaccacaagtgcaaaatatgaaacgctagtaatagtagtataataatatagttttgcatggaactcggtcgcgcgccatgcgtagcgtagttgcgctttcgctctagcaat

SEQ ID NO: 3426 - DNA, 196 bp, Zea mays
cgatcgagttccatgcaaaactatattattatactactattactagcgtttcatattttgcacttgtggttttgtctacgttaattaccgttcgcgatcgatggaactgagtgaagtgtgcacagcatactccattggtagaaagaggacgagatatgtgaaaacgcctgatggctgatggcaaattatatggaga

SEQ ID NO: 3427 - DNA, 414 bp, Zea mays
tatattcaatttgaagtgataaataatctcacagattgacaccaatactttcaacccaacctgggttttcatttggagtcacaactcagaactccatccgtacgtagctagctagacgattcgttgattcatttatgctgattatagttcagtttagaacttggaaagcagcttccccattgctgatgaactgaacccagcttatttttttttcgaatttatttagagccttctccgaatcattcttcttcttctgagtcttcatcaaatcctggatttggccataacttgcaggccactgctcccagttgcgggccgtggatccttgaactgctcttcagtaactcctgtaaacaaaacaacatcaaaactgtgtacgaacgatgatttattttttttccaaacaaaaaaaaa

SEQ ID NO: 3428 - DNA, 485 bp, Zea mays
actcgaattctttgatttactaatcaatgtgaattcaatgaagcactcaataccttctgtatccacctttctacatgcagatcctgcaaatgctttaatcattactcagtgtggtggaatcccattggttatacaatgcttatcgagcccagtgcggaatactgtaagtatttctgaagctaatgacactataatattagtgcctctaaattccgtacatgtagtcctcatgcgaacaattccccctttgatgattgcacggcaggtgacttatgcgcttggggctttgtattacctttgtaacccttcgacaaagaaggagatcctgaaaccagatgtagttagtactataagagagtatgcttcagctggaactgtgaataacaactttagcaatctggctaatgctttcttggagaaacatgttgatccatgatatgacaattttacagggtagactaaagcttacacatttcgtgtacctg

SEQ ID NO: 3429 - DNA, 594 bp, Zea mays
agaggggccgcaaagctaggcctaacttgaaggttggtcttgggatctgtgggtatcgcttcgtttgcttagaaaccatggtttgattgtttttggtgttgtctgtcaacaggtgggcatttgtggagaacatggtggagagccttcatcggttgctttcttcgccaagactgggctggattacgtttcttgctcccctttcaggttggtaattcatgattcaatccaagattgctaggctatgttagcggtagcaaaatcttaactgttttttttaatatatatgaaatacctcctgcagggtcccgatcgctaggctagctgcagctcaggtgcttgtctgagggtgcctctgctcgttggcagccggatcgcctgctgttggtgcatctggtgattaataatactactatgacagagccatatgctctgtgaagagtattagtagcagcgctcataaaagctacagttccatctattttctcagctatgtaaaacttccaaactgttcatgcttaaaactgagggttttcgtggtgtgagatgtgcatgtcgttgttgaggccattgctgcacattccacctattgaggcc

SEQ ID NO: 3430 - DNA, 681 bp, Zea mays
gttccagcagacaccgtaatgttccataaccaatattggtgagtgtcctactttgcggtttttatctacgggcaagcattgctttcagatgtaatccgcatgccagtctgactatattactaagggtggtaatgagacctgaattttacactataaaacttaaggatcagatcgtatttagatcaggctctatttttgtttatttttgaactaaaattaattaagggctcaaacgaatcatgaagatcgtgatccattaccaccgtccactaactataacctttcacaatttgcaattgtgtgtttccttagctctcttaactgttgttgcatgccgtccattctgactgaattggcgactgtttggtgcacaggacgagcagcacgcgccgcaggaggctgaagaagaaccatctccatctcgaggaccttgaggatttgatctccctattatagaaaaccgggttcgcaggacgcatgaactgtgtgtgggggaataatcgcaggttagcactgttgctagtgtgcccgcctctcttggaatggaagcagcagagccagctatctgctatcagactggcagtgaccaccacctcctcagctacctggttgcatgccacagatctgaaattctgaaatgctgtgactgtgactgtgaggtatgaaaaaacagtgtaaata

SEQ ID NO: 3431 - DNA, 802 bp, Zea mays
atgtagacaacctgcaggtggaatacagattgatcagagcgacttcagtgtttcttttaactgtgtatccgtgcctgagtggctaaggagagtacctggcctccggtgtcagggtaacccaagacattagcttgagcgaagtaaccatgaggggagaggataacgacattgaacaccatggggatcgttccaaggaacttctccagggtggacggatctggggcctccaggaggtccaagaggaggtggatagtctcctgtgcacgcttagcgcaatcaccccaacccttctccagaccaagttcctggaacctgtttttgtccagtcaggattatgtgttaaatcgcaagagtactagtacatgcttcagttgctttagtatatgtaaacgagtcaacaaaaagtattcagtacctgtggtgaaattcagagtatggggtatcagcttgtagggtggacaggtgctcctcagccttcctcagcgcaccttgcagagcactgagactgcggattctgtcgttcaacatcatggtctgtagggaaccatagaatttcagatttttccagctagttcaaagccaatttacaactaccacagcaggaatatatggataaatagtttaaggtgtccttgtggttaaaaattttagacagctcagcaactcattatttatcgggtatgcatcacaggtcagccttaatgatacaaaatttccactttgctaacacccttttgacaacttctagacaatatcgatgacatttaagtaaagaaacagataaaacaatggctcaccatcc

SEQ ID NO: 3432 - DNA, 573 bp, Zea mays
ggacgctatcaagatgcgatgaacatactcgggcctcagggccgagaactcgacttgctgattgttatactgcctgacaataatggttctctttacggtatgttttcttccaaaaggcttgggcatttgctcaatgaataagctttgctattaatattcttctcattcttcaggggatgtcaaaaggatctgtgagactaatcttggattggtctcccaatgctgtctgactaaacatgttttcaaggtgaacaagcagcagtatcttgcaaatgttgccctgaaaataaatgtgaaggtatgtagttgcgctaactcttctaatcttgattttaacaccgattctcctcttaaagttatcatacttttaaggttgggggaaggaatactgtgcttgttgatgctttggcaaggagaatcccccttgtcagtgacatagcgactattatctttggtgctgatgtgacccatccccatcctggggaagattctagtccttccattgcagctgtaagtgaagacctatcctgacaaagaaatgctacctttcagttgaagttttaccattttttt

SEQ ID NO: 3433 - DNA, 412 bp, Zea mays
cgttagccatgcgtgcttttcccgccttcaccggaaaacttagagaaattcgatatcctagttccctgcggatatggcatagtgtcaaataggtgattatacgttagccatgcgtgctttttatttcattattatctgcggttacatttattaaagatatcacaggcggtccatcgttgcgtgtgcagcaacaaactccaaaacttacaataagatgcatgccatttgtacgacgacgacgacgacactcatttgggaattctaggaacaaggtaaagtttctgcgtccggcgaagcgtcatcccgaactggtattaagtttaggggtgaaaacctcaggtcgtcgaacattattgtgtcggctttcctcatagggatgcccaaaatgtgtgttaagcgtcatcccgaactg

SEQ ID NO: 3434 - DNA, 877 bp, Zea mays
acttgcttcagccgatcactctgttaaaaacaggcacagacaagaagatttatagacttgtatgagtattgaaggaaaataatagacattgaggagtaatattcattagacaaataaagaggatttgaacaagtgatgctgaccttctccttctgaagggattgcagctctttcgttagctcctccagctttcttaatgacagatcagactgatccacaggaattctaaagggtacaaaatctgcaggcctgatttcagatgcaaccttcttaatttgctcgatcacatcaacaaattggtcccatctttcaactttcttctttctcatctcctccaagtatgggacaatcgcattcaattcttcccttaaaccttgtaacttctgatttgactgccatttgaaagaaaacaaattattgatggagtcactactgaaacattcagtcttcataacagaatgcatgcagttcctgaccttaataccgcacaattttgttcggttactcccttaaaccattcaagttcttactctactaacatttttcactacagagggtaagaattaccagtagatcacactacagttatttttgtaagccttcaatatagcagagtacaagtaacctgcacatctagccaatagctatcacactatcacagccctaaagttgcaatgacaaaaaagatcatgagagaaaattctgtagaatatctttctgcagtacagcagtagtactcaaatgttacttgtttctttcatggtatatgatacttcaaagcacagaaactaacctgtctaacatgtatcggtggctcgcccatggccgagcatatgccagcgagctcggcctctgcctccgcaatggcctgccgcaa

SEQ ID NO: 3435 - DNA, 195 bp, Zea mays
gagccatggcgagcgagcacgcggcggggggcgaggctaagcatgaccagaagcagagcctgatggacaaggcgaaggggttcgttgtggagaagatcgcgcacatccccaagcccgaggcgacgctggacggcgtgacgttcaagggcctgagccgggagtgcatcacgctgcacagcagcgtgaacgtgtcca

SEQ ID NO: 3436 - DNA, 1052 bp, Zea mays
gcagtgttctgttccatatagatcgacgactgcatgcgagccaaatattggccacgcgacccacgacggagcaccagctcagctggcatggtccagtgtcgccacctccagcaaggcagcaagagcaggccggccggggaacgatcacttgatgaggatgcatctggtcggtgcaccctcggctccgaccagcctgagaggtagacagtgcagcatgtatatccccgcctcgatgtcgtccagattcaggctctcaacagggattatatcctggtgtaattaatagagggaaaccaatcagggtttgtacacatgagatgagttgagggggattatggtgtaaattaaactaatttacatctgaaatctcttcaatccatgtgtattgtgataaatactagagtatcaaaacatagtctcagtggtttggatcctcatgtggggaaacttttaggggtagaatatgcaacaggatgcagacaaagttatcagcgaactatgggttagtttgggagctataaaaccggaaaaaaaatatgtgtgtgtgtcttaccggggttttgaaaaagaccacgtgggcagagatcaggtgatcaaatgatgccactgacagaccgtcaactcctgcacaattgacagtaccagtattttggcgtcattacataacaaactgaaagtctgttacgcctcgtttcgatcattggaatcgaattccattctaataatagtaatttagatatatatcaattaagctaattcagttttatgcaaaatatatttgtatactattattaacaagatgtcggatatatttatgtattatatttttattataaagaagtgatatgaatagtgtcatgtaagttacagactagaaacaaattctataaatgcataaaatcatttttcatttttcactccattaatttatgaatttgagataggcttatatctgaactttggaaagtggtggaatgccaaatttcaaactaaataagttattttattgagtgaatttcaattctcaaaaaatgaagggatacaaacggacc

SEQ ID NO: 3437 - DNA, 384 bp, Zea mays
gaggcgcgcggggaggcagggtgggactacaacggcggcgaggaggaggattatgcggcggcgctgctgtgggacgagccggagcccttcttctggtttgatgtcttcctcaagtgatggccagcgcacgacgctgcatgccagcaattcgaatcctgcatggttggtttggagtttcggagtgacggcagctcatgctcctgcatctgcatgcatgtgttgggcagtaagcaagcaagaaaggtagataggcttgctagctagggtttctgactcctttgtactaaattatctttatattttttttatcttatccttcttttttccctgagggtgtgattgaggtatagtaatgtgaggtggtattactggtgggaggattta

SEQ ID NO: 3438 - DNA, 183 bp, Zea mays
cgcgcacacacttgacaatcacaagaggggggggaaaagaagctccctagctaagctagaaagacgggtatatatctggtggcaatggtcacctcacctagggctgctctgcatgctcggggtcaggatcagccacacacgtacgtacgtacacgcttctattgtctccaatcacatcaccgg

SEQ ID NO: 3439 - DNA, 608 bp, Zea mays
gtgagcgtcttgctaaaagtggctccacaggtgatcgcttgaaggaaactcaggtgggtgtttgcttaccatagatttccaatattccaagcattctataatgttatattcaaattacttttaatgctccagtcaatcaataaaagcttgtcggctttgagcgatgtaatcttcgcgatcgcaaaaggagatgaccacgttccgttcagaaattcaaaacttacatacctattgcaggttagtgatccgtgcatgtctatgcagagttgaatgttgtagtccattttagacaatctcagctatatcttcactttgcagccttgccttggaggtgactcgaaagctctcatgtttgtcaacatttcaccggaggcatcctccgttggtgagacgatatgctcgttgaggtttgcttcaagggtgaatgcttgtgagattggaataccaagacgtcacacataagcccgtcccttcgttctaggctgaattatgggtgaaggtagctgtagggatcatggtaatgtgatatataatgtgttggtttgtgccgcatttggccacaaaggtgatgcccaacagaattcttgtaacttgtacagtgtaggtga

SEQ ID NO: 3440 - DNA, 367 bp, Zea mays
  misc_feature (352)..(357): n is a, c, g, or t
gaatgcttgccattccggggctcattgcccctagcgaattgcaagacgagatggtagattcgtagtgttccttgttttgattctgctttctctaatgtagcttcctgtttgttggtccggcatcggaatacctctggagccctcgacgtccaagttttcttccagggtggtgaaagaaggtgcctgctgtaattttatttttggttacctccacatgatgctgattccaagatttgtggttgtagacagtcagttttgccgcatgactgctgctgggggtctctcagcagctgtggttgcctggatgtgttagcagcggctcttgtgctcggtgtactttgctaacattggnnnnnntactttgccc

SEQ ID NO: 3441 - DNA, 357 bp, Zea mays
tcgccttcctgcaaaacccgaatcagcactaaatcgagcgggggcggccaaccgcgcgcagcaatgaacaagtacatggggagggagggcgcctcacatgtcgagcaggacgtcctcgtcctcctcgccggtggtgacggctacctcctcaagccgcacgatgggagccacctgggcgcccgtgtcctcctcctcccccgcggcggcggcggctgaggcgtcctcctcctcctcacccgcctctggccgctccacgacaggctccttgtccgccatgaggtgggtgatcgcggcgcgattcgattcgaacttcgaagaggatgcgacggcggggcaagggaggaattctccggaagc

SEQ ID NO: 3442 - DNA, 424 bp, Zea mays
tttctttgttacagaagtgttcaaggcttttcaagttctcccctagaaaaaagggtgagcagtcatcagaacaaccatcagagaggaatatatcttttggtgcaagactcgaggaagcaacacagagcgatggagattatgtgccaactcctgtctatgagatagcccacgattctttcaatgcagaggatgagctcccttctgacggtgaaaccagggagaatgaagagtctgaaaggcatgacatagctgataatgcccagatggagtcttctgttggtgtagcagataacagtatagatattctcggtactaagtcatttgatggtgctaacgacatggcagttgaagcaactattgtctctgttgatcaaaatggcgaggactctgtagttcctgctgaagcaggtgtagagcctgaaac

SEQ ID NO: 3443 - DNA, 516 bp, Zea mays
ctgcaggcaacgacagtggctgcaaccttgccggccggcgaggcgagacgagacgactgatcgggcagcttgcatgtcgctagttgggtatctccctcccggcaagccgacggcgggcggattattgccgctgacgtctgacggtgatacatggccgatcaagaagacaagaacgaaaacaaattcaaatacagtagaatagagaatagatccacatttattcttcgctatatatatatagctggccgtcgtcgtcgatcaggcgccactaatggtccggccgccgtcgacgaagatgacctgcccggtgacgtaggacgccgccggcatgcagaggaacgacaccagggacgccacctcctccggctcgccggtccgccgcagcgggatgcgtgaccgctcctgctccaccaacgccgccggtagctctttacccatgtccgtcatgatcacgcccggcgcgacgcagttcacacggatcctatcgcaggcccactccacagctagacttctcgt

SEQ ID NO: 3444 - DNA, 361 bp, Zea mays
ggccgtatctggaaggagcagcagaatcctgactcaggagcctgcattcccaatttgttcagctgagctcagtaacaagaggatggatccaggtgtatattgatacggccgatgtgtttgtgtgagcgtgtgcctgtgctttgcgttttgtcctgccaagctgccattgcagcccgccctaaattagtcagggcgtatttactgttggcaggataatgaaaatactggcttactccttttgtgggctgtgactaagctcccatgaatctcacgataagcatttttctcgatccaatggtgtatactgtatcgttttgggctgaaggctgcagcttttttgctgttatgtttgtctcggtgt

SEQ ID NO: 3445 - DNA, 933 bp, Zea mays
gaggaccaagcaatcactggctgacgtttttcactttccgctcggtctgacttggaaggcttcttaagctccgaagcaaccgatgagcttcttaggagcgtggccggtggcccggtacttggcagccatctcctcggccttcaggacctcctcaccgcgttttgcctccaccatcgctcgcttctcttcggcttccttgtgtatcattgcaaccttgttcttcatcttctctgcatattcagccttcttcttttccagttgttcctgaacatgaataaaccatataagctgtagctaagaggatatcaccttttagggggggaggggggtggcatattagttccactggatctattcttttccaaattcctctataattgattaattgttatcggtggctcaagtctctattaaaatatgggacagacttaaactagtaagtgcacagacgataaaaaaagagtattccttcaatgacatacctcaatcttcttcagttcagcttctatgtttgctttctttgtgttttcccatgaaagaatagcggatactttcttagcagccctgtcacagttatgcccattaattcaagttaggaatttccacatctcctgcctatggtttatatcaacttctattggatattgagaatctaaatatgatatcttccaattgacatactatgttatcctgtttgcccttatggctttttctcgttttagtttgaactgagcagaattttatatccacactgccctggctgtaatgctagaaatatcatccacagaaaccagtattaaacttccaatttgctttgatgaaagaattatagatgactgaagaaagcattgcaaaaattgcatctactgcaacagacaaataatggtttcactgaagacgatttcaggggaatcggaaaaggtgagaaacata

SEQ ID NO: 3446 - DNA, 267 bp, Zea mays
ccaccgacggcggcgagagtatatatacacacacacctgacgcctctgctgctgctgggatcaacgcggcagcttagtgacgacgacgactcttctgtctctgcgttgattaatggacagtaacagatccatggcgacgagcggcgtggctccgttcgtggccaagacgtaccgcatggtggatgacccggcgaccgacggcgtggtcgcgtggggcagggacaacaacagcttcgtcgtggccgaccccttcgccttctcgcagac

SEQ ID NO: 3447 - DNA, 650 bp, Zea mays
  misc_feature (629)..(639): n is a, c, g, or t
cgcgcgggcccttcccttcggagcagtcagcgtgagagatggggaggcagccgtgctgcgacaaggttggcgtgaagaagggcccgtggacggcggaggaggaccagaagctcgtcggcttcctcctcacccacggtcactgctgctggcgcgtcgtccccaagctcgcaggtgagaatttcccgtcaccatgtatgcatgcgatgcgatgtgtgtgactgctgggcggtcgtttctgcttcgcggcgctccggttgcctgaccttgactggcatcgtgtgtgtgtgtgcatggttcgtgcgctgcagggttgctgaggtgcgggaagagctgcaggctgcggtggaccaactacctgaggccggacctcaagaggggcctgctctccgacgacgaggagaggctcgtcatcgacctgcacgcgcagctcgggaacaggtgcgtgcgtgcgtgacttgttggactgcgaaattctccatggttttcttgggctctcttctccatcaagcggcctcgggtcgggtctcatgcgacgcggacggactggtcctctgttttcacgcgcctcacaccgcacgacgcaggtggtccaagatcgcggcgcagctaccgggcaggacggacaacgnnnnnnnnnnncactggaacac

SEQ ID NO: 3448 - DNA, 650 bp, Zea mays
  misc_feature (26)..(26): n is a, c, g, or t
  misc_feature (186)..(186): n is a, c, g, or t
  misc_feature (196)..(196): n is a, c, g, or t
  misc_feature (245)..(245): n is a, c, g, or t
  misc_feature (257)..(257): n is a, c, g, or t
  misc_feature (508)..(508): n is a, c, g, or t
  misc_feature (519)..(520): n is a, c, g, or t
  misc_feature (523)..(524): n is a, c, g, or t
  misc_feature (528)..(535): n is a, c, g, or t
  misc_feature (538)..(546): n is a, c, g, or t
  misc_feature (548)..(549): n is a, c, g, or t
  misc_feature (551)..(553): n is a, c, g, or t
  misc_feature (555)..(562): n is a, c, g, or t
  misc_feature (564)..(569): n is a, c, g, or t
  misc_feature (571)..(573): n is a, c, g, or t
  misc_feature (576)..(579): n is a, c, g, or t
  misc_feature (629)..(639): n is a, c, g, or t
cgcgcgggcccttcccttcggagcantcagcgtgagagatggggaggcagccgtgctgcgacaaggttggcgtgaagaagggcccgtggacggcggaggaggaccagaagctcgtcggcttcctcctcacccacggtcactgctgctggcgcgtcgtccccaagctcgcaggtgagaatttcccgncaccatgtangcatgcgatgcgatgtgtgtgactgctgggcggtcgtttctgcttcgcngcgctccggttncctgaccttgactggcatcgtgtgtgtgtgtgcatggttcgtgcgctgcagggttgctgaggtgcgggaagagctgcaggctgcggtggaccaactacctgaggccggacctcaagaggggcctgctctccgacgacgaggagaggctcgtcatcgacctgcacgcgcagctcgggaacaggtgcgtgcgtgcgtgacttgttggactgcgaaattctccatggttttcttgggctctcttctccatcaancggcctcgggnnggnnctcnnnnnnnncgnnnnnnnnngnncnnngnnnnnnnncnnnnnncnnngcnnnncgcaggtggtccaagatcgcggcgcagctaccgggcaggacggacaacgnnnnnnnnnnncactggaacac

SEQ ID NO: 3449 - DNA, 909 bp, Zea mays
  misc_feature (898)..(902): n is a, c, g, or t
tgatttgtatgaattcaattactctgtatgcgcatcatcttcatatatctatatctgctagattattgtatgacaccccttcctgttgctcactggaacatgtttgtacctcaacttgggagatatttttgtacggctaggccttattctaagaaaacatcaatttaaatgtgggacagagagtttaaggtaaatgaaaatttgaatatcctgttgacttgacacatcattcatttgtgcctagataaaaaggaacgccttcgacttatctactactactacaaacacaaatttcttttcttgaactctacctaccgtttattgatctgatccttttacttgttctattatgaatctgaatttggaactctacctaccgtctattatgaatctaaatcgcttttcaatcattggaaaattctatatatttacgtgcgcacacgacttgcaaagatgatattggtctctgctgcaggacgagtcccaagatctctacaaaaggcagcagctcagggagctggcaatgctgaactcaaccctgagagaggacagccctcatccggggagtgtctctccattcagcaacggtggcatgaagcgtgcgaaaacaggacagtagagaaaacaactatgctcccatatctggccccgtcgtcatgggaacgccatgggcatgccgcatgcgtgaaggaaggccatgcgccttcgctggcggagtccggtatcttctgctagctttcacctccggacaggggaaagatgagatgagatgagatgagatagtcgcggacccttggttggatccggcgttggttgttgtatggtctagaacattcgttctatttgttattgacggttaaccctagtatgttggtgagctgcaacctgcaaactgcannnnnaactagc

SEQ ID NO: 3450 - DNA, 909 bp, Zea mays
  misc_feature (273)..(276): n is a, c, g, or t
  misc_feature (278)..(282): n is a, c, g, or t
  misc_feature (284)..(291): n is a, c, g, or t
  misc_feature (294)..(300): n is a, c, g, or t
  misc_feature (303)..(303): n is a, c, g, or t
  misc_feature (306)..(306): n is a, c, g, or t
  misc_feature (308)..(310): n is a, c, g, or t
  misc_feature (312)..(320): n is a, c, g, or t
  misc_feature (323)..(329): n is a, c, g, or t
  misc_feature (332)..(336): n is a, c, g, or t
  misc_feature (339)..(344): n is a, c, g, or t
  misc_feature (348)..(350): n is a, c, g, or t
  misc_feature (352)..(369): n is a, c, g, or t
  misc_feature (372)..(393): n is a, c, g, or t
  misc_feature (562)..(562): n is a, c, g, or t
  misc_feature (566)..(566): n is a, c, g, or t
  misc_feature (749)..(749): n is a, c, g, or t
  misc_feature (760)..(765): n is a, c, g, or t
  misc_feature (777)..(781): n is a, c, g, or t
  misc_feature (837)..(837): n is a, c, g, or t
  misc_feature (898)..(902): n is a, c, g, or t
tgatttgtatgaattcaattactctgtatgcgcatcatcttcatatatctatatctgctagattattgtatgacaccccttcctgttgctcactggaacatgtttgtacctcaacttgggagatatttttgtacggctaggccttattctaagaaaacatcaatttaaatgtgggacagagagtttaaggtaaatgaaaatttgaatatcctgttgacttgacacatcattcatttgtgcctagataaaaaggaacgccttcgacttatctannnntnnnnnannnnnnnnttnnnnnnnttnaantnnncnnnnnnnnnatnnnnnnnatnnnnntannnnnnctannntnnnnnnnnnnnnnnnnnnctnnnnnnnnnnnnnnnnnnnnnnaaatcgcttttcaatcattggaaaattctatatatttacgtgcgcacacgacttgcaaagatgatattggtctctgctgcaggacgagtcccaagatctctacaaaaggcagcagctcagggagctggcaatgctgaactcaaccctgagagaggacagccctcatccngggngtgtctctccattcagcaacggtggcatgaagcgtgcgaaaacaggacagtagagaaaacaactatgctcccatatctggccccgtcgtcatgggaacgccatgggcatgccgcatgcgtgaaggaaggccatgcgccttcgctggcggagtccggtatcttctgctagctttcacctccggncaggggaaagnnnnnntgagatgagatnnnnnagtcgcggacccttggttggatccggcgttggttgttgtatggtctagaacattcnttctatttgttattgacggttaaccctagtatgttggtgagctgcaacctgcaaactgcannnnnaactagc

SEQ ID NO: 3451 - DNA, 571 bp, Zea mays
ggcgctgtctcgacgcatggcggctcccgtcctcgtcctcatgctcctcctcgtcgccacaggtgcccgactcaactcctcgttgctcgtcagtgctgcttgagtgacccttcaaagtaaagttcacagtaatgcgacgcgcttggtgttgtaaacttgtgatgcttaatttgagtgtggccggccggtgcagagctggggacgaccaaggtggcggaggcgaggcactgcctgtcgcagagccaccggttcaagggcctgtgcatgagcagcaacaactgcgccaacgtgtgccagaccgagaacttccccggcggcgagtgcaaggcggagggcgccacgcgcaagtgcttctgcaagaagatatgctagtagtagcctcggctttgcttgctggcacaagcaggtcgtcggcacgcaacgcaattcaagcatcatatcggtcctcctcccgcgttgctgtctactcgaccccgttttctctttcgatcgatttcgttgtttcctgttgttttcttcttttcccgcgaataataagctccatgggatctcactgttgtactttctgcat

SEQ ID NO: 3452 - DNA, 450 bp, Zea mays
ctgcctcccattccaccaacacctccaactccaacagatcaatccgtcaactttgctggccaaccctgtacataattacacggatgataatgcccatcacatcctggatcatcatcctctgttgcacagctcaaggcagcatggatcatcttgtccggacgaacccaaccatgttaatctgatctccatgtgttcggcttcggccaccttcaaccaactcctcagattaacttgtaggatgttttttcacatgatgctgcatccagggtcctgttcttgctgcgggtacgctgcaggataggagtaggcggcggggtagggcggcatggcgttgtactgctggtaggcggcagggtacgagaccgacggcatcgcctggtaatggccgccgtagcccccaccgccgccactgctcttgccgccgctgctctctttgctctccttgccctc

SEQ ID NO: 3453 - DNA, 904 bp, Zea mays
ctggtctggatagcagattttggacaaacttgtcacttcttcatttcaaaatacaatcagacaaaaaaacgaaagcgtacatactggaactcaccagctcaggggccaacttttccggagtaatctttgcagctgaaagaagtacaccacgagcatcagatcacagaaacacaaaaagttgtatttgcatgccaatggtttcggtagtgaatgaaagcgtacgtgactgtgattggaagctcttgttgtaactcccggtctccttgaacagctgctcgaaatgggtcttgcagtacggcactccttcgaacgaggaatagttgctcagctgtcaaaggcgaaaaggatgaagacggagattgtcagacctcgcacagctgcttatctttgcctagacatcgacaggtcgtcctaagtagaagatcagataagagtgtccatttgcatggattccctgcccaatcctctttcaccaagttagcgaatgggaaacggacaaagtcatgacctctcctgggcgtagaatttttcctggtactaggaaactcgcaccagatctgttcgctgcggcaattcgcagatctactacccgatgctacattgcatcaccctacagatccatccacctacccattagaagagagaagagcatgggcaaggcaaagggaacgtactgagagggtagacttgcagtgctggcacttgaagcaggagcggtggaagacgacgccgtcggtggagagctggtccatcgggtacaccgtcttggtgcacaccttgcacttctgctgcgtcccgctaaacatcttcctcccgagcaccggtcaaccccccccttcggtctctgtctcacggcggccggcgagatctgagaggccgccgatccggccttggcctgcgcgcg

SEQ ID NO: 3454 - DNA, 929 bp, Zea mays
  misc_feature (33)..(33): n is a, c, g, or t
  misc_feature (45)..(45): n is a, c, g, or t
caaatcatgaggactcctttttctcttccgcgncctcctcaaatntctctccagggacaagctcaggaacgtcatcatcatcgtcctgaacagccccagcgctggcaccagcctctgcaccagaagcaccagaggcctgcttctggaattgctctgcgagcctccgcagattgtccaggttgtcaggacctgaaccggaggaacagtcgaaggtaaaacaaaatcatttatagtacagcatagttatggagctcacaagtcataattatatataagatttcagtgattctcaagtactgtgtagcaaaaaggatgggatcaagaacacaaaaggagatatatctaataatataggttttgaattcaataggtatacatgagtaaagagaaacataccaagctggttgataatcgacggaagcagatcttgcagctctgttcaaataagaaaaatgcttcataagaatactgttgtgctgttgtgcaaatctagctcaagagaaattttctccctgaaaattcaaattgacaaaagccatgcataaccaaagcaccagctgccagtgtgacaggattataggacatcattactacctagttaagtagaaagccagcacaacggaatgaataatattatgccatcaataatattatgccattaagagcatcttaacagaagctagttaagcagataatgcaagtcatgagaacatactctttgtctgtggagttccactgaccacccatgtattagcaccaattgacgcttgcactggaggggaacccacaaaatatttttagaaataagtgaagtactaatcttgttgagtactggagtccggagtatcatacctttaggatttacaaactgaataacaacatcatccttaaagatgttgacctcttcaataccaggaatgctgttcact

SEQ ID NO: 3455 - DNA, 400 bp, Zea mays
gtgagaagactagcccgcctccaaaatctgaaagagaaagactagagagatttggagctttgctctctagcactttgagggccgagcatccaaaaatattaaggctgttgagacgctgcagggcagaaggtatcttgaggcaaacgatcttgtcacaacatactagctctaattcctccagagcaagggagttggaaaggaggcgctttaacccattccatttaatgctcacaaaggacaaatgtaaacttgttaggcttctcatgggggcaagttcaactgtgggacggagagcacaacaacgaagtttaaggtaccgaagtgaatttcgaaccccatcagataaaagtgagcatgggaattcatatattctccttgtatggaacaaccagagggtgac

SEQ ID NO: 3456 - DNA, 816 bp, Zea mays
  misc_feature (380)..(382): n is a, c, g, or t
  misc_feature (391)..(402): n is a, c, g, or t
  misc_feature (405)..(407): n is a, c, g, or t
  misc_feature (409)..(410): n is a, c, g, or t
  misc_feature (412)..(413): n is a, c, g, or t
  misc_feature (415)..(426): n is a, c, g, or t
  misc_feature (428)..(433): n is a, c, g, or t
  misc_feature (435)..(435): n is a, c, g, or t
  misc_feature (438)..(442): n is a, c, g, or t
  misc_feature (445)..(452): n is a, c, g, or t
  misc_feature (454)..(455): n is a, c, g, or t
  misc_feature (457)..(461): n is a, c, g, or t
  misc_feature (463)..(463): n is a, c, g, or t
  misc_feature (465)..(465): n is a, c, g, or t
  misc_feature (467)..(467): n is a, c, g, or t
  misc_feature (470)..(479): n is a, c, g, or t
  misc_feature (481)..(481): n is a, c, g, or t
  misc_feature (485)..(488): n is a, c, g, or t
  misc_feature (490)..(525): n is a, c, g, or t
  misc_feature (527)..(532): n is a, c, g, or t
  misc_feature (536)..(556): n is a, c, g, or t
  misc_feature (558)..(560): n is a, c, g, or t
  misc_feature (562)..(565): n is a, c, g, or t
  misc_feature (567)..(587): n is a, c, g, or t
  misc_feature (589)..(636): n is a, c, g, or t
  misc_feature (638)..(638): n is a, c, g, or t
  misc_feature (640)..(648): n is a, c, g, or t
  misc_feature (650)..(693): n is a, c, g, or t
  misc_feature (696)..(706): n is a, c, g, or t
  misc_feature (708)..(771): n is a, c, g, or t
  misc_feature (773)..(773): n is a, c, g, or t
  misc_feature (775)..(775): n is a, c, g, or t
  misc_feature (777)..(813): n is a, c, g, or t
gcgccgcagcgcagcttccgccgctgacgacgcacactggccgcgggcgcgagacattgtccggccgtgtcacgcacgcccgcgtcctcctcctcctccgccgccgcgtaacgcacggccacgacgtgtccgtggtcgtaagtgctgtgtctgtgtgtaccaataaataagccccgttttgcttcgtccagaacggtccagtgctacgtgtagtgtatctgtgttgtgatttgcgaattggattattgtgggtcgtctcgtcgaggtctctcgggtgtcgggtgggtctgatgcgatccatcagcgtcgtgtccgaataaaagccacgccgatgcgccggctgacgggcatctggatgtgtgatttctgaacaagaaaannnatgcctcannnnnnnnnnnntcnnncnngnntnnnnnnnnnnnnannnnnngntcnnnnnttnnnnnnnntnnannnnntngntnctnnnnnnnnnntntgtnnnntnnnnnnnnnnnnnnnnnnnnnnnnnnnnnnnnnnnngnnnnnnaaannnnnnnnnnnnnnnnnnnnnannnannnntnnnnnnnnnnnnnnnnnnnnntnnnnnnnnnnnnnnnnnnnnnnnnnnnnnnnnnnnnnnnnnnnnnnnncntnnnnnnnnntnnnnnnnnnnnnnnnnnnnnnnnnnnnnnnnnnnnnnnnnnnnnttnnnnnnnnnnncnnnnnnnnnnnnnnnnnnnnnnnnnnnnnnnnnnnnnnnnnnnnnnnnnnnnnnnnnnnnnnnncnanannnnnnnnnnnnnnnnnnnnnnnnnnnnnnnnnnnnnctc

SEQ ID NO: 3457 - DNA, 695 bp, Zea mays
tacgggggcatatttttgtacccagcagaccagaagagtccaaacgggaaactacggtataacaaaggcaacaatcttttttttactaactattattactactcccggaactgtagtttagcttcctgtcctcacattggttggttctatgtggaattgcagcgttctgtatgaagtcttcccgatgtcattcctgatggaacaagctggaggccaggctttcacaggcaaacaacgggtgtgtttcagtttccctttctcagaccccaatccccaactgaaaaatcttgatgctagagctatcacatctgcctgagatatcagggggatttttcaacacttttacaggttgaaattattgagaaaagggcactattttaacatgccatgtttttttttaccagtggttggcattgcatataactgaaaatgctcctgctaaatttataatgcaggcccttgaacttgctcccgctaaacttcacgacagatccccagtgttcctcgggagctacgatgacgttgaggagatcaaagcactgtacgcttcaatgtcaaacagcggttgacctttctgcctgaggaaacgagcgagatcaaaagcaccgtacgcttcagagtcaactgcttgatctttatagattgtaataaaataataaaagagtttgtaaaaaaaacaacaacactgcttgatc

SEQ ID NO: 3458 - DNA, 405 bp, Zea mays
gctcagaaccacctgaagaaacaccctgtcgaacctcgaatcccttcgcctcaacagacgaactctccagatcagatggcagaccgttggcgactgattccaccggctcctgcggttcaaacactccctgtggcccttgctccaggctagaaccagtgcccatgctaccagcttcatgtccctggtcaatgcggcgccttctcttcttcgagatagcatcctcgagctccttcctcatctcccgctgggagatcagctgacgcatgaaatcagggttctgcatgacgcgtgccatgaatgccatcatctgctgctgcttctgctcggtatcttgtaatttctcttccatggcctgtagatctgatctagtattttggtgctcctgcctcagcttcactacctcag

SEQ ID NO: 3459 - DNA, 426 bp, Zea mays
ttgagatgatgcctggtcctgagttccccctgccagaagaaggtgatgatgggaccaccatgtacaacaacaacgacgaggaggctcagagccttccaggcatcatcaactccatctgggagcagttcctggtaggcagccctctatctaccgataatgaggaagttgattcagcaggcggactatatgcgcaggaggatggatggagcaaagtggggaacatcgctaatcttacagaacagatgggacttgtatcatcaacaaatcaccgggactcagggaatgggctgtactagtatcttaattaatacagtagactgaggattctggtaataagtgttgcatgctcttttctgatttaattattttccccccttttcgccaactcaatatgggaggtgggggtgaggagatacaaaggcatgt

SEQ ID NO: 3460 - DNA, 413 bp, Zea mays
agcagatcaccatgcctgttctcctcagcagtccatgccctcgtccaaacagcccaggcagtggggcttgcacctgtctcatctctgacaccgtcgagggtgttaagcatagtctggtatgttggtagagcttcctcggtaatcatgtctcccaccaaacaaacaaaataatcatcagggatttccttggcacgttctctgagctccttaacttcatcatgaaatccttcagatgctgggtcagggaggaaatcctgtggctgccaacacttctcgactggcttgagatgcgtcaagatattatctctagcccaatcatcaagcgacttgaaaatttcaatcttgtgaggtggcattgaatgtgtcacctggacatgtacctcccttggaggagcaaatggcttcttattctc

SEQ ID NO: 3461 - DNA, 417 bp, Zea mays
tgatgtttgacgggcaggacgacaagctgttcgagcacttctccatggtcgcgcagaggcttggcgtttacaccgccagggactacgccgacatcctcgagttcctcgtcgacaggtggaaggtggcgaacctgactggtctgtcgggtgaagggaacaaggcgcaggactacctttgcacccttgcttcaaggatcaggaggctggaggagagggcccagagcagagccaagaaagcaggcacgctgcctttcagctgggtatacggtagggacgtccaactgtgagatcggaaacctgctgcggactgcttagacaagacctgctgtgctgtgtctgcgttacatagttctccaggttttgatcagatggtcccgtgtcgtcttatagagcgataggagaacgtgttggtctgtg

SEQ ID NO: 3462 - DNA, 289 bp, Zea mays
ctgtcttctgtgacggaaacactgaacatcatgacttcatcttctaccggccagactccactgagtcattaggtaccatttcatggtatggatcataatccccacttttttcagtggtggcgattaacgagtttaggaacagcaaccctggtatcatacgggttattctttttgtagccttttggagagttctatcggttttggattcggtagtttatgaaggcttgttgatgagtttgagctcgaatagcttttgaaacagccggatgatgccatctttaataaacca

SEQ ID NO: 3463 - DNA, 719 bp, Zea mays
gctgctgctcctttaactgtaataagatgtcactgaccatgccttcaagatcagacgctgaaaggttacttatctatttatgttgacctagttgcacaatctgttgtgtctaccaggcgatgatgagtgtgaagaggcatttacgtggccctggagcaatccctatagggaggccttccattcacccttctccaattgacctgaaagggaaggcttatgagtaagtccacattgttcagggctttgatacctggtcctgcttttttttcccccgataagtagaggaaaggatgcgacctggaaggaaggtgaacgggattgactttgttcctgcatcattcaggttgctgcgagagaaggcttcaagcttcctccttgacgacttctacaggactccaggaggcattcagttcgaagggcctggttcagatgcaaagcccatcacgctgaccattgagaaccaggactacatgggtgacattgagatactgaaagagtaccttggcaaggttgtgatcgggaatcctttcatctgcttccaagtagtttcggattaaaaataaaaagcttttcatttaagaagcaggtcccttcctaacatttggcatgcccaacgatgatgtgatcccaggttaggaccatggtgaagccagggtgctcccgggagatcctgaaggcggcgatcagttccatggtgtcggtgacggatgtgctgactg

SEQ ID NO: 3464 - DNA, 646 bp, Zea mays
acgtaactgcagtagcattcttgatttcacatatggtacgggaaggacgaggtcagcgagcatgaggggatccgggtgaccgcggcaggctgtcgctggagctgcttgtggatgtccctgacgatgtggaacaccgcctcgggctgcgctagcctcagcgcgttacgcgagtatctcctgagctcatccccgtctgtgctgctgctgctgaaccagcgggcgacctgtctcgcggcctcccctgggtccttggagaacacgccggcaccgttgtccacgacataagggacgttcccgacttcctgcatttttacagtaggagcaaaaaaggttgctgatttgctatgcttatacagttatgattccagtaaccaaattagcgatcctgctacttgacctgtccagggatgaagtcgttcaggatgataggaagccctcgtatgagtgcctctgcgatggtaccaggaccagcctgcgaatgccagggggggaaaaacacgcatcgttcagtcagcgcaaaagagcaacaccgcaagcacgcaatactatactatagtgatcctacacaaggcgaagcagtcactgacacagaggagaggacatacttttgtgatgatgcagtcgcaggcggccatccacttctcca

SEQ ID NO: 3465 - DNA, 457 bp, Zea mays
tcctgcggtgctggcacgggcgcggcgacgcctcgcccctcgacgtcatcgccatcaacgacaccggaggcgtcaagcaggcgtcccacctgctcaagtacgactccacgctcggcatcttcgacgccgacgtcaagcccgtcggagacaacgccatctccgtcgacggcaaggtcatcaaggtcgtgtccgaccgcaaccccagcaacctgccgtggggcgagctcggcatcgacctcgtcatcgagggcaccggcgtcttcgtcgaccgcgagggcgcggggaagcacatccaggcgggggccaagaaggtgctcatcacggcgcccggcaagggcgacatccccacctacgtcgtcggcgtcaatgccgaccagtacaaccccgacgagcccatcatcagcaacgcctcctgcacgaccaactgccgcgtgccattcgtcaaggtgctcgacca

SEQ ID NO: 3466 - DNA, 615 bp, Zea mays
  misc_feature (567)..(594): n is a, c, g, or t
  misc_feature (599)..(607): n is a, c, g, or t
gaagtatgatccaggccgcatcttatgcaacatgtttttcgtgtcattttcattgtggttgtaatgcatgcatgtttccatttgggactatgtttcctttgtggtatgtttgattgttgacgtactgtggaggccctatcttcacactataaccattaccttccaaagaatgttcacatctaatggttttactcttctgcttggatggcagtttgttggagacaaggttgcgtatgccctgtctcagggactaaaggtcattgcatgtgttggtgagacccttgagcagagggaggctgggtctaccatggatgttgttgctgcacaaacaaaagcaattgctggtacctttcatttactctcagtccagtgattgtgtagtctttgtctatgctcttcattgttagtttttttcttatgataatgaagagttgttgattgattatattcaagtgcttctactgttagctcccattcatataatactaagattatataaatgtagctactagctagacatctttgttgaacacttctcttctggtgaattttgttttgtcctgttcnnnnnnnnnnnnnnnnnnnnnnnnnnnnttggnnnnnnnnnctacatgt

SEQ ID NO: 3467 - DNA, 409 bp, Zea mays
agagtgagtccagaattcctggatacataattgaacgaaaatgctgggccccttgaggaaaataagtccccactgccacacaaacgtgtagcaagatcactgataagtgcttctcccttaagaaacttgcgcacatccatagagaatcttgtgttcatctcagcccatcttttccaatgagggaatggaaattgcacattagatatgtcaagcggagaccaaggatctgcaatgatcttagtctttgaaagaacaggatcaaatgctatggcttccagaagtggaggccgtgagaggccctcaccacctggacctctgacgaggaaaggagcattgatgaagcagaacccatcaacatggaagtcgagcacccaatggcggaggctgtccaaaatcagcttctgagtca

SEQ ID NO: 3468 - DNA, 495 bp, Zea mays
tcttgctgtacgctcctttgctatgtcatgtccactaatggtcataataataataaaacccgtaaaattcttaaagtatcatatctaaagtaaaattggaagcacttaacttcgtctttttttttgtaggtcaagccatccaccccgtatgatactaccgtgctgccgaaggtgtaattactcagttgtttttgacatgccaattgctgagttctgacttggcaaggttgagcataagtctttcttcattttgggagttatcacagagccagtttggcagtgctgtagttttggttttacctactctttgtagaagaaaagtgaagggtggatattatggaacaaaatatatacctacggcagcacgcagcatgatgaaacatatttaaaaaatttgggtgctctaccacatgcccgtggaataaaacggatgtaaactcagtgcacttataacaccctaattgtggttttgtttgtggttcaaacttctatacc

SEQ ID NO: 3469 - DNA, 592 bp, Zea mays
ggtgcaagccccactgcttgggctgtttggacgagggcatggactgctgaggagaacaggcatggtgatcttctcaacaagtacatgtacctcactgggagggtggatatgaggcaaattgagaagacaattcagtatcttattggctctggaatggtaacatattctctctttttatccattttttcttacctatttaacatggcaagtctttcttgtacattcatgcttctgaagtgtttattttcggttgcttggagtttggttctttggtgaattttttttatattaactcactatgttgccatttttttgagcaactattgttctgaaattttgaaccgttgttctatttcagttgggtcgatgattatttctcttttgtactttgtttttttaaaatctatgctactgattataactatgtaggactaatatgtacttcctttactgagtccttttcaggatcctaggactgaaaataatccttatcttggtttcatctacacctccttccaagagcgggcgaccttcatctcgcatgggaacactgctcgtcatgccaaggactttggcgacttaaagctcgcac

SEQ ID NO: 3470 - DNA, 695 bp, Zea mays
  misc_feature (683)..(686): n is a, c, g, or t
gttaagagtccagtgaacaagtggcgatgcggtgcggctcctatttcggtaagatttgtgttgacatgcctaatagtttaggataagtacgaaagtagcgcctaacccatgtctacccatgcagtctatgatgactgtgcagcgatggtcgcgtggcccttcagccacccaaatcggaaagcctgctgttcacatggctagcgttgacttgaaaggaaaagcatacgagtaagtttaagaatagccttttgtgaattttcatcagtgggtacacgtaccatggcgtggtctttgggcacctgccttagcttcttatctgcaagtatcttgtacatatggcctctaatctcagtaacgcttacttttgcagtgtattgaggcagaattcttccaggtttttgttggaagatgtctacaggaacccaggtccgctccagtttgaaggaccaggtgccgattcaaagcctatctcactgtgcgtcgaggatcaagactacatgggcaggataaagaaattgcaggaatacctggagaaggtagttctgatgcccccgctacgcatttttgcttcaaactcacacgaggccgcaactgactgacgagttttgccttcgccatgcctaatctgttttgctctgtggtgcaggtgaagagcattgtgaagcctgggtgctctcaggatnnnnttaaggcgg

SEQ ID NO: 3471 - DNA, 729 bp, Zea mays
  misc_feature (679)..(682): n is a, c, g, or t
  misc_feature (717)..(717): n is a, c, g, or t
gccacatcagatcaacaagatgcgtctggaaataagctgcttcttgatattggtctttggctgactcacaagataaaggtacataactatataactaaaatattcttgctgctggatttgagccacttatcttatgttgtagtttggtattcactgtctcgggtattgcaaatgagctaaatggctccactatactgtatgtggttcttgaaagttttgcttaataggccttgtgctaattcctcgtaggactacttcaaaagcaaaaagatggagatgacgattaaatacataggtagccatttgtaactcttatttttgctattgatatagttgtaacacatttctagattggtctgtgacaatattccatcggaattggcagatcctacatacatggtccgtgctattccaagcaatgcatcagacaatgtctactgtacacttctagcccacagtgctatccatggtgcaatggcggggtacagcttcactgttgggatggtcaacggaagacatacctatatacctttctacgtgagtaataaccccttacagacactacggtatttttctgcttgttgactgaatgcttgtcgtgacatctgctgtatagttctgttacatctgcctaaattcagcaggcgctgtgcgtgaaccatgtcacgaaacataactnnnncaattaaattaaaaaaaagtgcattactgatctgnacactgatgatg

SEQ ID NO: 3472 - DNA, 425 bp, Zea mays
tacgctcaaaattaccgtcaattccatccatctccagtctcaaaccctccaaatatgtggtctcctcgctgaaaccactctacctagcaccgctagatggtccgcgcactgccgagcttaagtctcggagacagccacttgagttccgttgttctgcttctgctgctgatgacaaggagtcaaagactcaggtggtgccagttcagtcggaaggcgcacagaggttgaagatctccatctatttcgccacctggtgggcgcttaatgtgatatttaacatttacaacaagaaggttctcaatgcattcccttacccctggctcacctccacactctccctcgcctgtggctctgctatgatgcttttctcgtgggccacccgtcttgttgaggcccctaagaccgacctggacttctggaaagtt

SEQ ID NO: 3473 - DNA, 534 bp, Zea mays
tctgacaacgtctactgcactctgctggcccacagcgccctccatggcgccatggcggggtacaccggcttcacggtcgctccggtcaacggcaggcacgcctacatcccgttctatgtaagtcgaaggccgaatgcagttgagcacacagcttcttgaacatggcttgttctgaaaccttgatgggcaatcgatctcttgtttgcagaggatcaccgagaagcagaacaaggtggtgatcacggaccggatgtgggcgagggtgctgtgctcgacgaaccagccctgcttcctgagccacgaggacgtggagaacatgaagcacgacgacgacgagcaccaccacatgcacaacacgcagctcctggaaggcgggagctcgccggtgtccaaatgcaatggctcggcagcggcagtgtgaggggcacgagaatacgcaaggatatagatatatatagtattaagcatgtagctatggatgttttttttcctttttcttttgcttttttgggtgctggcgttgtagagagtatt

SEQ ID NO: 3474 - DNA, 430 bp, Zea mays
cgccaaagaacgccaatgtgacatcaagcccatcagggccagactccttgagcacctcatgacggtacttagcagcaaaggctgcaccagtggcaacaggaatgccctctccgatgaaggcaaagcctcccaggaggttgtggggagcagagaacatgtgcatggaaccaccctgtccacggcagcagcctgtggccttgccaaagagctcagccatgacagaacgtgccgggacacccttggacagcgcatggacatgatcacggtatgtgctaacaacacagtcagcttggttcagaagtttgatgaagccagtggagacagcctcctggccattgtaaaggtggacgaaaccaaacatcttgccacggtagtacatttgtgcacacatgtcctcgaatacacggccaagaaccatgtcctcatacag

SEQ ID NO: 3475 - DNA, 427 bp, Zea mays
gctttcttgaacaaagccgtcaagccagtgcttgtaggtgggccaaagatgagggtgtccaaagcatgcgaagccttggcagagctggcagatgcctgcggctatcccgtcgccgtgatgccttctgcgaaggggctagtgccagagcaccactctaggttcattggcacgtactggggtgcggtgagcactccattctgtgctgagatcgtcgagtctgccgatgcctacctatttgctggccccgtattcaacgactacagctcggttgggtactcgctgctcctcaagaaggagaaggccatcattgtccaaccagagcgggtggtggtcgggcacggacccgcgtttgggtgtgttctgatgaaggatttccttcatgcccttgcaacccgtctgaagaagaacactgccgcgtatgagaact

SEQ ID NO: 3476 - DNA, 525 bp, Zea mays
ctgcatctgcaatgtttgagcctgaacctgacaaggactgcctgcaccatcaactctcggttatgatcgacatttctggatgatgccatggtctagacagttagtaagttattaatactgatctggcatctgtacatcagtcacagccatctactgctccaggttgatcggagcgggcgctgaactatgaaaggtttcgccaccgtgattcggcgggcttcagattatacaggaggggtcgtcatccacgacatcggctggtttatcctgctgctggggagtgcccacttccaagaaatcctccgcgttgaatttctcaatcccatcccactcatctgctgcattgtttggttaaagggtttacaggtttcacatgtgctaaactagatcagaaacttggtgcgagtatgaaagataatagtgggtgacagactattagaaggatacgtcctgtctcccacatgttcgtcatgctaactcctgtgttgtccgataagagccagtagtctgtatcagcatcaagct

SEQ ID NO: 3477 - DNA, 961 bp, Zea mays
  misc_feature (945)..(946): n is a, c, g, or t
actgcaatgcttggtgagagaaagaactgcaatttgccaggaattgttgtggatcttcctacattgactgagaaagataaagaagatattttgggctggggtgttccaaatgacattgacatgattgctctatcctttgtccgtaaaggatcagatttggtgactgtcagacaggttcttgggcagcatgccaagcgcattaagttgatgtcaaaggttcgtatatactatcactgtcgacctttaaagggttatatcagctatatttctgtccataatttggcacgactccattttttgtttgcatctctcgaatgaaaccttcccatcttaatttttgctgtgaacacatgataaccacatgctatgttatttatcatgtaacatatgaaagtagtatgttgagtacccttttaccaactaggatatactgcttgcccaggctgcaacttcacaagaattttttactttacagttggttagcgaaatgcaattctgttaacttgacgctacatttccacctggtaggctgttttactcctaaccgaattctctggaatactggataattcctttattgtaaaaagtgggttctgcctatctgtcaaagctagagaggtcattttccctgattacgaagcacaagaattttttgaattctcaaattgttgagaatagttcatgtcatgcattgcttatttactgcaatgtctgaaatctagatggtttcctgctatactgttgttcgttatttttttggaggtaatccctgcctttatagaacatatgatcgtgtcagttatgctgtcatggatctgatttccttaatgacatggttctgctatgcaggttgaaaaccaagagggtgttgtaaactttgatgagatcttgagggagactgatgcttttatggttgctagaggtgatctgggaatggagattccnnttgagaagattttcc

SEQ ID NO: 3478 - DNA, 785 bp, Zea mays
gtgaggctttgaatattctacttactacgtccccgaaaaacaaatctacttacatatcccatctatggtttatttcttctggctctgttttgcatcagatggtgtcactattaacgttacatgcatgcctatgattcactcttatctgcaatataagctcttgtttaatcaatgatgatgtattcgtgaattcaggaacatttcaagaaaaacaagatgaccattaatctgaagtacataggtcagtggttttcttcggtgtcatatttcagggccagaactgctagttacacacatctcagatgttgttcttctactgcagatccaacgtacatgatacgtgccatcccaagcaatgcttctgataacgtctattgcacactgctggctcacagcgtggtccatggagccatggctggatatactggttttaccattggccaagtgaatggtcggcactgctacatcccattctatgtaagtcgcacccctgccggagcaggacacggaattctttttaccgcattcatcatctcagcatctgagacctacttatcctgcttgaaccaatgccctccgtactaattgttttgcattcgcgtcactcacttcagaggataacagagaagcagaacagagtttcgataaccgacaggatgtgggcaaggcttctctcgtcgacgaaccagccaagcttcctctgcaacaaagtcgtcgaggaggcaaagaaggaacatgaaagagcaacgcgacttttagatggctcgccttcccatcgaaaaggt

SEQ ID NO: 3479 - DNA, 1063 bp, Zea mays
  misc_feature (1057)..(1060): n is a, c, g, or t
gtgaagcaaaacgcaatcaatatgatcaagtaagaatttattaaagctttcaattccttgtggtattgtttgtgacaatcaagttgaaaaggcttgcgtcaatgaatctaaaactagcaccttatggatgcatataggcttttgagaaaatgatctctggtgtgtatcttggggaaattgctagattggtattccaaggaatggctcaagaatcagatttatttggtccatctgtgaattgcttatccacccctttcgtattaaggtacttgtatttttccagttaaattttggtcttacaaagttatttttattcctagagctggttgctacagaaacataaaattgatgtgatataccctaatctttttatactaaatctgatatatatagtgttctattgatatcatgatatgcttcccaatatatatgccacttcactccattgttttacttttgttctcattcttttgttgtgatatattaattaggttaattgacatctgtctattttttctgtttttatcttaggactacatatagcacaacagaattaaacatcatcaatcttaagaggaaacagacattttagctagccaatgcaagtgttagaatgaataaactggtatagctagcaacaactggaattagttaatgcatggttggaaaatgttctttgtttcttccaaactgaactgtatgattgcctaacaaacaaaacggtaaagatgaataatgttatgataattttattatttctcgtgatccagtacaccttctctcgctgctattcgtgaggatgattccccagaccttagagtagttggtagggtgctcgaagaacatctgaaggttagttgtcactgctgcttaattggctcctatatgaagacaatcagacaatgatcaacgacatcgttttgcttattacacagatgcaggatgttccaatgaagactcggagacttgttgtgagagtatgtgacattgtaacacgaagagccgcccgtctagcagctgctgggattgttgcagtgctacagaaaattgggcgtgnnnntag

SEQ ID NO: 3480 - DNA, 1048 bp, Zea mays
  misc_feature (606)..(608): n is a, c, g, or t
ttgagagatgatttttgtgaggcaaaagatttttcatgtacaggaacacgaaagatgtacctgaccaccgggtgttcagatatgaccttagcatcaaggacaacagccgtcttcctgaggaaatgtgcaaggggctgcccataggtgtgagggaacgcatggctgatcacatgagcgcctgcctggtcagctgcaattgcggcgtcaccatactccaccctgacagtagtcccctgaattacatacagtcaataaatccgttcctcaagtgtgtgaactgagctaactcaacagaaacacacaagaaatctgttctgaaaagctattgacaattcttcccgtctaggaaccagttcaaaagtgcccccaaggcccaaacaagagaaaagccgatttgatgcagaaatttattgagagtccacccatatagacgagttccaaagcgattccatacataagaaggtcaatttgatagcgacaaccgagtcctaggcctaagcccctccacaattacaattataggacccgtgagtacatgtagataggtccatcatcattgctacagaataatttcgtcagttaactctcagttgcaattgctaccannnactacaaaacagatgaatcacgacagcataaaaaacaaatcctcccacgagtcagacatgcagaccgatctaaaatacaggacagcgccacgatttacatgtgacgttcactacaactcagatccagtgtcaccagcgaaagcgacatcagtcagcgtcagctgatactgcaacacgcactgtagcctgatcccggctaaagagatcgggagtaggtgaacggtgaaccgtagatatcagcgccgacggaacaaaccgatccggccggaggacaatgcgggatctggcgccgcttgacccgagagaccgcagatctgtacgcgtaggcggggaatggcgcacgcacggaacttagcaggagtaaggggcaggtgcggcggcggtgcgtacctggaggcaggggggcacctcgggctggtagagcgcgcgcttcttctgca

SEQ ID NO: 3481 - DNA, 626 bp, Zea mays
  misc_feature (617)..(618): n is a, c, g, or t
cccccctcacgctgccgccccattgcatttggacgagttctccggcgagtccaatagcagcgtgttgtgcaggtggtgctcgtcgtcgtcgtgcttcatgttctccacgtcctcgtggctcaggaagcagggctggttcgtcgagcacagcaccctcgcccacatccggtccgtgatcaccaccttgttctgcttctcggtgatcctctgcaaaacaagagaagggtttatccaggatccaagaccggatgtccaggaagctcaactgcacaagcgccaaggccctcgacttacatagaacgggatgtaggcgtgtctgccattcaccggagcgacggtgaagccggtgtaccccgccatggcgccatggagcgcgctgtgggctagcagagtgcagtagacgttgtcggaagcgtttgaactgacagcgcggatcatgtaggtcgggtcgatgtacttgagggttattgggaaacggggcttcttcttgaaatgatcctgcatgtcaaagaaatgggataaaattcagcattggaatgccaggtaatgataaaaaaaattattaagatggctcggtttgaaactaaataattctgctagtagagctaatcgacaannaaacggag

SEQ ID NO: 3482 - DNA, 636 bp, Zea mays
atcttcgtgcattcactgaaacagtcacagatcacaaaggtcaaatgtggatttaggcagagaaaaagatggcgattggcaatggaagaatcttacatgagctctgcctctgactccctgaagcccgtgtggtgcttgagggtgtcggtccaaaggggagccctcttgagagtgagtctggctgcgtagacagcagaagcagcgaccagcgatggcaggcgcgtcaccaaatcgtattgcatcagcgccaattcagcgaagaagaacaccatattctccatctgcagcattccccaccgggcaagataaatgtaagctcttgattggtgaatctctgattggctggctagccatgccgacgaaatttgtttacctctttctcaactttgccgcccaatgttgcggccttcagaaaacggacaaggaacatatacactgtagggacagtcaggttccactccagcctattcagaattcccttctccatcgaaagaatctgttctctactgtatgcactgtctgatatgaggatgaagtcgttcacctgaaaaaacacatatgaatatgaatcttagaagagaagtagcacactgagaacatgggaacagagagagatgaaaagctttctgtgcgcac

SEQ ID NO: 3483 - DNA, 393 bp, Zea mays
gagctccttggacgcgttccagcagattcttaagaaggaagggcccaagtccctgttcaagggtgctggtgctaacattcttcgtgccattgctggtgctggtgtgctttctggctatgaccagctccagatcctcttcttcggaaagaagtacggctccggcggtgcttaaatggagaaatatgatgacgaacaagagcagtgtgtgttcccggtcctttccaatcaggatctggtgaagtttttgcctttcatatcgaagaaattaataattcatgtagagggaggattcttccaacaatttgttttggatggagacttagatctccaaacactcgtaactatcctactaggtggtgacatcggtccccaaaaacatttatggtcatagag

SEQ ID NO: 3484 - DNA, 371 bp, Zea mays
cacatcctcaaatgaggcctggccagggtatgcacaatgtgcctcctgtggcagccggcccaggccatcactatgcaaaaccccgaggaccaggaggccctaaccggtatcctcagggtgggaatcaagggggaggctacaatccgaaccgtggagggcagggtggtggctatggcagtggcccttatccccagcaagggcgagggcctccttaccctggagcagctggcccacggggcagcggtggcagtggctatggggctggagggccaaactaccaacagggtggcccatatggtacgtccggtccaggccgaggaccaaactactctcaaggtagtggttcccgcaaccaacagcagtatgggaac

SEQ ID NO: 3485 - DNA, 416 bp, Zea mays
  misc_feature (409)..(413): n is a, c, g, or t
atggtaagggatcagtccagaaatattccgcatcaagtgcatcttttgctgatatcctctgaataatttgtagaggcgtcaaaagaagacccaaatgacaggtgtggacaacacacagcagccaaagaaaagtacggaataggaactaaccatttaaatgactaaacaaattaaactttcagtaaaattcacgcaatgtagcatacctgtgatggatctaaagtcaacatcttctctaacagatccagtgcatgtcgatcaaaactacaagtatatagaataatggacaacaatcaggcgacttaaaagccatattggcacaaatatatgtaatatgtcacgtatcactcactgcttaaagaaatctttaactcgtctctttaatggccggggaggcttgaagttgttnnnnnaag

SEQ ID NO: 3486 - DNA, 488 bp, Zea mays
gacgaggagggtcctgtaggcctggcggttggcctcggtgttctcgaggccgatggagtcgagcctcttcccgcaggtcgcgttcgactcgtccatggcgaggatgccccttcccggcgacgcgatggttttctgcagaaatataattaagagaattgcaaacttaagtgacgatattctgagccatcatatagaaaaaattgctattttagctcttctaacgtaggctctctgctattatgtgaccctggctcaaacgatcgtcgtacataactgaagcaatatatatatataccgcggtctggacaagctcgtcagcgtaggcgctagcgcgggcaaccatggagacgacgacggtcgccggcctgggatgagcggcaaccagctggggcttggatccccattcagccttcttggggaggaatgacgacttgaggagagtagcagcagatgccattgctgctccctggttgtgaaagcgaacgagc

SEQ ID NO: 3487 - DNA, 567 bp, Zea mays
gatggatgctggatgtgctcatctgtggtgaagaaagctttggcactggtaatatatggcttgtggccttgtgggttgtggctatcatttctatacacacaacagtaaacatgtcagcaacctcttgtattgttatgttagatgggtaaattctgttaacatgtggtatataaatggggcaaatcacttgtgttctgactgtgagctctctcgcccttctattgagttggtggtcatgaatccaacctatagtaaagtcaaaggacttgttagtatttggtataaacattggtgggatgtttacatgtactattgtggccagggtctgaccacattcgtgagaaggatggcatctgggctgtgcttgcatggctttcaattattgctttcaagaataaggacaaccttggaggagataagcttgtcactgttgaagatattgtccgtcagcactgggccacatatggtcgccattactacacacgctatgactatgaggtacttccttttttttgacatgccccttgcatatatgtaccacctgtttaagatatcattctaaatgca

SEQ ID NO: 3488 - DNA, 803 bp, Zea mays
aactaaaactggatcacgtttgggtacatgtccgtaacatgttacatgttggatattattgctaaaatctactcagggcactccaagagtaaaatctgcaggtcgcagtaaacagtttcacaggacttgtgcagacataaaagcacttgcatcccgcccgtttagtagggctccacaggtgcacggaatttggcacctgcgtagacagcaatagcgccaagctcttcttcaatcctaagaagctgctcccatcataaaagtaacacagattagtacaaatgaccaaatattgttctcaaaccaaacccaaaacagacatgaatgacacaaaagatgggcatcaagtgtcacaagtcacaaaacaaattactatcagaaagctgagattttagtagtatagttctcgaggaatcacttgcctggttgtatttggcaagacgctctgatctgcagggtgctccagtcttaatctgaccctgttatataaaaagaaaacaaaaagacagatgatactacgccttacagtcaaataaaagtttgaatttgctaagacctttgagaaatatgaaggcactgtctcatgttttcagaacaggaatgattgaaacttctctatcctagatatgcacagaaagtaaatcataccgtggacaaaccaactgccagatcagcaatgaaagtgtcctcagtctcaccactacgaacagcagatggttaacatcaggaacggcaccagacaaaatcacaaaattagtacctaagaaacatgaagtagcaacacaaactatagttacctcctatga

SEQ ID NO: 3489 - DNA, 766 bp, Zea mays
catcttagcatagtgaacccagtcatcctggtcaaaaggatcttcaatcgaaacaatggggtattcgctcacaaaagatttgtatacattctttaagctatcgccagatatcttctgtgaaccatcattattctacaaaaaaaacagaatgtttagttagggacatgtctggcaagtttattaacttgttcacagaaagaaaacaatggtctacctcctccttaaagttgaggtcataggtttggtccttgtcactgtaaaactccgaagcagcaacatccattccgatgacaacctagcattcagatagagataagaaaaacatatgacaaacttcaagtctcaggtgaatactgaacaaaacaaatatctggtgaaccttgccagtgtatccagccttctcaattgcagttttcaagagctcaagtccttccttgttctcctagtatcaggaaattgaaacagattaactctcataacaaaacatcgttttcagttttacctacataaagaccaatgttccagtaaagtgaaacaaataaaaaaacagatgtccccaactgtgaaatcagaaactaacctggatgttcggagcaaaaccaccttcgtcaccaacattcgtggcatcttgcccatacttctttttgataacggactgtaaggaacaacaaaagatatcaaattatgatactttgacactacaaaaagaaaaggacaaacaagatatacgaggcaaatgccttcaggtggtgataaacttcaacac

SEQ ID NO: 3490 - DNA, 595 bp, Zea mays
  misc_feature (397)..(399): n is a, c, g, or t
  misc_feature (441)..(447): n is a, c, g, or t
  misc_feature (520)..(520): n is a, c, g, or t
  misc_feature (529)..(543): n is a, c, g, or t
  misc_feature (547)..(553): n is a, c, g, or t
  misc_feature (569)..(592): n is a, c, g, or t
tcctagggtccacacttaaggtacatcaatagatgcattagttgctcaccttcaggttgtggtacacctcaactcccatcttcatggcctccttgaacgaggaggcaccagttgggaggatcatgaactcctgtacaacagttaaatgatcagagagtatagtcgaagcacgtagtcaaaaattcagatttctcaaggaatgttacctgcatggcaagcttgtttccagcatgtgaccctccattaatcacattaaaggcaggtacagggagcaccagagttttgttcccagcaagatttgcgatgtgctgcaaataactaaactttcaggacaccctctaaattgtgcataccaacataataaaaaaatcatagcagtgacatttgaaagacctgnnnaagaggaatcttcttcaccatagctccagctttgcacaccgnnnnnnnaaccgcaaggatggcatttgctccaagctttatagattgaacacgacattcaaggaaatcaatacagacagtncaagataannnnnnnnnnnnnnncatnnnnnnnaacccatgataccttnnnnnnnnnnnnnnnnnnnnnnnntgg

SEQ ID NO: 3491 - DNA, 604 bp, Zea mays
cacgcgtgatggttatctattaagcctccagcgccatccgacaggactggaagtctgtaacacgcagggcgggcgggcgatcacagtggatccgcacggtcgtcttgttcaacgttgacgctggccgtcccgagctcccaggcctccatcttggacacggtcactgggtgagctccgttgttgaacaggtacaggtggctactgccgcctgccgccacgtgctcagggtacactcgcgccgtgatgcacgtccgccccccgcctccgaagctctcgacgacagagtggtcgatctgttgttgttttttgtcaacgttagcgccgttaaacgtcgtcatgcatgcttcagttcagctaagaaccaagacaagaagctctctcaccagtgttctcagcgatatgcccctgtccttctcgacgtccacgtcaacgaatcctgcgtagaatggcttgtgcaccccctctttcgtagacgacctgtacttgcacgtttgcatcgaaaatgcatgcaaaatgatagttgtcagtatgtttgtttggaggagtctactctgaaccggtagcaaaacagacgcgtccggttcagctagcagagttgctgcat

SEQ ID NO: 3492 - DNA, 395 bp, Zea mays
cttgggcgagacgttgccagcccagacaaacaaaagacggtgattgctgtggatggcggagtttacaagcattatactttcttcgcccagtgcatggagagcactcttagagacttgcttggggagggagtggcgtcctctttagtgataaaacttgccgaagatggctcaggcactggagcggcgctcttgtcagcctccctattctcaacgtctccaggccgtggatgattaatttctgcttgtagttccttcagattctgaaggtatagcaggtatacaattgctccagtggatatttgtctataacggttataaaattcaactgccacattctttttttctgtcaggcctgtgctcctgcagtgcccatttttaaggggttgtacacgtca

SEQ ID NO: 3493 - DNA, 491 bp, Zea mays
ttgaagcagaataatgtcaataatcaaggattgctgtttgatcctcatgctagaacagctttggcgtttgtgtcactccgaagtgatggtgaacgcgaatttatgttctatcgtaatccaagtgctgatatgctacttgaagaaaaagaacttgatcttgatcttataaggaaggtatatataagtatatataagtgtattctgttgccattccaatatctatgcctctcacttactattggtttcttatcatgtaatttgtgacaaaattaatgtaatctaatcatgttatttatgctaggcaaagatattccaccatggctcaataagtcttataactgagccctgtaaaactgcacatattgcagctgccagagctgctaaagatgctggagtacttgtttcatatgatccaaatttgaggctttcattgtggtcatcacctgaggatgctagagatggtatcctgagcgtatggagaactgctgata

SEQ ID NO: 3494 - DNA, 465 bp, Zea mays
tggatgaccagctctcggagttttctgaggcgaggatcggagggcgttgcgttaggtccgcggttggtgagcggcggtcggagcggtctcgcgcgcggcggggtcgttcgatgacgcaggaatcgcgctctgggagggtgggaatacctcgcgctcgcgctcaaggtgctcgattaatttactgcctgaggctgagggggggcgcgcctgtgagctgaaccgttcccgctgcactgactcctgagctcgggaaatggttgggagcgtgcacgtcaatggatcggtccacggcggcaatggcacggccacggaggagcggctggacgagctgcgccggctgctcggcaagtcggagggggaccttctcaagatcgtcagcgtcggcgccggcgcgtggggcagcgtcttcgccgcgctactacaggacgcgtacggccatttccgggacaaggtgcagataaggat

SEQ ID NO: 3495 - DNA, 426 bp, Zea mays
gccgactccaactcagcatatagaattgtttttgccgatacatagccagaattacagcatagttgatagaacaaaaaaagggggctgctcgattctccatcggcaggaccaacttacacgaaatttaacagcaaagagactaattaacatacaaatataaagataaccatcatcccacataggaagcatgttttttggatgtccgaaaataagctctaacgagcaaaccacactccgcaacctagctcgtagggcaggagttccaaaacgggcacgcaaagagaagcaactcagtacttgtagtccttgacgtggaggctctcggtgtcggcggcagcatcacccttgtaggtgccgagggtagcctcagagttggccttgcacctggcgaggaaggcagctctagccttctccaagttctccacc

SEQ ID NO: 3496 - DNA, 439 bp, Zea mays
cgatgccagcccatctcatgtacgacggtaaggacgacaacctgttcgagcacttcagcgcggtggcgcagaggctgggcgtctacaccgccaaagactacgccgacatcctcgagttcctggtccagaggtggaaagtcgcggagctcacagggctgtctggagaagggagaagggcgcaggactttgtctgtaccttggcgccgaggatcaggcggctggatgatagagctcaagcgagggcgaagcaagcaccggttattcctttcagttgggtttatgaccgcaaggtgcagctttaatcaagaacgctaggcaatgtgggcatttactacgtatatcattttcagtcctggggttctctataagaaacagtctctaggttatctagcagggtagaattcaactactcgtggatctcactcggtgcaaagtagtg

SEQ ID NO: 3497 - DNA, 420 bp, Zea mays
acgccaatgtgacatcaagcccatcagggccagactccttgagcacctcatgacggtacttagcagcaaaggctgcaccagtggcaacaggaatgccctctccgatgaaggcaaagcctcccaggaggttgtggggagcagagaacatgtgcatggaaccaccctgtccacggcagcagcctgtggccttgccaaagagctcagccatgacagaacgtgccgggacgcccttggacagcgcatggacatgatcacggtatgtgctaacaacacagtcagcttggttcagaagtttgatgaagccagtggagacagcctcctggccattgtaaaggtggacgaaaccaaacatcttgccacggtagtacatttgtgcacacatgtcctcgaatacacggccaagaaccatgtcctcataca

SEQ ID NO: 3498 - DNA, 518 bp, Zea mays
gcctgcatctgcaatgtttgagcctgaacctgacaaggactgcctgcaccatcaactctcggttacgatcggcatttctggatgatgccatggtctagacagttagtaagttattcatactgatctggcatctgtacatcagtcacagccatctactgctccaggttgatcggagcgggcgctgaactatgaaaggtttcgccaccatgattcggcgggcttcagattatacaggaggggtcgtcatccacgacatcggctggtttatcctgctgctggggagtgcccacttccaagaaatcctccgcgttgaatttctcaatcccatcccactcatctgctgcattgtttggttaaagggtttacaggtttcacatgtgctaaactagatcagaaacttggtgcgagtatgaaagataatagtgggtgacagactattagaaggatacgtcctgtctcccacatgttcgtcatgctaactcctgtgttgtccgataagagccagtagtctgtatcag

SEQ ID NO: 3499 - DNA, 515 bp, Zea mays
attcaagtatgcgtgggtgcttgacaagctcaaggctgagcgtgagagaggtattacaattgatattgccctgtggaagttcgagaccaccaagtactactgcactgttattgatgccccgggacaccgtgacttcatcaagaatatgatcactggcacttcccaagctgactgtgctgttcttatcattgactcaaccactggtggttttgaggctggtatctccaaggatggccagacccgtgagcatgctctccttgctttcacacttggtgtgaagcagatgatttgctgctgcaacaaggtatgattccaggaatttctatttattctggttcatgaactgagatgcctgtaaatgtatttcaatagtctagcaatatttatcttctctcagtattactgccttcaagttgaaaatactgcatttgtgctgtgattgaatagctaatgttagttgtatgctaattttgacaaagtgaaacactgattgcttgcattttaaaggccatctg

SEQ ID NO: 3500 - DNA, 717 bp, Zea mays
ttggatttctgctactatattcacagcaaaaaaaagaaaaaaaatcactggtgatgcctgattgactaattttggaactgccgaaatttccaggcttggtatatcgtaccctgaattgacagagatgcaagcccgggccatttttgaagctgctatagcaatgaccaaccagggtgttcaagtgttcccagagataatggttcctcttgttggaacaccacaggcatgtgtctttttactttttatatatcaatgtatgtacacatactgtctctacagttcaaaaaaagtgaccaaatccatttgatgccaaaaccgcacaaacaaacagctaattataatagctgacgtttggtatttccaggaactggggcatcaagtgactcttatccgccaagttgctgagaaagtgttcgccaatgtgggcaagactatcgggtacaaagttggaacaatgattgagatccccagggcagctctggtggctgatgaggtagggaaaaccaccaagttcagaatcgcccagaactttgcgaacaagtttgtttatctgtgcattcctacgctggtctgaaatctgtggctgttgttgttgtttttttggtttcgtcaacctggcagatagcggagcaggctgaattcttctccttcggaacgaacgacctgacgcagatgacctttgggtacagcagggatgatgtgggaaagttcattccc

SEQ ID NO: 3501 - DNA, 534 bp, Zea mays
tttttgtagttatgtcgcccattattggcactcaagttttacgagtccctctgaaaccttgaaatttcatgagtctaattgcattattatcccaatttttgccatctctcgctgcaggttgctggtcacaaggacgtccttgaaggtgatccttatctgaagcagcgtctgcggctgcgtgagtcctacatcaccactctgaacgtgtgccaggcctacaccctgaagcggatacgcgacccgagcttccaggtgagcccgcagccgcccctgtccaaggagttcaccgacgagagtcagccggcggagctggtgcagctgaaccagcagagcgagtacgctccaggcctggaggacaccctcatcctgaccatgaagggcatcgccgccggcatgcagaacaccggctaggccaagatcttcggtgtgcaaataacctgtctcccatgagacggtggacgatatgtgtaggcctgtgagcagttagtacaccggcgccagtgtgttctggaggatttttcatgtcagagcctt

SEQ ID NO: 3502 - DNA, 391 bp, Zea mays
  misc_feature (198)..(200): n is a, c, g, or t
  misc_feature (302)..(302): n is a, c, g, or t
  misc_feature (306)..(308): n is a, c, g, or t
  misc_feature (324)..(327): n is a, c, g, or t
tcttgatggaactgactgtgtcatgctcagcggcgagagtgccgctggagcctaccccgaggtggctgtgaagatcatggctcgtatctgcatcgaggcagaatcttccctggaccacgaggcagttttcaaggccatgatcaggtccgcgcctcttccaatgagccctctggagtctcttgcatcatctgctgtgannnctgccaacaaggccaaggccgcactgattgtcgtcttgactcgcggtggcaccacggccaaactggtcgccaagtaccgccccagggttcccatcctctccnttgnnntacccgtgctaacgannnnttctttcgactggaccatcagctccgagggcccagctaggcacagcctgatctacagaggcctc

SEQ ID NO: 3503 - DNA, 402 bp, Zea mays
ttctcgtccgatgtgtacgtcgggccacccaagggcaacgactggttcgagaagcagacggcaggcacgctcgacatcctgtgccctccttggatggattggttccatggcggcctgcagttccagattgagcaccatctgttcccccgcctgcctcggtgccaccttcggaaggttgcgccggccgtgcgtgacctttgcaagaagcatgggctgacctattccgcagcctccttcttggacgcaaatgtgcttacatggaagacactcagggctgccgcattgcaggccaggagcgccacaggcggcggcggcggcgctccgaagaatttggtctgggaggcattgaacacccatggatgataaacgggacgaggatatggctgaggggaaggcaacttc

SEQ ID NO: 3504 - DNA, 694 bp, Zea mays
gcaatcacgtacaaggaacgtctagtacaaaacggatgtgacttcaaatggaacaaccacatttgtgatttacgcggccatgatgcaatcaatggcttctttgcagatcccagtcatggtcgcctctggtccatagacctgcaatgcatttgttgagcataatcagggcatctcttatgggggggtatggagccggtcccaatgatccccctttcaggaaatggtatggcgtttcaggaaatgcaaggtaccatatttatatcgagaagaagcataaagagatcatacctcaattggaacgccaagttcggcgcctagggtgcgcattttggcgagtccagtttggtagttcggaccacctctccggacataaatgttcatccttgcagcctttaatttggactcctggaatcagattcagaaacaaaataacaaacaagattggtgaagatttaaatagagataggtgggagtggttggggaattgaacggctaactaacttcgtggcccaatttaccttctctcttaaagcccgaatgatgccactaaatgtagaagcaacatctgtgaagttagcgattcctcctccgattagaagggctctcttacggccatcaggatcagaggtagcgcactgcacgagttgaaaacatattcatgaaagatatatgtaacgaacagaaaagatagaca

SEQ ID NO: 3505 - DNA, 372 bp, Zea mays
tccttgacttcatccttcttcttaccatcgcctgaaagcacccctctccaacttatctgaaaccatcaagctaggattgatattgttgacatcgtgaacttggcattctccctacagtgtgggcgtgctttcggctgatccgctcacatggtagttatgggcagggtcgtttgactgacaggttctcgcgtgtgatgatgtttgccttcatgttaacttttgtaaaaaaaaaacattcattcatattatgtttctggctcccttcgtcatcaaaggggaattggtggtggtggtggcttgtaaaatacactcaaattttgtgcatggacatgtcagacccttatcatgtatactagctgatgtgatccgttc

SEQ ID NO: 3506 - DNA, 347 bp, Zea mays
  misc_feature (255)..(258): n is a, c, g, or t
  misc_feature (264)..(264): n is a, c, g, or t
  misc_feature (277)..(278): n is a, c, g, or t
  misc_feature (308)..(340): n is a, c, g, or t
tttttaaaaaaggaaagattcctcaggcgccactatatgtcatgcatgggtgatatattttttattcaagatcttcaggccccgttcatgaccggcttcttcatctcccacgcggtgagacgggacaccttgacgtgcgccctcccgttgttgaacacgtagaggcgagcgtccttgccgatggccagcgacgggtagaccctggagaggatgcaggtcttgcccccggctccgaagctctccacgaccgaccgnnnnatctgnagcaggaagaagnngtaacgagccgacacagcgctgagaatgannnnnnnnnnnnnnnnnnnnnnnnnnnnnnnnnaaaaaaa

SEQ ID NO: 3507 - DNA, 724 bp, Zea mays
tcacgtccagcaaagtaaagccctatggatcaactgccaccttattgatttgttaaaaacatttgctcttttccctcttttttcaaaattttctttagcggtttagccatttgtaatgttaatagttaaagacgctgccccaaaattcattacatgtctcttgttggcagtggtggcctggtggcttggggaaagcttccacccatgcagtggtgtacgctcggttgataactgaaggaaaggactatggcatacatggtagtgttttgcttttgggaaatgcctttcttgatgcagtactgtcttcctttgtgacttatggtattacgcatgtcggtgttccaggtttcattgtgcaactgcgaagcttagaggatcactccccacttcctggtgttaccctcggtgatattggtggaaagttcggtagtggtgcatataacagtatggataatggtgttcttcgatttgaccatgtgcgcatcccaagggatcaaatgttgatgaggtttgtccatttggatcatcatactccattctgtcactttatcccttcttttttttgtcttagccttccttaaatttgacttgatatattcttgctttctaggctttcacaagttacaagggaggggaaatatgttcactcagatgttccaaagcagctgctgtatgggacaatggtttacgttcgccagtcaattgttgcagatgcttctaaggc

SEQ ID NO: 3508 - DNA, 355 bp, Zea mays
  misc_feature (313)..(317): n is a, c, g, or t
  misc_feature (325)..(352): n is a, c, g, or t
ctgaagtccttaattaatcgtttttgtactgctcaggagtacactgattttctgcaagaatttatgagtgctgtgaaacaaaactatggggagaaagtgcttattcaggtaaggcacatactaagaagcctctatacattatcagagctaagtttgaaatagaaatttatgcaactggcaaatgagtagtgccagacttgcacttctatatctgaaaccctattacatctttacctgaatattgtttatcgtgcagtttgaggattttgccaaccataatgcttttgatcttcttgcaagatatggcaccacnnnnnttgtattnnnnnnnnnnnnnnnnnnnnnnnnnnnnaat

SEQ ID NO: 3509 - DNA, 717 bp, Zea mays
  misc_feature (707)..(713): n is a, c, g, or t
tttgagctgctatagcaatgaccaaccagggtgttcaagtgttcccagagataatggttcctcttgttggaacaccacaggcatgtgtctttttactttttatatatcaatgtatgtacacatactgtctctgcagttcaaaaaaagtgaccaaatccatttgatgccaaaaccgcacaaacaaacagctaattataatagctgacgtttggtatttccaggaactggggcatcaagtgactcttatccgccaagttgctgagaaagtgttcgccaatgtgggcaagactatcgggtacaaagttggaacaatgattgagatccccagggcagctctggtggctgatgaggtagggaaaactaccaagttcagaatcgcccagaactttgccaacaagtttgtttatctgtgcattcctacgctggtctgaaatctgtggctgttgttgttgtttttttggtttcgtcaacctggcagatagcggagcaggctgaattcttctccttcggaacgaacgacctgacgcagatgacctttgggtacagcagggatgatgtggggaagttcattcccgtctatcttgctcagggcatcctccaacatgaccccttcgaggtaactgttgcaactctgcctgccaccctcgcatgtcgcatctgatgtgtgactgagcatctcatgtcgcgatcgcctttcttttggttgnnnnnnnaacc

SEQ ID NO: 3510 - DNA, 717 bp, Zea mays
atgatccaactagcctttttgatatacagattaagcgcatacatgagtacaagagacagctcctaaacatattgggagctgtttacagatacaaaaaattaaaggtaggtttctttgagttgcctgcatcctttcttgaagtggtgcttgtaccctttttggttttaccatattgagctaaattctttagatgcagatcttttttaccctgttctagtcttgaataggcctatgaaccttgtagggaatgagtgcagaagagaagcagaaggtcacaccgcgcactgtcatgataggagggaaagcgtttgcaacatacactaatgccaaaagaatagtgaaattggtgaatgatgttggtgctgttgtgaacaatgatcccgaagttaacaaatatctgaaggtatgaatgattgaatggacgattgccctttgaacccttcagaaagattaatttgtatttgtgatccaccaaaaagagtaaccctttttctatactactacatacaggatggtccatatcatttacttaaagtgctcttttccttttcctgccaggttgtctttatcccaaattacaatgtatcagtggctgaagtgcttattcctggtagcgaattgtcacagcatattagtactgctggtatggaagcaagtggaacaagcaacatgaaattctctctgaatggttgtgttatcattggcacccttgatgga

SEQ ID NO: 3511 - DNA, 768 bp, Zea mays
  misc_feature (409)..(762): n is a, c, g, or t
gtcttcacgcgaaagcagagacaggaaagacgtctccagcagagagcatcgacgtcaaagcttccagagctagtagcaaagaagacaaggaggcaacggctggtggcaagaagggatggaagtttgcgcggcagccatccgatcaagataccaaatgaagccaggagtccttggtgaggactggactggctgccggcgccctgttagtagtcctgctctactggactagccgccgctggcgcccttggaacggtcctttcctgtagcttgcaggcgactggtgtctcatcaccgagcaggcaggcactgcttgtatagcttttctagaataataatcagggatggatggatggtgtgtattggctatctggctagacgtgcatgtgcccagtttgtatgtacaggagcnnnnnnnnnnnnnnnnnnnnnnnnnnnnnnnnnnnnnnnnnnnnnnnnnnnnnnnnnnnnnnnnnnnnnnnnnnnnnnnnnnnnnnnnnnnnnnnnnnnnnnnnnnnnnnnnnnnnnnnnnnnnnnnnnnnnnnnnnnnnnnnnnnnnnnnnnnnnnnnnnnnnnnnnnnnnnnnnnnnnnnnnnnnnnnnnnnnnnnnnnnnnnnnnnnnnnnnnnnnnnnnnnnnnnnnnnnnnnnnnnnnnnnnnnnnnnnnnnnnnnnnnnnnnnnnnnnnnnnnnnnnnnnnnnnnnnnnnnnnnnnnnnnnnnnnnnnnnnnnnnnnnnnnnnnnnnnnnnnnnnnnnnnnnnnnnnntttttt

SEQ ID NO: 3512 - DNA, 750 bp, Zea mays
  misc_feature (735)..(739): n is a, c, g, or t
actttacaatggatctaactcatcctcagaactctcttcttctgcctctacttcttcagattcaagtttttcctcctctatctctgatagaacctccgcctcctcttccaactcagttttctcctcaacatcaacaatagtctccaaagatttaacaagtaacttttgctttgatttagcaggagattcctttttgtctttgggtttaacaaatagttgggaaatggaagctggaaggtcaacattatccagaatcctcatctctttcagcttctttttcaacagttcagtatctgtggttccatactttgagactatgttgtttatcagctgtttcaatcaagtatagagaaaagtgtacgttaactcatagagcaagaagtaaatttgcataagcactttctgcacatctaatacctcttcatcaattgtttctattatctcaacatgtcgaggtaaaagtttctgcattatgtccaagctccacttctctagagcttcaggaagcactgtatggttagtgtatgccacggttctggaaatgattaggaaattagcatggattgtatgaaaatgaagaaagaaaataagttaattataacaggaacaacatcacataaacaatattataatcttaattgcacttcaatgtagatgtttcggcacaacaaatacctttctgtaatactccatgcctcactccagcttaatcccttaacatccatcagtattctnnnnnactcaggaatg

SEQ ID NO: 3513 - DNA, 423 bp, Zea mays
ttgcattcttattggaactttagatggtgcaaatgtggaaatcagagaggaggttggagaggaaaactttttcctttttggtgcagaggcacatgaaattgctggtttgcggaaagaaagagccgagggaaaggtacttcacttgtttgtatactgttgccttttgtcaagctaataaagatatctctgtctaactatgtgtgcccacataatgtgcatcaatcaaatatgtaaacgtatcactttgttttccaattgtagtttgtgcctgacccaagatttgaggaggttaaggaatttgtccgcagtggtgtctttgggacttacagctatgatgaattgatgggttctttggaaggaaatgaaggttacggacgtgcagattatttccttgttggcaaggacttccccagctatattgaa

SEQ ID NO: 3514 - DNA, 382 bp, Zea mays
cctgcattgacgtcgctggtccgttttctgatccatgaagcatcgtcgtatgtgactggcaacatcttcattgtagactcaggtgccaccatacctggtgttccgatattctcatccctgtaatcccccccccttaaggtttagttcattgtaccttagtttcatatggttgcataaagcagacagttaaagactccatggaggaagcactgctggctgtatagttcattcccgacaatattccatcatttttgctgtccactattgttttaatgtattttctccagagacgcgtagtttggtacttgtatagaatgacaatctttaagatactcctttattgtctaatctttcaaaacaccaatcaggatgaataaattgc

SEQ ID NO: 3515 - DNA, 402 bp, Zea mays
tgtcccaaagctaaggactccccaagcacaaaaccaaattatccagcacactaacaacatcaagcatacagaaactagaaacaccacaacaggaccacggctctcggcggtgctagccaaaactaaacatagcacacgcaacaccggaccggatctttatcttttaattgcattggtacagcataagcgggcagccaaatccccatagctccttccttccttcctgaagctgaagcctgaagctcatcgagttgcggagaaataacctcccgagcccaaaacgggattattcgtcgtcgtcgtcagtatttcttctttcacagcttatctatgtgtcagtggcactgcacaatttcgtgtgtgcagccacaggccctcagggagttcctgagaccacgtacg

SEQ ID NO: 3516 - DNA, 509 bp, Zea mays
gacattttgtttgttctcatagattcctactttgttctgacagctaagtcgtaaaccacttgcctgcaatgtttcttaagcaaaatactgctttctatctggatgcgcaatcaaaacttgctaacatctcttcaactgatccatgcattcagtttcctgaaagaggaggctgatagaaagcgtccgaacatgtcgaatatgggagagcttttcgaatcaataactggtggacacttgatgcctaagaagagaagggttgagataaggtctccgaacatgttaggaggctctaggcatggcgggcgtacctggcgaatacctgcttttgatatggtggacgaggactaacgagacagatcccgtggctcccaatatgtccaatatgagagatctttctaaatcaatagccggtgaagaggaagaggaagatggataggatgttgtctttagtgttagatcttgtgcttgtagttatcttaatgtatttttgtcggttgataaattcatgg

SEQ ID NO: 3517 - DNA, 540 bp, Zea mays
tttttgtagttatgtcgcccattattggcactcaagttttacgagtccctctgaaaccttgaaatttcatgagtctaattgcattattatcccaatttttgccatctctcgctgcaggttgctggtcacaaggacgtccttgaaggtgatccttatctgaagcagcgtctgcggctgcgtgagtcctacatcaccactctgaacgtgtgccaggcctacaccctgaagcggatacgcgacccgagcttccaggtgagcccgcagccgcccctgtccaaggagttcaccgacgagagtcagccggcggagctggtgcagctgaaccagcagagcgagtacgctccaggcctggaggacaccctcatcctgaccatgaagggcatcgccgccggcatgcagaacaccggctaggccaagatcttcggtgtgcaaataacctgtctcccatgagacggtggacgatatgtgtaggcctgtgagcagttagtacaccggcgccagtgtgttctggaggatttttcatgtcagagcctttctctt

SEQ ID NO: 3518 - DNA, 746 bp, Zea mays
aggtaagctattggcttggaactctttattgctgacaattctcagattcttgattaacatcagttctcagttgattctcattgatgatctgtgcttgaatttcaggtccgcacaaagataggtggtttcattagagctgtattttctgttttccaaggtacctcacccttgcttttcaaaggcagacagtttgtagttgttgcttttccagtttcaacactcaacataagatgctcattggttcttttgcagacttggatttctcatttcttgagatgaacccattcaccttggtaaatggtgaaccgtatcctctggatatgagaggagaactagatgacacagctgctttcaaaaacttcaataagtatgattcaagctttcgatgtacctcacaaatctcagttgcctccatattaattgtactagccatttttatgtgaaagggagatgtttttctactgtattgtcaatcataaaagccattgttttcatgtacaggtggggcaacattgtgtttcccctaccatttggaagagttctcagtccctccgaaagttttatccatgaactggatgagaaggtatgttgatgtaaaagtggacaacttacattctattccaacctttctccttgatgtaattatttcattttccagtgtttacatttctatttggattaacttttattgacagttctgtatgttccactagatttaagtagtgaaccacttctcttcttgcaga

SEQ ID NO: 3519 - DNA, 375 bp, Zea mays
  misc_feature (330)..(334): n is a, c, g, or t
agcatgcacacacaaagcacaacacataaacgactagctagagctatcgcggcgaccgagactctacggcagcgtacgtagcagcagccaccgcctttaagggccatatgccgccgcgccggcagtggttcaaggaggtcgcgcgcgcggtccgctcgagtgtggttcttctctcaagacccctgcgcctggtcgatgcggtgctgtgctgcatccttgatgtcgcgggccttggacgccagcctcgccttggcgtggtccagctggtcggcgcccggcgggtgcttgcccgtcaggtacttgtacatccaggagaacacggacagcgcnnnnncgccgaggccgccggaggtgacgaacccggccgccatgagc

SEQ ID NO: 3520 - DNA, 423 bp, Zea mays
ggctggtcgtcgagaagctctcggtgctgggtctggagggtaccggcaaggaccttgccatccaggtggacggcacggacgccaccgccgtcgcgacgtcgagcccttacttcgcagcaggtggcaacgcgaagctgcaggggggagaaggcgtcgaggatagtaagaacggcgtcatggtggagatcggcgggctggcattgccgctcggaaagagcttcaccatgacctggaacatgcggatcgaagcataggtcgagtgatgctgtgcttccgtctccatgaccatgaatttgcttaaagtcgtgttccgtttctgatttagatgggtagatcctgccatgctgatgtgcagtcagaatccatattctgaaaaaatctgtcatcagggggtgctctgtgcaaggagcagagtacaacatt

SEQ ID NO: 3521 - DNA, 391 bp, Zea mays
agctcccggtgcgtattgcctgttgttggacgacgtgtgcaatttgtaagatagagccaagattcgttagccgcctccttgcagaaggtttgtggaacccctaccctgatcatgtcattgaacttggaggctccccccaaataattaatcatacctaggttaaccaaaatgtaaatagacaccgcgtttcgggttgtcggtggtcagcattcctccttttgaagatgcttgtgatgatatgagaaatcaggtttggtaggggctgctgcctgggcaagtggggtttgtgcatatgggcccaggtagtatggttgcacatgtctgctcacagatgctgttgaatggaaggaatgttgtctagtcgcttgcattgtaaccattggagattgtc

SEQ ID NO: 3522 - DNA, 790 bp, Zea mays
  misc_feature (767)..(772): n is a, c, g, or t
ttgtatcaacagtgaaaacttaatattagacgactgcggtcagctgataaatcttaactaagtattgacagacatctccaggctacctggtaatttgcaaaattatgtgtgtatctcttaggccatccatgtgcttctagtttcaaatagaaagccttcacatcttccatcatcctgtcttcggatggaagattaatccgtcctgatagaactctagcaacccacttactttggagttcaaacagtgggaaggggataacctggaaagaacagaggttggaatgttcaagatctttgagcttcacagggtaggttacaggtgcatcttaactggggcatcaatttgcagcaaaactgactttccaaggcaatccgatgaaggacaaatgaggtgccacttcgggtggaaaaatatgcttgtatagtggatcgacacggttgtcatccacggtgatagtgctgtcatctccaaggaatggaaagtcatacaggtagctaggcaacatacaaatgcaagaagcacattatcagattccaaattaacgcaaaatggcatgcttttgtaggaaacgggatgcaagtgatactgcagatcactatacccagtgcagtgcatgataacatcagctttgattgagctgccatcctggaacaccacagtgccatcctcctgcgcatggtcaatctgcagcccgagcattagattcgccacaacactaactgtggcagctcctccagtagataaaagcttccatatcttgattcannnnnnataaactcataaaaggta

SEQ ID NO: 3523 - DNA, 404 bp, Zea mays
gcattgctgaaagttggtaggattgatgaagcaaagagcctgttttcagctatggtgctccgtggtccagtgcctgatgtgataacctacagcttaatgatcaaaagtcatatagaagaaggtttgttagaggagtctgatgatctttttctatctatggagaagaatggctgtgctgcccactcaggcatgctaaacgtcatagttagaagactacttgaaaaaggagatgtgagaagggctggaacctaccttaccaaaattcatgagaagaacttctccgttgaagcttccaccgctgcattgctgattcgtattatttcagagaagaagtaccagaaagaagtaaagtttcttcctgaaaaataccactctttcatggaacctagggatgattgagacct

SEQ ID NO: 3524 - DNA, 424 bp, Zea mays
cagtggtggtgctccgaagaatttggtatgggaggctgtgaacacccatggataaatgggatgaagatacgggctaatggcaacttctggtgttcagcttggtgcccatgtgattgtctggatgcctttcagttatttagagatattgatcattcaacctgtctgagtcaggttggaattttcgtgttgacaagtggctgtctatccagttggagagttcatgcttcaatagtctggttgttcacgggatgttctgttctccctatcacggtaactatatgatgatgatccttgctttaattcatgaacacttgtttcaagattatgtccattacattttgcttgcattgtcaagattgtggattcttggtgttcatgacgttgtaatgttaatgaacggctggtaacgccatgtggtactggt

SEQ ID NO: 3525 - DNA, 442 bp, Zea mays
  misc_feature (437)..(437): n is a, c, g, or t
gttttgttagcctgatattgtaataagcctggttctaagctcaattttgttgatggctcaatgctatgctcatttttgtttccagtctgatctttacaccttggttgatggctttgtcatccgcaatccatccagaacgaatccagctaacccttcgattgagcttggacctgagttcaagaaggtaaagcagtttgtttccaagataatgaagataccttccataatagagttccatcagcactgagaatgttccttcacaaaataatgtgttgatgaaaccattgatcagtaaatactgcacgtctgcactcctttcaactggtgtcaaatcacagcaagcactgatgaaatatttcccccctaatgcaggttgccaatttccttgctcggttcaagtccatccccagcatcgtcgagcttgacagcttgaaggnttctg

SEQ ID NO: 3526 - DNA, 558 bp, Zea mays
aaagagttctgctgcaatggtacagtggtccaggacccagaacttggacaggtatggtactcctgatgaactcgtgtcccctaggccatcgactttagcctttctgaattatcttgatggattcggttctgcatgctgcccgctataggtcattcagctccagggtgatcagaggaagaacgtctcgaatttcctcgtccaggtacgcaccattcggtgcaacaccttgtgcgcttagagacatgtagcaacgtatgtataaagacaacgctgattctgttcctgatgttgtcctggcaggccggcattgtgaagaaggagcacatcaagattcatggtttctgagcaaccgccgggtccatagcaaaccaaccctgcatgcagggccagcttattatatataatatctgaggtggagcatatctatctggctgtgtactacaagcaggcctagtacgccgcctgcgcgttcctcctattacacataacacatatagccccctccctgcgtgtatgcttgttgccgtcgtgtcgaatcttgtactacgaggctccatc

SEQ ID NO: 3527 - DNA, 495 bp, Zea mays
ggtgcgcgaccgtcaatacagagaccgtaaaacaagtgcaagcaactgaagtatcctccaaattggtatttttatttctgctcttcgggcaggtgtttaggttgtttgctgcacctcatactggtggcaaatcctcaacggcgtctcattagacaccggtctttcctctgaccagagctccatgttcacatcaccagttccccagtgcacaaagcatttgctaacctccctgggattaaaccggttcaccaagctcagcccgacacacttgtccactagcatccattctcctgtgaatttgccaaaagtaaattagttcacagaggtgaagggtcttcaaactgtgcagcgcaggtaactttaccgttgggtttgaggtctccctcgaatgttatttctcctgcctccggggagatctcttgctttgaaccattgatggccgtgaaagcaactactacctcagttgggtgcagcagggtgaatgtaggatgaact

SEQ ID NO: 3528 - DNA, 422 bp, Zea mays
gacatgtcatgcctagagttggcacctcaactctcaaacagcacctctccgctgctcgttctcgccatgggcaaagtggcaccgctcgccgaaagtacaagcacccttcacgaagttctcgcatagcttcgtcttgtagttgctcttgccacccagaccaccgcctcggcctccagatggagccacggcagcagatgagtttttcgccagcatgctcgtgctgatggtcgcgatgaggtccctcaccatttcgccggcttgcttgatctggtcaaaattgccttccagctcaatgttcttcaggttggggctagactcgtggtcgcggatacagagcttgacgcctgtaactctgcttatctgcttagtgttgaccccgcccttaccaattatgccaccggcaagagacgcatccacactga

SEQ ID NO: 3529 - DNA, 730 bp, Zea mays
gcagctgcaccataccaaaaactgcgcagagagaaagaacgtgacaaaacaagaaaggtttttgttgaaaagactgacatgagagccaaaagaatggctcgaaaagcaggtgctctagtatgtctcttattctatgcatgattgcttgtgtattttatggcgctctgtaatttatgttgcttgcgtgttttgtgaattgtgataaatacgatgcattttactatctgtctgcttgtgtgtgctctggttatggtacaaacacgcctgtccagtttagcctattcatgagacttaaccgctcccctggttggaattaattgacaggtcatatttgttgtggacgctagtggtagcatggctctgaatcgtatgcagaatgctaaaggtgcggcgttgaagttgcttgcagaaagctacaccagcagagatcaggtaaacctttacttcatgttgcatatcctgccatgctgaaggtcatcttggattgtgcttcccatttaggatatacatcatttgtgtgtgtggtcgtgtgaatagttcgtataccatcaatgcttattgatctgccttagctttgtgccttggcatctctctcaggtttcaattattccttttcgtggagattatgctgaggttttgcttccaccatcaagatctatagcaatggcccggaaacgtcttgagaagctaccatgtggtggtggttctcctttagctcatggcctaatac

SEQ ID NO: 3530 - DNA, 350 bp, Zea mays
  misc_feature (78)..(78): n is a, c, g, or t
  misc_feature (305)..(309): n is a, c, g, or t
  misc_feature (318)..(328): n is a, c, g, or t
  misc_feature (335)..(343): n is a, c, g, or t
cccttctggtctctacggccgtggccaaaggacctgcaggtacgtgtgcttgccgagatttcatctagctggctactngcttgattggacgaaataaagcaagtacgtacgcatgatgctgctgcgcgcagggccgaagaagcagtgctggtgcggcgagtgcaccagctggtcgggcgtgtggacctgcgacgacctcctcaccaagtgcgccgccacctgcaagaactgcgtccccgtctccacggacaagggcgccaccaagtacagatgccgcgacttcctccccgaaaactgcggctgcnnnnnccactagannnnnnnnnnncggcacnnnnnnnnnatccttc

SEQ ID NO: 3531 - DNA, 474 bp, Zea mays
agatgaataaatgcaaggcataccttgtcaccaggtgtcgaattgaagtcaccagcaatgatcactgaaggtttacaattatatttatttgagatgagttgctcaaactgagatactctcgaaagaagatattttgcctgagccaactttacatcgatccattgtgggtccctacagagttatgcatcaaccagaaatttatacatttgctggacaactgccaaacaatgtagctgagactaaaaacaacaaaaatgtgcagggaattgtgaaagcaaattccaaagagagtaaaattctgtttcacttgccaataaatatgtgtgtttgccacaatcaaaatttgatcacaaggatcactaagcttgaaagccgcgagtaaaccaacacagtcccgcttcaatctaacgcgtggatcatttggatctccacgcttgctattatctggctttgcattcttgtcttcttctgctg

SEQ ID NO: 3532 - DNA, 219 bp, Zea mays
caaatctacacattgaggaatgcaccaaagaaaaagaaaaaaaaaggcgtatgagatatctcacagaatagtacactacagacatagtaacaaggttcctaccagcctgcctggatacataaatcgctattccatctattaacttaaaccaaagaagcatacaatgatgtaccacaatataatatatgatgggcaaagtacacgcaccaatgttagcaa

SEQ ID NO: 3533 - DNA, 422 bp, Zea mays
gagcttgttgtggttgaggtccatggcgaacaagctggcaggccttctgcgggagctgttgtagtcctccaccgtgatcaccaagctatggagttgtacaaccccccaacattcttatagcctgcacgcacaacccgcacccaaaaaatcagagttggtgaaacaaagaacctcgattttggctgggtgaggcacacaaccaacctccgcaaggcacgtgaccttgccccggcaggttgaggcgtcgatgcagttcaaggtgaggcgtgatccgactcaggaggccacggtgagggtctccggtgggggctaggtcaagcgcgcgtggttgttgagcaggttccgtcaccagttcgtggtcccgctgggccacctcgagcacctcgtcttcgcagcgctgctggaggaggccgaaagcgatt

SEQ ID NO: 3534 - DNA, 248 bp, Zea mays
gtacgtacgcatcatgctgctgcgcgcagggccgaagaagcagtgctggtgcggcgagtgcaccagctggtcgggcgtgtggacctgcgacgacctcctcaccaagtgcgccgccacctgcaagaactgcgtccccgtgtccacggacaagggcgacaccaagtacaggtgccgcgacttcctccccgaaaactgcggctgcaagatccactagactcatccacagcggcacagccgatggatccttc

SEQ ID NO: 3535 - DNA, 369 bp, Zea mays
cgacgcccaaggaggatgtcatctgggagcttcgggtggcggtccacggaggacgtggtggcttgccactctgagagttcgcttgtggcagtcatggcccaggcgcttgcgcaccgtgtagggtacgtctgggtcgctaatgagaccagcggcgcgctcgtcggggtagtgagattcgccgacgtgctcgcggtactccgggagcaactccggcctcagtcggtcagtcccaggtgctagctagtgctatgcagataaaccgtgatctgcgtgtcagctcgcgcaagaatcaagatctccgacgctaaaacagttgctagtggttctcttccgtgtcaatccgtctcagtcaagttcggactgaagatg

SEQ ID NO: 3536 - DNA, 385 bp, Zea mays
cacgggtatgggtgaactctctcggggcgaaaactgtagctctgcccccagagcatggattaacaagccgcaaaactgtagctagtatctctttctctttgggatgtacaaacccgacgacgaagcaccatcagttctgatctcgagcgctcaaggcccgctctcatctcatcccatctcactgtatgtaactctgtatatatgtatgtgtacagacagctacactacactcaattcccctcccgattcctgaagctgcaactggtggcctccgccatggcccatggcgatccccaccatgccaagaaacctcccctctctgaacagtgaacacacattggtggtgcagcagcagcagcagccagacatcattgccagccatagc

SEQ ID NO: 3537 - DNA, 670 bp, Zea mays
  misc_feature (662)..(667): n is a, c, g, or t
ataaaaagagagattactgacagagagtaccatcaggtgtgtaatggaatcacttgtttttaatgatggtccattgtgtatattatattgctcaacagctaacttggtgcactaataaaagctgtaattttgttacaatcataatatattaccatgcagattcatctagtcataccatctgatcactattgaagatgcagcagaaaattacttgaaacataacagccacaatcctatcataattttgtgctctttgacaggagtgcttctttaaaaggacgagtagttgtggctttttgttagcaacatgtttcgtagtatttcaatttctaatgtttgaagttatgacatgcatgagtaacttttaagttgacatgctttggttacgtttaggttgtgacggagatctgcatttctacagaagatgggcacttgctgttgaaaaatggtgatgagccctgagttcgctatgatatgccctgtgaaggtccaccaaggtggaatcgtctctgatgcgtagaatagggtcattcggagtttgggatttggccggtgagaatgagtattgatcaggcagttcaagatagctacagcaaactgttctaggtggctttgtcagccatttttggctcagcagtttttgctgggtgctaattgagcgnnnnnntcg

SEQ ID NO: 3538 - DNA, 391 bp, Zea mays
  misc_feature (299)..(301): n is a, c, g, or t
aacgactccccggcactagtttcagctaatgtaggcctggccattggcgctggaacagatgtcgccattgaagcagccgacatcgtcctcatgaagagcaacttggaggatgtgatcactgctatcgatctctccaggaaaacgtttttccgcatacggatgaactacgtgtgggcgctcggctacaacgtcattggcataccaattgctgcaggggtgctcttcccatcgacccggtttcgcttgccaccatgggttgccggcgccgcgatggcagcttcgtccgtcagtgttgtctnnnggtccctcctcttgaggtactacaagagtccaaagaagtttgacaactgatgacaccgcccggaccggagcgaccaaagcagtgttatta

SEQ ID NO: 3539 - DNA, 373 bp, Zea mays
ctgaacatggcatgcctacaaattataacatgaagtaaaaaggcatgtgttcttaaatgttctctcccctctgccgaaaccaactaattaaacttgggtgagaaaatcgacaatttaggaagaaatactatgttaataaaaggcatgtgtttatcagctaagaacaatattatccgcacattagagatccagtagggcctgacggaggtaaattagaaccttgcagtcatcaaagcagcagactaagaacagttaaacacatggtcgtcacacaggcatcaacgaacgtagagcgtcttgatcctccaagtttcagatttgctactgcccttgaagtccgatgtaggggccactttaacatccgaatgaacct

SEQ ID NO: 3540 - DNA, 417 bp, Zea mays
tcatatcataaggttgctggaataggatcaggccattgcaggaatccagtaagacgaggcgatggatcccaggctgttccgtcaggaaggagatgaagcctgcagggtcgacaacgtcctgaggcacggatcctactgtcagtggcaggtccaggaagctgaagctgtggcggtccttctctggattcatgtagatgagtccctgcatgggttggcggagcttcttacggtggtcgggaccggcaatgaggtcgagccaggccttggacacgcacttgaaccggcagatggacttggcggggacgcgggagaggatctccacaaggaggtcgtcgtggaggtgggccaccaagcccgcgcctgcctgcttggagctgcggtcctccatggcacccatcgatgaaattaacgatcaga

SEQ ID NO: 3541 - DNA, 429 bp, Zea mays
tcttatctaaaggtgcacaaaagaaaaaatctcctatagctactgcttcaaagacacatggaggctctccaaaaggtatatatgttggttctttctgattagttttggttctttcttatgttgcttatgtgctgatttgcagggaaaacaagagcaaattggaattctatgttagagaagacccttgttgacttgttacatgaacacaatacacctgaatataagggtaacaatggttggacacccgatgcatggaacaagattgccaaggaatttcaagagagggaaagatatgcaggtttctcaaaagttcaaatccaagaaaaggaaaaggagttaaagagagattacaggatgttgaaagatgcgaggaaacaaagcggagtttcttgggatgagaaaaggtgtatgattcaagctgatcccccg

SEQ ID NO: 3542 - DNA, 397 bp, Zea mays
atgtacagcagctgactccaagaacctgctgctgctgctgccaggaagtggtcctgttctggagccacctgacaattcttcttctgctgctgctgctgaagacgccaaagtacatacgccacttgcgcctattccaccgatgcagtggctgtcagagaaagggactccacctgcatctcctaaacacagaacaccatgtttccagcaacaatttggtagcagtgggcaatctgatgagaagccaagccaagagcacgaggcttcagaccacagcagcaatctgctgcaggagagcgtgttcttctctgcggcacaagagctagcgaagatgtcccctcctcctccttgggtgccaaggcccaaatatccactgcttgatgttaaggcactacggaat

SEQ ID NO: 3543 - DNA, 305 bp, Zea mays
tatatttgacaatatgtgtttcttttcatttttctcttgcagattcactaagttatacatccataatatatgttgctatcattattacagttgtattcattattattattgtagaaattgctatcatcaagttgataggtggacaaattccaatgcccaagttatttcccaccgttaatgatgtgaatgtcataggtgtataaatgagaaaaaatgaataattggttaggaagaacgtcagggacaccactgacaacggctggtcaattccccttggaatttacgcttctctttttttattgctt

SEQ ID NO: 3544 - DNA, 374 bp, Zea mays
aaatcctactgcgagaacgccctgcgtgtctatgccaagcccgcgccgggtgctgcccctgatgagatcgctggaggcttaatggagattgctgccatctatgaggcgcttggcgatctcgatgaggccctaaagcttcttcagagggcactcaggttgcttgagggctcaccggggcagtggagtactgttgccggtattgaggcacagatgggtgttctgtactacatggttgggaggtatgcagattcgaggaactcgttcgagagtgcggttgcaaagttgagggccattggtgaaaggaagtcggcatttttcggcgttctgttgaaccagatggggctagcttgcgtgcagctgttcaagatagacga

SEQ ID NO: 3545 - DNA, 356 bp, Zea mays
ggtgagctgaatgaaattggccaggagaggaaacaatcggtctataaaaaagtttatagctaatttagatataagatcatactttcttatgattgaataattctctgtctgtgttctaactgcgtcctttctcagtgttatactgtcccaatttacagaacaacagatgaaccgtaatgagtcattccgaagatagttgaagtccagtgttattaccgcaattaatatctacctctccacattatgccccttatcttactccatcagtacgaatggctgatattaatgtgtctcatttttagttaatctagctgttgtatctaacttagatatcaggctgctgaaattgcttaaag

SEQ ID NO: 3546 - DNA, 520 bp, Zea mays
  misc_feature (478)..(480): n is a, c, g, or t
aaagccacgaaggacattgaatcacagttggaaaaggtcactattgcttgcacttttgctcatggatctggatctctctgttttgtatcgtttaaacatgttctggatgcaagtcatgagaccactgcgttttttgtttggtatgtacattccttctcgttgaaggacctaacacaaaaacacttttatgatattcctatatagatctcctctccattgctgattcttcacggagccgcagacatggtaaccgattctcaggtcagcaaattcctttacgagaaagccagcacgaaggacaagaccctcaagctctatgaaggcagctaccattcaatcttagagggagaaccagatgaccggatttcaactgccattaacgacatcatttcatggctagattcacactgttaaatacccctttgtctatagcctctcatgtcctcatccattgttttggatttatagttccttattnnngtaccatgggtctctagtgctttaaattttgccatggtgt

SEQ ID NO: 3547 - DNA, 362 bp, Zea mays
agtcttatacttatcagaagtaagtttttgatcctctattttattacagattttgtgattccagatctgttgacctcaagccagattgggtacaaccttattgttgttttgttgaccaactatagaaagaaaagctaaaactctaccctctgcgcccaccttcaaggtcgctccctatcttccttcactctccatcaaagctttgctcgcatcaaattaaatttcttttcgttacaaatttagcttcattatataatattttgctcagtgaattgatcaagtttggtgcacgagtgtcatgctcctaggttttgtactaattgaagaagtagcaaatgtagttcgtggtggtggtttaagtc

SEQ ID NO: 3548 - DNA, 380 bp, Zea mays
gatcgattcgatcgtatcttaaaccctcccccctggcccctgctacgtgccgagccgcccgcgcccctctttggcgacggccgtgcgcgcatatgcatggccctcagctcgaaaacctcgcgctcaccgtccacttccggcggcggtatccgagccaccaacaagcatgggggcgggggccactgaaatccaggctccctctttcgtcttgcttgcctgctgcgtgctgcctacgcactcactgagctactgcaggctacagctgctcgtcgttgggcttgggcgttaggtacgtgggggcagccaacaagcacacgctgccattgtactcagctccgctgaatagcgcctgattaagtggggctctagacaattatatt

SEQ ID NO: 3549 - DNA, 424 bp, Zea mays
tggaggtggtggtactggtaggcgtttctgtggtggtagtgcctatccttattcatgaaggagaacctagaagctagaagccttgaaaataaattaaaccctcgagatgactaacaaattgccatttaacggatttttttggtatagctgaacaggcggtgtttcagctggaaatggaaacagggggaatgggcagcggcctgtaacgactttctgattgagcttgcggcgctcttctttctcgacgtatagacggagttctgtgagcagtatggaacctgcttgggtcttgatttgtaaatgggacgggtagaaagcttagtcaaataactattgcttttggcacttatggctgtggttgcatttataggcaacccagttgtacagatggtagtgtacaagaattttgctgtgctcttaacat

SEQ ID NO: 3550 - DNA, 414 bp, Zea mays
cgatgtacctaagctgaagcaaatcttgttggcaatacccgagagtcgatacataacccttcaggcaaacgtgaaaagggtgcagaagcattttatgtggcatccgaatcctgtcaagtatgacattttccacatgatactacactcagtctggtttagcagggtgaaccagatccgttagagcagcacctgtggttcacatgcctgaattacatatggagggttgtttgctgacccgtttttggtgtgctcgtctgaggaagctgctcatgtggtgggatttggattgtaatcttgtcgacacagctgttccgtgctcaaggtgctgctgaatggagatgttgatctgacagtagaactggcagtctgtggataaaatacagtatatataggagcaggcttatgactgagttc

SEQ ID NO: 3551 - DNA, 790 bp, Zea mays
gatgtcagtttttatatgtaaattagattctgaatgcttcatatttatttgactttttgttggggttgtacagtactagaagtggtggagcacatggacgatatggaattggggactggacatatcttcaatgcagagagtacctgatgagtgtatgttgacgtgttgtagaggttttgtattctattttttctaatagagggatgaatgtatttccaatttgaaggaattataatttgcaggaaaaggacaaaaggagggcatttcttaaaatctgcagcaactttaggtctacttccatttgccaatgacccaacatttacatacatgcatgatgcgtccatgaaaaccatatctagtgtttctctaactattcccccccccccccccccttttttacaataaccaggcctgtgatgcaccacttctttcttgaaagattcttgctgcctgctgattggttccaaagtagacttgcttacacaaggagtgtagcagcaagctcgatggtaatttcttttagtcatgtgcaacttgaggagcttcgtggactactgagactatatgttgcctattgtttttcatggattcaggtaggatatatagtcggtcttggggatcgccattccatgaatattctcatcgaccaagacacagctgaggttgtacacattgatcttggtgttgcatttgaacagggtctcatgcttaaaacacctgaacgggtatgcgatggaacatgaccttctgtgaatatcaattgccaagtcttcctctgtagaacactttt

SEQ ID NO: 3552 - DNA, 386 bp, Zea mays
  misc_feature (72)..(75): n is a, c, g, or t
ctctcaggccaccgctcggccgtcgtccaggacccccttgtaggtagtgcctccccatccgagctcatgcgnnnnaaccattttccggatgtacagctacagggagctggccaaggcgaccgaaaagttcacgcatgagctcggatggggaggcactacctacaagggggtcctggacgacggccgagcggtggccgtcaagagactgggaaacataaggcagcacagcagagaggagttccacgacgagctgcacgtcatcgcaaggatcaaccacatgaacctggtaaggatgtacggcttctgctcggagaggtcccacaggatgctggtcctcgagtacgcggacagagggtccttggccgacgtgctgttcagaggcagag

SEQ ID NO: 3553 - DNA, 380 bp, Zea mays
cagaaatacgcacaaatcgaaccaattatgaagaatgtatccaatttccaccagatttgatgtctagtaacttaatagtttaatgttgttgagacttgtgtaactgccatgctgtttctgaaatttactctataatggtgcatcatctgccaacgtagcatacacctagactagagtagtaccaagcagcaacagttaccttccctccctggggaaaaaggcgcaaaaaggaaagcaggcaggcagcaaactctcaagtagcagcggcagctccaggctccgtctctggctgcgctgctgctccaggctccttgctctggcagcgttcaaggtagcactgcaggatggcaagcttcgcggtctcaaaggcacagtagcct

SEQ ID NO: 3554 - DNA, 376 bp, Zea mays
tagagtatagtttacgacaaaaggtgttctaggaccaaaggatcgaagagtgcggcctactgtacttgaggattaggaatatggaagatagggttctcctaagacctaagaatagtagagaagcaagggttaatagaagcaccgctgatgttggtccaatctagctgggctggataagaatcgggaagactcgggcaaactggcaaacatcggatgagattgcaccttacaacatagaaggaagaactaacataacaatcatctcaaaaatccagatgaaggagagaaggcagcatacaaataataaatagaatatctagggtggtaacacctgcaactcggcaaggagaaggaatccctgtagtagcgagcagtg

SEQ ID NO: 3555 - DNA, 391 bp, Zea mays
ctgggtctggggtatggtgaaagaagcactatttgggaagccagtgaacagtgatctgactcaatcaacttatgtctacccaaccattttgattgcacttatctgtgcattcatgtcgataacttacaatgtaaagaagacagcaagaagtagtactcctgtttctatcgctaagccactgataagttctgccaagtcaaaactgaagtagacttacaagtttaatccttgtaactcttttgagatatttatttatgtgcaaaaaaaaacaggtttgaggatgacctgatgatgcttttggtgtatatctgactctttcaatactgtaacattcagttttctttattgtattaacaattcgcaagggcacaccgtctgtaatgtttacaaa

SEQ ID NO: 3556 - DNA, 387 bp, Zea mays
tagcatgaacctgtcccacgtcaggtcactgactgtgtttgagagcctggacaaactgcattttaaatcactcaaaactagaatggttcaagtattagacctccaaggctgcagaggttttagggagagccatgtcaaggtttcagacataagtgaaatggttcttctcaagtatctgtgtctccgaagcacggacataaaatatcttccccggaatatacacaagctcaagtacttggagactatagatataagggagacagaggttcaacggttgcctgcaactgtaggaaagcttcaacgaataaagaacatactcggtggagataaaagagcaaggaaaaccctaaaacttcctagagaattcaagggaacaacgagaacctt

SEQ ID NO: 3557 - DNA, 388 bp, Zea mays
gctgcttggcagctcgtgcttcagaaagtaggtaagaaacttgaatgtccctttataaacacgccaattcggatctagtggcaaggtattgttatcagtgactatcaattgcatcaccatcatgtctatagctgcacaggatgatgcacgacagaacgagggatgaccattttatactggcagcaatactagttagtactaatcaagattctgacacgatcacactattaatttatgccagcattgcttattccgcatcgattggatttgttccggatctcgatctctttcaaggcatcagcagattcttgatgctcttctctgtcctctttgcagatgtgtgttttggaagttttttttccctttcgaaaagctctttgcagatgtg

SEQ ID NO: 3558 - DNA, 530 bp, Zea mays
ctcgatccgcaagtctgaacggacgactccgaagcttacttgccagagagcagccgtttaggtggcggcgatccttccgtggttccttctcggttctgcctgcctgctgctgctgcttcttcttcttctggcggggccgaatcgagagcgtgtccgccggaatctctcagtcatcaggtcagtggaaacgaggctccaaaaaaaatcccctctttcttcttcactctccccctattccatccttcctgaggattttcttctctgcttcattttccgcctcttcgacgagtcctgttcttgttcgttcttgctcctcagtgaatgcgctgcttcccatttcttcccgaatcgctttcccctcaatgctgatccgattactctcactcacaggcaggctgcagcctacggcggtcgattctactgggattctacactactcgctcaagagtcgagactgcatgcggctccaagggaaattaattaagatgaggtcttttccccacctgctgctgatcctggcgctcctcttg

SEQ ID NO: 3559 - DNA, 431 bp, Zea mays
gaaggagagcgaacagccctgttcacactgcctcaccatatgattccccacacctgccaatatcaaatgggaccattaacacaaacttcgtaagaaatacaggtgatgtcagtccgaggataccagggctacctggatatgatcgaatgccaaacacatggactcctcccaacggcagcataccatatagagttgttgggcatgatgttcatgctgcctccatggaaaacactagtgcctttggtcctaggtctaatccaactgctgctcagtatgttcagcatttcattgctcctgaatcaatccagcatcaacctggagctccattgagggaggttcatcctgaaagatcataccctgaacccatgccgtcgtcatatgttgatggcaaagtagctgtttctgcattgcctctcactgatcaattatcc

SEQ ID NO: 3560 - DNA, 1006 bp, Zea mays
aaataatattctgtaggaatgactgaaccaatgtaaatcattgatatttgtatgttcatcaaatcatcacaaatagctttacatgtcattaaaaaaatgcaggttcttaggtcatttccaacctcagcaagggaaacctgcactgtggaagctggactcagatcagcattacaacattgggaggcaagggactttaaaagaagagattggaaggtgcagattataagcttccaatatttcttgaaatagctatatcttatattcaccttttgtttatacactttgcattttagtgatggtttactacttaacacaagcatttttctctacttcagaaaatcgcattttttcacatgaaaaagttagctaggattttgatgtattgaccatgaatcaatagaccctatttcaaagtacaaatcgagttttttttaccctgtttcaagaaccacttgttctaagagaactgtgtcaaaatgattatgcaactgatataatgcttgggaacactggatattgtttaaaactgcaaaggcaacaagaacttaggacagcaaaaactagatacttttgcagtctggactcaatcggtagttctgccaattgtgctactgttgtgctggttctttagactcttctaatttttatcaatcctcatcttgttttaccagatcgttcataaagaggtcactatcagatggtaacatactgttggagaacaacttgcctgtaactagctgtaacaatgaaacaaacaacacagaattgcttccaatgcaacagctggatgatattagagaacctaccgactctgcgccagagatctccatatgtgaacctaacccgtgctccaggtgcgtcattacttgcatgaatgtggtgggccacttgaatttgttttttttacgtgaatgcaatacgagctaattgtgtctgtttatacatcttcagtgtgaactacggcagagtgcctggaagacactctatttcagaagagcggcagagt

SEQ ID NO: 3561 - DNA, 356 bp, Zea mays
acacgtcggagcgcacggagaagaggccctccatggcgtactcgggtgacatgtaccccagcgtgcccacgacgcggttcgtgttcacctggttctggtcgccgccgaagatgcgcgccatgccgaagtcggagatcttggggatcatgtcgtggtctagcaggatgttgctggccttgaggtcgcggtgcaccacgcggagacgcgagtccctgtggaggtacaggagccctcgggcgatgccctcgatgatgtggaacctcgtcttccagtccagcaggcctcgccgcgccggatctgcagcgcatgcagagaccatacctcacccatcagtgtgtgagtctctctctgcacag

SEQ ID NO: 3562 - DNA, 612 bp, Zea mays
  misc_feature (587)..(589): n is a, c, g, or t
  misc_feature (594)..(606): n is a, c, g, or t
gctcttcagcgacagcgaagaggtgaaacgtggagcttccaagctggggcatctcctcgctctcaccgtatgcgtcagcagcatctggcctgtgctatcaggtaggcagttttttgctctggagtctggactctggactagacacgcgcggctccctgcaagttcatgtgcgcaagattcctgtctgttttctttcaggcgtggccgtaggagctgggtggcaagtgcgtgtggcgatcataaacgtcggttgctactacctagtgggcattccgatgggtatcctgcttgggttcaagctaaaacacggcacaatggtaaactgaaatcaagttaaaaaaggacgatttcctgtttattcagtattaaccacaatatgatgtttgatcagctgaagcagtgttcatatccatttatttgtggaaatgttcaactttgcagggcatatggatgggcatgttgtcaggcacgtttctccaaatgtcaatacttctcgccactatcttcacaacaaagtgggataaacaggtatgtaccacatctacttcttcctgcaatgcgtttccgcaaatattcgtacaaagatnnntagcnnnnnnnnnnnnntgacta

SEQ ID NO: 3563 - DNA, 403 bp, Zea mays
atagcattgaaccttgttgcattcatctatcaaagatgcaccaatttccatcgttccatgctgagttaaatatctattatggtttccatgctttgtggtctacaattacaaaaggtgattttagtttcatataggactgaaggagccatgttaccgttctgtacgaaaagaaatgctactgcattaaagcattattgcacacatcaaaagcgagttgcagccgtaagctgttctgattttctgatggccatcactttgcaggtacctcgtccctgcagatcttacagttggacaattcgtgtgtgttgttaggaagataatcaagctcagtgctgagaaggctatcttcatatttgtgaaaaacacccttccaccaacaggtctggaaagtcaatgcagaaac

SEQ ID NO: 3564 - DNA, 456 bp, Zea mays
  misc_feature (285)..(287): n is a, c, g, or t
  misc_feature (303)..(307): n is a, c, g, or t
  misc_feature (319)..(319): n is a, c, g, or t
  misc_feature (327)..(328): n is a, c, g, or t
  misc_feature (342)..(344): n is a, c, g, or t
  misc_feature (358)..(361): n is a, c, g, or t
  misc_feature (382)..(382): n is a, c, g, or t
  misc_feature (402)..(404): n is a, c, g, or t
  misc_feature (421)..(430): n is a, c, g, or t
  misc_feature (447)..(448): n is a, c, g, or t
gtgtttcttaataagctatatacttgttattaagcatttaagtccttgcaggataataaggagctgcagcagaattcggctgaagcagtgaaaggcccagtaaaatttgatgaaatgacaggtcttggaggaaatgccactaacagtaacaatgaaatggttgtgattaccgatgagaggcctgcaatttctggacctaattgtcaggaaaatatcccaaacagtattgaggaggtatgttctagtcttcacttagctttatgttagaaagaaccttgcatgcannntaacatttccccattnnnnntcacgtcttatnaagtgctnngatacaaagatggnnnattattttttgatnnnnaaaatcgagtttctccagttnggctactttgatttcatttnnnagtgttatttcactttnnnnnnnnnnaaggttctaattgtganntctctgct

SEQ ID NO: 3565 - DNA, 425 bp, Zea mays
tcagcacctctttcctatggcgggaggaaggctcgtctcgggcgtcttgtacataggatcagcagacccatgaaaaccgcattgtccagaacattcagcaggagctcacaaaatccaggctgggttcaaaagtttctctcgcatcctatggctcaactgccctgggcaagggacgcaaagtccagatcagaaggctcacagaatggcttggaacccgggatacctgaacatgagtataatgtgacaaggaaccttcagtgggctcatggaaaggcaggggaagatagggtgcatgttgttctatccgaagagcaaggatggctattcattggaatttacgatggttttagtggccctgatgcacctgactttctaatgagcactctatacaaggccatcgataaagaactggaaggattgctctg

SEQ ID NO: 3566 - DNA, 374 bp, Zea mays
gtggtggtggtgaccaaccaggtggtggacgtggtggagggggacgccgggaacaccgtggcgtggtcgtcggggcgccgtctgagcccggcgctcgggatcgcctgggccaactgcgtcaacacgcgcctgttcctgacgcgggaggtggaagggaatggcaccagcgggagcgcaaggaggtggatgaaagtggcgtttgcgccgcacctgccagagcaatcgtgcgagtttgtgatacggagggacggcgtctttggcgtcgagccggagaggtaggcgctcctcttggtcttttgtcaggactttacagaggaagtgtgtgaccataacctgtttgatgaaatgtccccgttggtagttagatttcacac

SEQ ID NO: 3567 - DNA, 360 bp, Zea mays
tgcttgtgtttttgatggtgtctccccaaattcgaatgcagttctgcaacagatccaggaggatgccaggctttgggagatggcaggtgctaaggctctgagaaggctgtggccttaatttaggggcttggttcacttgtttttttgttctttctttttcttcctttttctcctttattttcttttgtatagctgttgttcttggtcttctttagaccttctctctacttaatataatgatgcgcagttctcctgcgtattcgagaaaaaaaaagtgttgttgcatgcctgaatagtatttttagcaaataatttaggtagaagggagcattaagataaatcccataactggaggtttgc

SEQ ID NO: 3568 - DNA, 360 bp, Zea mays
  misc_feature (259)..(264): n is a, c, g, or t
  misc_feature (270)..(277): n is a, c, g, or t
  misc_feature (287)..(287): n is a, c, g, or t
  misc_feature (296)..(297): n is a, c, g, or t
  misc_feature (328)..(333): n is a, c, g, or t
  misc_feature (345)..(347): n is a, c, g, or t
cgttctgttggacttgagggggcaacgtaccatccaagcatgccggggatgtctggtgaagctctcctgacaagatcagcaacttcagttagtctaggttaccatgcatcaaccttcggtgggctacagagcaatgggagtgaacctctctttgggccgaagtctgcaagaaatctactcaggagcgataccttttgaggctatatattcaagagaagttaagtacaatggcaggccgagttttcacagtaacggcacnnnnnnccttannnnnnnntggaccattnctggactcnnattctgctgtgacactcgctgtttaccttannnnnngtacctggggtnnngtcctttgctcgt

SEQ ID NO: 3569 - DNA, 400 bp, Zea mays
accaaatagcactggacgatctgagacagaattagaacaccgtcctaatatacacatggacacacactacaaaatttgttttgagccatacagctcagtccaaaacaaagatggctggcaccaggtggtgcccaaaaccagctttctctccatcactgtccatccgtgcctacagaaccggaacagcctggtccatggagacaatagcgtgtcattttcagtgcaagctgggtgcatctgatgcgcacgagtgaacttaattcacagaccccgtccacattagacacctttgtctcaaagtatcatcagtccagcaaagaccagccgtcggtctctgccaaataccaaatgaaaacggcgactcctacgcggttcatcttctctcgaccttctctgcaaa

SEQ ID NO: 3570 - DNA, 399 bp, Zea mays
tggcacaccaaggcgaccgtcgcctgcagcattgcagggtgtttgccatatctcagcatatggatggtgtcgaggtggcccgggcgcatacctagttcagacaaggcgactcggctgctcaagtttgctgcaaatgtgtgcttgactggagcttttctgatgctgtttgccttgcttgatgaaaaggcactggcctatcgtctctttggtttggataagattactgatcctagtcaactcaaatatcttccggctgttcacttcagtacagcggtagccctgtatttctttcggaagcatcgtgctcgtgcgttgccagatctaggggaggagctagggaggctccgatcctatccctccttattgctgcttctccaacagagaagcaagggagaaaga

SEQ ID NO: 3571 - DNA, 445 bp, Zea mays
gtgatccttatgttcctgctggtgctaaactcctccccagtctccagagtaatatgttccagagctatacacactgtcttccttggtctggtgaccgcacccatagattctcttacctcaccatggccaagtcatctggagcagttgtgcatctgggtaaggcttgttctatgatcaccatgtgacactgaagctcaccgagttgatgctcctaacgctatgctgaccagaacagggccatgccaccgtggtctggcgctacggacagcctccacgccggccgagcgactcacgctttctccggccgtcttcacgcgagcaccaaagtcttggtgagtccctggtgctccctgtgtctcaaatttaaactctactatatggtggccacgagttcgggctcgctagcctaaggctgtctccaatagtggagtctcaaacaggagac

SEQ ID NO: 3572 - DNA, 601 bp, Zea mays
tgcattgtactcttcagatgtgaagttggtttctcggtctgatcttttatcgtctatcttcaggtagtgtcacaaaggtaacgaccatcccaaataccagcttgttcttaaccggaagcaaagatggagatgtgaaactttgggatgctaaaaactcccagctagtctttcactggacaaagatgcatgaacggcacaccttttttcaaccaacctccaggggctttggcggtgttgttagagtatgtagtactgtaaagactataaaatgtttaatgacttcgttcataaattttgttcatgttatggtaagagaagatagttatatcacattctctttcattaattatatacctatgtatttgcattttgcaggctgctgtaacagacctccaggtgttgcctaatggtttcgtttcatgtggaggtgatggttctgtgaagcttgttcagataaaagatgatctcgctgcagcatatcagcgttaaaacaagcaaagagggaagaagacatgctagaaaatgcgatggatgcagttggtcacttgatatcattctattttgctttgctcattatacttttgagatgctttactccttt

SEQ ID NO: 3573 - DNA, 356 bp, Zea mays
ggtccccaaaggtcaagaaagggcttattatttcattattcttgtggcatggaaaatttagaaccgttgcaacaactgtgtcttcaatggggtaaatccttatatatcaaaagtgctacaaatagagttcataatccatactctggtgtgctgctcccagctggaccaaaatgactccaggagttacttgccggggcatctatattccatcctttggtgtgctgctgcttgctggagcaaaggcacccccagggcattagccattacattagactagcttttctgtcgtctggttgcttgctgcatcaagcttgctgatgttgttagttgttacccgtgagagttgtatcttgggt

SEQ ID NO: 3574 - DNA, 400 bp, Zea mays
ctctgcgccggcgtcggaggcggatcgcttctcatgtcactcagagtggggctccagttcgatgtgctcggcatagaggccgacggcgtcgtcctggatgtcgcaaggagccattttgggctggtggaggatgagtttctccgcgtccacgtcggtgatgccatacagacgatagagggtttcgctgctgggcaaggggagcctggtatgaacttcagcgcggtcatggtggacctcgactcctcggatgctatgtgcggcgtcagcgcaccgccgctggagatgtctcgtggaagtgtcctcctctccgtgcgcacaatcctaaaccatcacggagttttgattctgaatgtgattccacctcctgctgataagaccttctacaaagcggtgactgatc

SEQ ID NO: 3575 - DNA, 541 bp, Zea mays
ctgcatgtttttatttttttgtatacgcgctacatacatgcttgcatggatgtgcagcaaagagcatggggttcgcgtctagtcctccgccatacctgtcgttggcacctagcaccggccgtctggtcctcacagctcgtggcagcggtgtcagctatgcttccggaggagctgggatcctcgactccactgtaatacagtagtgttatttcattcatgcatcgtgtgttgtgtctttaatttatcagatatagcgagatcaaaaatgtaattacgacctgaaatgcagaacgcgggcaacaacatcccattgtcgaagcaggtgcagtacttcaagtccaccaaggcacagttggtcacgaagctgggctcccgtgcgacccacctcctgctctccaggtccgtcttcctcttcagcgtcggcagcaacgacctgttcgtcttcgccaccgcgcaggcgtctgcgcacaacaacaagtcagctgccgaccagcagcgtgacgtcgccacgctctacgcaagcctcatctccaactactca

SEQ ID NO: 3576 - DNA, 398 bp, Zea mays
ctcgctggggctgtccaagatgggcttcgtggtgtcgtccaaggtgagcgacgaggacgaggccaagaggtacgagcaggagatgatggagttcgggacggcgtcgccggagtacgtgatcgtcgcggccgtcgcgctgctcaacctcgtgtgcctggcgctggcagcaggcggcggcaacgggatggcggcggcactggacgtgttcttcgtccaggtcgctctctgcggggtgctggtgctcctcaacgtcccggtctatgaggccatgttcgtcaggaaggacagggggaggatgccgttcccgatcacgctagcctccgttggctttgtgacgctggccctcattgtgccattcttttgactttgaggtgctaataatacgtgtacgggcacac

SEQ ID NO: 3577 - DNA, 558 bp, Zea mays
ccgagagctaccaccaccgcagcctcttccaagccgaagccgaagccgaagcccaagcccaggtccagggccaagcctagggcgacgcctagccccgtctccctgctctccggcatctcctctccttacgcgtgccgcacgccgtcccctgctgccgccgacctcagcttcctctcgccctcgtccccgccggcggaacccggaaccaggaattcttcgcccctcgccgcccccactaccaagtccaccatcggagacctgaggagccttgccgcgtcgcacctcgactccctgaagcgccgcttggacttgctccacggcgactatgtccgcgaccttgaggcctcccactcccgcatctccaagcgcgtcaaggtggctggtccccgttccctgcctctgcgtagctcgctcactccttcggttgcttcgtcgagttcatcatgtgcgatgatgtgatgactgatgtcatcttctcccgcgtgccctgcgctcagatgcagtcccatggctgcctgcagctagcagaggaagtggacaaggagcagcagaagataa

SEQ ID NO: 3578 - DNA, 434 bp, Zea mays
tagcaatcgctcaacgagacatccccatcctggggaggaagttgattcagaagccagctccggaggcagaagaccaggccgctctgagcgctcgttcgttctcccagtcccagcagtcgagcaacagcttgccaccgtatttcctcaccaacctcctgcagccgctgccgtcgcagcactcactagctcaggctctgccgagctacaacaacttggggttcggggagcccagcttgtactggccctgcccctgcggtgacccgggggagcagaaggtgcagcttggcagcaagctggaaatcgtggacggtctcgtgcagctggccaactctgctgcgaactgacagtgctatctgaaatgcctgttgttttgcttgtgtggctcggggtcgggggttacgttcatggaactgatagcctgagccctgaagata

SEQ ID NO: 3579 - DNA, 381 bp, Zea mays
gcaccgctgcgaactcccagcgttcttgctctgctccaagaaatatcaagcgctgaacagtcatcgttttgttgcgacgtgcgtgtgcgctactcgccccacgtcgtcgtctttgtgtgtctttgtgtctggccagtcccgtcgaggcatctgcaaatcttgcctcttgtcgtcatgttttcttgatctgccaaatcatcgcgcccgtgctgagttctctggccatcacgtttttcttacagacgctcagcctcgccgcgcgtcctgttttctgctcgccagcgcgccctctcggctcgctcgactttaattcccaatcgcgtcgtcgattccgccagttagcgtcgttcgtcgtcgcgtcgcgtgtgtagctctatatac

SEQ ID NO: 3580 - DNA, 578 bp, Zea mays
  misc_feature (353)..(358): n is a, c, g, or t
  misc_feature (360)..(575): n is a, c, g, or t
tctgatgtctgagtgcgaaaactatgatttgtcaagagcaaaattggttagcagaccttttccccaacccacttttttcatacctacaattttttactttccatcatttacagttgcaatcaccaggacacatactttgcaactgtctatacttttttcttgcaacttcttttttcatatatgttttccatttttagtaattagttttctactcctttcttgcaccaggtttttgtccctatcaaagatggtgctcactattttgtatattgcttcaattttatccataagcgtattgatgtgctggactcgaacgactacttcctgaattgtactaatcaggaagaacggcnnnnnncnnnnnnnnnnnnnnnnnnnnnnnnnnnnnnnnnnnnnnnnnnnnnnnnnnnnnnnnnnnnnnnnnnnnnnnnnnnnnnnnnnnnnnnnnnnnnnnnnnnnnnnnnnnnnnnnnnnnnnnnnnnnnnnnnnnnnnnnnnnnnnnnnnnnnnnnnnnnnnnnnnnnnnnnnnnnnnnnnnnnnnnnnnnnnnnnnnnnnnnnnnnnnnnnnnnnnnnnccc

SEQ ID NO: 3581 - DNA, 514 bp, Zea mays
caacagttcttcaacattatgatcagtacttgaactctgagctatattctcatatcaaaatctgagaacaagaacaataaactgaagcagatgaggctttaaaatctgtacttgagaggtcaagcacagagaggagcatagacttaagatgatgaacgtaagtcatagttttaaaatctgtacttctgaccactcgtcattgtctccatttgagacagaaggaatttctgggatcaagtaaagagttgtgttatgaacatatagatgagatgtcatagtttttacagtagaacaagaacagtggcatccaaaataatagcaaacctgaagatgatgacttggtcaggctttctcttcccagaactggtgtagaagtcaatcagacactccctgcagcaacattaaaatccaacaagcaatgggagaaagcatgtcattagtacataacttaacaaatgtaatgcaggctaaaatatcttacctgatcagaccatcatctttaccttctcgtggc

SEQ ID NO: 3582 - DNA, 348 bp, Zea mays
gtcgatgctacctctttcgctctcactgtcactccgtggcggcgacatcggcggcgaggatgccgggaggttcgaggcagcggcaggtagcggcggcaaaaaggccgctctggggcggagcactttggatctgaccatgtcgatcaaggcattggagtgagaagatgtttcacggccgctctggggggtgagtactttggatctgaccatgtcgatcgatccatcaaaggcattggagtgagatctttcaagtactcgtcccaaggccttccaaaacttgcacactgcaccatgagattaattaagtcataagactgtttgtttaagttaaccatgcatgagcagatc

SEQ ID NO: 3583 - DNA, 444 bp, Zea mays
cacaaaaaaatcaaagaaaaatattgatcacacttcacacgcgttgcccatgcgttggtctctcgacgactcgacgcgtataagaatcctcatggcatactcatctgagagtagcctccttagacactcccagtggtggtcgcaaagcaatacatgatcgcctgcagctgggatgcataagtatacaggttgcatgcagtgatacatatatacctattgattgatgtgtgtagactgtagggtatgtggacgtgttcctcgatcgagctagcttcagttgaacttgatggggtagacgcgctgcatgttggggtagaagagcccccagttctgctccacgccgctctgcttgaggttctcgttgaacatggagaagaggatggtctcgatggcgcccgggtggcgcggcgttccccggccgacgtggttgatcaggttctggtt

SEQ ID NO: 3584 - DNA, 414 bp, Zea mays
taaggatgttgtggagaggcttagattgtttaatgacattactacactattttttggaactgattatgtcactgctaacgtctacttcactagaattgctaagattagaaatcagattaggttgtggtcatcatgtggcaatccgttggtagaagaaatgttagtgaatatggtagccaaatttgacaagtactggactgacattcaagggctcatgggcattgcaactattcttgaccctcgattcaaaactgcagtcctattgatatgttatgaggacttacttgttgtgtccggtagtgaatgtgaagatagagttgctaatgtgaagaacttgctagctgatttgatgaatgagtaccatataactgagaatattgagaacaatgagtcatcaacaccatcagttggaaa

SEQ ID NO: 3585 - DNA, 401 bp, Zea mays
acccttggatctgtgtttactcaacagaaatacaaagacaaattagagagtcagtcttgaaggctcttaactttttttagaacaaaatgagaagaaaagcaagtaccttattgcttctaacttggatgccatcatgtttaatggcgccaaatctcttgaactcttcctctagttgttgtggtgtggcatttaatggcagacttcgcacatatatggcatgtgcatcaactttgaagatgattgaaaagcatgtcaaatggtgctggtgccaactgaaatcaacgttttagctccaaatttggatatagataataccttctggatcttgaaagctgccgctctggggattaggggtgaaagctggagcatcagcgaccagagcgggggcaggagaggattgc

SEQ ID NO: 3586 - DNA, 527 bp, Zea mays
ggacgccggggcctctggtctcatctttgctcaatactacaacattcatatcatctacgccacaactgattgtagaggcattgcatgtgttcttgtggacttgaccactgcccttcagatcgaaaaatacatggtggatgcaaggtgagttgcaattgcattactctcgacctaattcccgattgagtgaaactgttactcgtacaactcttacctactctctagtttaagcagctctcctgcggccatgatcgaaccagcgcgcaccatcactggtaaggagacactggccccaaccatcgcaagcttttcctcaagaggtccatccatcgattaccctgaagtaatcaaggtacttagacaagaaagcttagccactgaaccaaaccaaaccaaaccactgtcatctcactgcagtctttgcttccttaacagcctgacatcgcggcacctggagccagcatcttagcagccgtgaaagatgcatatgcatttggctcagggacatctatggcaacaccacatgt

SEQ ID NO: 3587 - DNA, 416 bp, Zea mays
tgtgatcgagctcttcgacgataagccgtttgtggaggatgactcaatcggcgtcttggctgccgaggttgttgccaatgttgagcggtcggttgctcttgaatcaattgactcgttggtggtcaccatgggcaccgtgtcatctcaatccggtggcgaaggaaaggaagcagttgaccatggcgatgtaaggcagaacaacgtggacatggagaacacagttagtagcaatgaggagaaaattgccatgccatctgatgataaggtggatgtggttgatcggctgattgatgaacagattgttgccgtagtccttgtgccagcttgtatagaagctacacttgatggtgccataaatgcagacaaaaccgtggatgcctttgctgatcatcagtgtaagtcgttcctcctttggt

SEQ ID NO: 3588 - DNA, 356 bp, Zea mays
  misc_feature (344)..(346): n is a, c, g, or t
agcagcgcggaggcggccgtcgtcgtcggcgccgaacagatcagcagcctgttcagcgacgacaaccccaacgcctgctccgtcatgtgaatgtgacgctgacgcgtcgcccacgtgtgttttcgacacgctgagtccagctctcaggctcggtgggttttagcagacggtaacaggcggcagggagtagccgtagcgtgcgtggctgctactcgtacgtgtggttaaattagtgaagaatgcttaggtcgtcgactactcgactgcactgcgccagcagaacggagagcaaagaagcaaacctctgccactgatagattctgctgatctagtgtgtgtgcttnnntccctaaacc

SEQ ID NO: 3589 - DNA, 369 bp, Zea mays
atcgtccaccactccctccactcagaaagaagccacacgcagacggcacatcgctttccatggtcgcctcccattaaaacacctgttatgacagcttcttccggcatcgttgagatctcccaatctatgtgaaacactcgtcaccgctacattaactgtaagtgttaagttagctgatcaatggtgcatttccaacaaacgcagtatgtttttcactgtctaaatacccaacagggtcatgtcattccaaccagatgctgttttctgcaaaaaaaataaaatgagtataaaaaaaaggtgtgataaatgttgtttggggtatcatattcgttgaaataagaacagatatgaaatgtctgctgcatttgc

SEQ ID NO: 3590 - DNA, 705 bp, Zea mays
  misc_feature (579)..(579): n is a, c, g, or t
  misc_feature (581)..(581): n is a, c, g, or t
  misc_feature (591)..(612): n is a, c, g, or t
  misc_feature (616)..(618): n is a, c, g, or t
  misc_feature (620)..(635): n is a, c, g, or t
  misc_feature (643)..(687): n is a, c, g, or t
  misc_feature (690)..(690): n is a, c, g, or t
  misc_feature (692)..(701): n is a, c, g, or t
ctggtactataggatcatccgcgctttcatgtggccgatccgatggagtagtgtgtagccggacccgcccaaactgctgctatcgtgttgctatctatctccatagaaactggtaatttttatccctcctacagcttctttagcctcactctcttttacattttaccactgccaggattcggtaatactttgtgataatatgaataagtcatcatgtaatctgtggagggaacctgttcttgcaaacttcctgcttcctattgtgtatctgtaacaacaccatgtatgtgaccacgacctcttattttcctataacaacttttacaagagttggtaattgtgctttgatcaatgtaaatttcatattctattctttccaagagtgggtaattgttttctatgtgccaggctcaatattttgaaagcatccatttcatctggttcatcagatataatggttagtgtccccacagatcatgtgtagtatgctattcacaccatgctttatcaaaatgttgatgccccaacactggaacaacatagcactttcttctgttttatttatgattccattgaagncnaaacttgggnnnnnnnnnnnnnnnnnnnnnntttnnntnnnnnnnnnnnnnnnngattgctnnnnnnnnnnnnnnnnnnnnnnnnnnnnnnnnnnnnnnnnnnnnnaanannnnnnnnnntttt

SEQ ID NO: 3591 - DNA, 395 bp, Zea mays
aagcactgcattcaaccggcccggcccggcccctttcaaaacaccagagatatactagtagataggcacggcacacagcaagcggagagttaatttcactactactgctacactacacgcgacgaccattacaataatgcaaagcatgaaacatccatcattatccatgcatggttggatacatgatacatctagctactcgacacgaacgaattactgccgtacgtgaaacaaatggtcaaaattcccttatacacccaggataaattaaagagagaggaaacaagctgcggccggcaataaagaggtaaagaggaaatgcgcattggtggtgtgagccaccgccatagacgtacgtacgcgcgcgcgtcttcgtatgtgtgtggtttcctcat

SEQ ID NO: 3592 - DNA, 395 bp, Zea mays
  misc_feature (1)..(4): n is a, c, g, or t
  misc_feature (6)..(7): n is a, c, g, or t
  misc_feature (11)..(11): n is a, c, g, or t
  misc_feature (13)..(14): n is a, c, g, or t
  misc_feature (16)..(20): n is a, c, g, or t
  misc_feature (41)..(41): n is a, c, g, or t
  misc_feature (80)..(80): n is a, c, g, or t
  misc_feature (362)..(363): n is a, c, g, or t
  misc_feature (366)..(369): n is a, c, g, or t
nnnnanngcantnnannnnnccggcccggcccctttcaaancaccagagatatactagtagataggcacggcacacagcnagcggagagttaatttcactactactgctacactacacgcgacgaccattacaataatgcaaagcatgaaacatccatcattatccatgcatggttggatacatgatacatctagctactcgacacgaacgaattactgccgtacgtgaaacaaatggtcaaaattcccttatacacccaggataaattaaagagagaggaaacaagctgcggccggcaataaagaggtaaagaggaaatgcgcattggtggtgtgagccaccgccatagacgtacgtacgnncgnnnntcttcgtatgtgtgtggtttcctcat

SEQ ID NO: 3593 - DNA, 399 bp, Zea mays
tgatatttgggatgggtctctacggcctcttcatcagcaacgctcccgcgagtgttgctcctgaatccgaccgtgccctgagcggctcgtcgctgttcgggatgttcgctttgaaggtagctctcaggaatttgaaatctcaaacacttctctgcaagtaaccttttgaatcctttagcaatacgataaatcttttgttcatcatgcaggaacgcccgaagtggatgaacatcacctcgcttgacgagctcaagacaaaagtggggcacgtcatcgtgatgattctacttgtgaagatgttcgagaagagcaagatggtgacgatagccacggggctggacctcctcagctactcgatctgcatcttcttgtcgtcagcttctctctacatcctgcaca

SEQ ID NO: 3594 - DNA, 451 bp, Zea mays
acgacggggaggcgccggtgcagcggagcagccgagcaggtggtggttcgggaagttgaggaagcgagcattgaggaggaccatgtccaccgtgcctctgcttgactcggaggacaccgacgaactgacggaagcaggcgcgtcgaaggaacataacaattctcagtgctcgcctcgcctgcccgcaggccgcagtggtttgcaccgcgagagccctaaccgttggcattgcaggaaggaggcggaggttgcgttcctaccgcgccgcgttggagcggcacttcggcaactcaccggcgttcatcgcgtccgcgttcgcgagccaagagcgcggcggcgacacgtccgcggccgcagacgcttcttgtctcctcagggaggcgatccacgtcgtcagctgcgcgtacgaagcgcggacgaggtggggcaaagacgtcggctggatgtacaa

SEQ ID NO: 3595 - DNA, 920 bp, Zea mays
tggtagcttcttacatgggcttgttggttcactctgccatcaccacattatttatgtttcccagttttgcacctaccttgattggatacttgactatccattgttatcaacatcaatctctgcctggaagatgtacttcacgtcataagcattgaaatattatgagccggttatgtcttggagcttatggaaagctgaagtaaatctgaattaactagtcatttaggtttcttttcaggctttgcctttgtgttgcaactacttagttttctatatgcaccattttgttaggattgcaaagaaaaaccatttccttcatcaatctaagtatgaatttgctggttggtattcatctatggcgtaatcatgtttcacatgttatttggggcctcactttctttttattccatcatggatttggaagtatgctatgtttaccttcgtcaatgcctctgggctctggcatctggttttggcagtagtctgtgtctgtcaactcacttcagttttctgacttgcaagtgcgcactggtgtcatctacttgatatctggctttgggggcagtgtgttgtctgcacttttcttacacagtaactacatctctgttggtgcctctggggctttgtttggcctccttggatctatgctttcagagcttattatgaactggactatctattccaacaaggtcagcagaaagcgtattatgtgtgtactgttttgctctagtttttctctctgtttttttggctaagtttcagtcaattcgttcctgcaggcagcggcaatcataactctactttttataattgtaattaatctggccattgggatattacctcatgctgataattttgctcaccttggtggatttgcttctggatttcttattggatctgtgctgctggcaagacctcaa

SEQ ID NO: 3596 - DNA, 392 bp, Zea mays
tatgattgaatcaagttatttgttgcttgtttgtctttagcaaatcattattttgtatttttttgcatattgccaatattttaggataatttttcccaagtgcagattaggtctactatgtgagtgttcagttagatagtcctttgaatgtttctagaaccagttctaaagttgagataatgtgaggtagcatacaaaacaacgtattgttagagatgcatactgtcaacaaacattcattccaggggtcatcttgatggtcatataagaaacactaggagaaaatgacataaattagtattacactgtcatgtttttgtatataaagtaggccatacaacttcactagaagtctagtctagagacagcagtgggctatcagtgaatgctat

SEQ ID NO: 3597 - DNA, 379 bp, Zea mays
ctcccagaactaattggtcattgatttcattccataacaagatccagcggacgagcaagtcgacccgcccttctgataacaagatcctgcggacgagcaagtcgactcggccttctgaggccctgtttggattcggtagagctaaagtttagttggactaaactttagtctggctaatgttagcccattagctattagtcacggggcgtttagacactatggactaataggttgtttgtgtgtttagtcctgattagctcatatttgtggactaattgttagggaagctaaagtttagtcactctgcttgtttggcgacaaatgaactattggcgacaaatgaactaaactttagtggctaatccttgtaatccaaaca

SEQ ID NO: 3598 - DNA, 988 bp, Zea mays
  misc_feature (476)..(477): n is a, c, g, or t
  misc_feature (484)..(501): n is a, c, g, or t
  misc_feature (505)..(985): n is a, c, g, or t
aaactcaagaaatccctgaaaaggttatatgtaacagaagagcaacttcttaaagaaatccatggtaaattgaaactgctaaaggttaagtggtagttatatttgggttgcttttgttatagctctggtgtccattgcattttcttgaagttcaatcagttcctttttcaatttaagctttaagctactgtcgtcagatataatgtagttcaagattgatgaagttaccgatgcagttttctgatttgcgatttactgatacttcataatttagtcaacccatttcagtttttcatacgttcacctaaatagctgcaagtatatttgatcatggagcagaagtttgttgttatgtctacgaaaaagagttgaaaaaacatgaagaaagtgtgaaacctctctttcctagttgcaaactgcaagtcattttctgaaagacttctgtttcatgcataaatcatctactctcattcttnntttctcnnnnnnnnnnnnnnnnnntttnnnnnnnnnnnnnnnnnnnnnnnnnnnnnnnnnnnnnnnnnnnnnnnnnnnnnnnnnnnnnnnnnnnnnnnnnnnnnnnnnnnnnnnnnnnnnnnnnnnnnnnnnnnnnnnnnnnnnnnnnnnnnnnnnnnnnnnnnnnnnnnnnnnnnnnnnnnnnnnnnnnnnnnnnnnnnnnnnnnnnnnnnnnnnnnnnnnnnnnnnnnnnnnnnnnnnnnnnnnnnnnnnnnnnnnnnnnnnnnnnnnnnnnnnnnnnnnnnnnnnnnnnnnnnnnnnnnnnnnnnnnnnnnnnnnnnnnnnnnnnnnnnnnnnnnnnnnnnnnnnnnnnnnnnnnnnnnnnnnnnnnnnnnnnnnnnnnnnnnnnnnnnnnnnnnnnnnnnnnnnnnnnnnnnnnnnnnnnnnnnnnnnnnnnnnnnnnnnnnnnnnnnnnnnnnnnnnnnnnnnnnnnnnnnnnnnnnnnnnnnnnnnnnnnnnnnnnnnnnnncca

SEQ ID NO: 3599 - DNA, 356 bp, Zea mays
ttattgatttggatggttctgagaaagttgggacaactggggctgaaggacggggtcttgataaggcgaagacaatcaacattgtcattgactcactaagctttgtttcagtcacaatcttccagcttgaagggattgtattgggtctaatcgccagtgctgtcagattctctgatctgggtgctgtcagcagtggccaaggcaatttttctgtctttgtttgggatcctggtgatcgcgctgtcatgttgctcgcttcaggtgttgttctagtgttgcaagagctgccacatttcagatggagggctgcagaggcgtgatgcattcaacaatgacgctaatcaacaaccgaagaa

SEQ ID NO: 3600 - DNA, 375 bp, Zea mays
tgttcgacgacgtccccgccggtcactacaccgcgcaggcgctgctgtcaggaaggttcgcggcaggctctgatgttgcaccgccggtcaagtacgaggtcaccggcggctcgccgctgttcttcgggagtgctgcagcagctgcaggtggtatgcaccagcaggggatggacatggccgcgggttgcacgacgccgcggtacacctacggcgccgaccaccaccagatgaaggaaggcggtgaccagcagcagcaagagcttgcgtccccggccatggcttcctttcttcagcagctgagttcaaacgctggtggtggtggtggtgttggcatgcatgctgctagcatggactactcaggcacaggaggaggac

SEQ ID NO: 3601 - DNA, 376 bp, Zea mays
caccaggcggtggcgttccgttccggggccgacctgtcggcgtactacggctgcagcttcgaggcgtaccaggacacgctgtacacgcactccctccgccagttctaccgcggctgcgacatctacggcaccgtggactacgtgttcggcaacgccgcggtcgtgttccagggctgcaccttctactcccggttgcccatgcaggggcagtgcaacacggtcacggcgcagggccgcagcgaccccaaccagaacaccggcacctccatccagggctgctccctcgtcgcggcgccggagctcgccgccaacaccgccttcacgacgctcagctacctcggccgcccatggaagaacttctcgcggacggtggtca

SEQ ID NO: 3602 - DNA, 464 bp, Zea mays
  misc_feature (387)..(391): n is a, c, g, or t
  misc_feature (393)..(401): n is a, c, g, or t
  misc_feature (403)..(407): n is a, c, g, or t
  misc_feature (416)..(416): n is a, c, g, or t
  misc_feature (418)..(418): n is a, c, g, or t
  misc_feature (421)..(429): n is a, c, g, or t
  misc_feature (432)..(436): n is a, c, g, or t
  misc_feature (444)..(448): n is a, c, g, or t
  misc_feature (451)..(458): n is a, c, g, or t
taccgggctcctgcgcgacgcctattcgctgaaatgcctcagggagttgcacgcgcatctcgccgtcgcgggtgcgatccaggacacattcgtcgtcacaggtcttgtcgaaaggtatgtttattttgggaaggccgcgtctgcggcgttgctatttgccgaaacctaccgcagccgccccgctgtgtactcactgaatctcgcggtccggtgcttctcggaccatggcttccaccgggagcttcttcatctttaccgggagctatgttgctttggctcggacaacttcaccttccctccggtcatcagggcgtgcacagctgtctcttgccttcggctggggagggagatgcactgcagggttcttcgtacaggtcatggtatccnnnnntnnnnnnnnntnnnnntctctggtnancgnnnnnnnnnttnnnnngggggggnnnnnaannnnnnnngttttg

SEQ ID NO: 3603 - DNA, 391 bp, Zea mays
gggcgcgatcctcgccaccgtcttcttccggctggaccagtcccccaagggggcgcaggagcggctgggcttcttcgcgttcgccatgtccaccatgttctacacctgcgccgacgcgctgccggtgttcctccaggagcgctacgtcttcctgcgcgagacggcctacggcgcgtaccggcgcgcctcctacgtgctctccaacgccatcgtctccttcccgccgatcgtggtgctctccctcgccttcgccttcaccaccttcttcgccgtcggcctcgcgggcggcgtgtccgggttcgcgttctacacgctggccatcctggcgtcgttctgggccgggagcggcttcgtcacgttcctctccggagtgataccgcacgtgatgatc

SEQ ID NO: 3604 - DNA, 384 bp, Zea mays
tttccacaacttgtgttgctacagcggacaaggaatattgacaacctgactggccaatatgtcttcttcttggggtaagagatctatatatggcagtatctaaaaatgcataaaaaacgaaaacaaatgtaattttcttagaaacaatgcattgaacaaaagttttgtatgaacaatatttgatcggcattgcctatatagtgaaatagacaacatggatgaattttcttattccgccttctgatattcgatgtatcatgctaggatcagtcttatccttttggacagagccttaatttgtctctactctctagtttatatacgctattactaaagctgattcacttggttacgatgcagtgcctaccgtgtgctttatatcct

SEQ ID NO: 3605 - DNA, 373 bp, Zea mays
tgttgcaggaacactaggcattcccatattattctcagaacacctagctgactcttccgagacgtcactggagtccaagttaaccaattcgttggcttcctcaccattgcaagtaacttccatcagcagcctgctattacaaggctcagcctccacaatagcctcacagcgtttcctctccaaactgtcagttttactaacctccacagctaccacacaagctgcctcagcctcagcccgcagcttcattgcgtcggatctcaacaccctttttgtcacgtttctgtcctcatccgcagaacccctgcagtccctccttttcttcccagtcaaggcaggccctctgccaagatcctcatcagcagaggactaa

SEQ ID NO: 3606 - DNA, 328 bp, Zea mays
acactcccgcacgcaccgcagcagctaccggttacgacgagcgtcgcatcgacgagctcgacctcccacagcacgaggtggtgcggcgcctccgcgtgttgcgcgagcccgtcacgctgttcggggaggacgacgacgcccgcctcgcgcgcttgaagctcgtgctcaagtccggcgcttcaagctcgtgttgatggtggagacgggggtgctgccggaggcagtgcagatgacggagatgccaaggggagcggcgatgatgctgacagacaaggactccaagaggatgacgaccaagtttgaggagctttgcaatcaagacaagatt

SEQ ID NO: 3607 - DNA, 323 bp, Zea mays
acgcagctctgaagctggcaagctgatcaatctgccagccaccatggaagaattcatagccgtcgtcggtaggagcagaaagcacactacttcattcagttaattgcagttgcagtgacaaattaattaaagcagtcaagtacgctgtcgcgctttttttcaggtgagaaattgaaggttgatacggagaaggcgctgattgtgaacgacgaaggagcggaggtcgactcgatcgacgtgatccgggacaacgacaagctgttcgtggtcaccgaagaagatctgacgcggctggcaccaatggactcggtgccttcgtcata

SEQ ID NO: 3608 - DNA, 273 bp, Zea mays
tgagcacaggcgacccatcggaagacactgttgaagaggcccgaaggataatggagaaatacaagtaatgaacctgcgcaaaggtgttgtactctcagaggtatgatttgtctgtagtttccttacgtgacgtgaggggtgatggatggatggatctgattttagcatactacactacacttagtggtttgatatatgtaaatatagttgcacgactgaaatgagtccttgggaccaaatgaattccgcaaatctacaagaggctaacaacaa

SEQ ID NO: 3609 - DNA, 315 bp, Zea mays
attttttttgaagtgatgaaacatattgttgtcccgcacaattatctccctaccagcaataccagatatgaatttaaaagcccggtggcaatctacacaaattcgcagattcttcatgatccttataggtatgccaggtggtatacatatcaatccaaaagccagagcaagcttttcactgtgttgaaacacttctgattctttctcttcttcctcaagatcatagagagcatattgtgtgtctggcatgtatccagcagcttgcatttgccctttgagcttggccaacaatgcctggatctccctattcataaa

SEQ ID NO: 3610 - DNA, 398 bp, Zea mays
  misc_feature (373)..(374): n is a, c, g, or t
  misc_feature (376)..(376): n is a, c, g, or t
  misc_feature (384)..(394): n is a, c, g, or t
gccagcgactacgaggccaactgccagtggggcgccggtcagttcgtcgatgaggacgacggtggcggcggcgagtccccggtcacggtgttctctccgatgtcccacggatatggaaatgctcctccgcccatggaagaatgcaacggatcagcccgtggccttgctaggtaaatgctgccattattaattaactcgatcatgcgggcatgcggccttccttccttattggaaaagtgcagtttcgcttccattatccaaacttttgaaatcctgttcgtaaaacatatgccatttccatgaaattatgttcgtttttgtttgttaaaattttcatgactaggtactgcctggttgcgagcaagcagatggnngngactgttnnnnnnnnnnntgtt

SEQ ID NO: 3611 - DNA, 350 bp, Zea mays
ggaagtcaccaaattttctgtgtggctggtcagcaaataggttcctcaacttcactgaaccttgaagtgagcatgatatagtctgcaaaaggttcacatgaagaaaattggtgaacattagaaagtgaatttggaaacaaactgaagttatgcatatagcggcactaatcaccatttagcgtaatagacttgagcaggaataaacagtagacacaaatccaaaggtaaaggcacctttaagtgatggagaatgcatgagagatacccttgaatgattttcatcatgctatgcagcagagcatgtatggttatggtacaggcaaatatgagaggacatgaaaaggttcctt

SEQ ID NO: 3612 - DNA, 359 bp, Zea mays
tcgctcgattgcactatattgcccgtcaaaaacatgtcctcctcgttcattcgcttcattggtcgttgcgtctgttcggcgggctgttcttcttccacaacgacgcacgccttcctcttgcaccgcgacgacgacacctccgatcccgggccacgtggtgacctgtacactttgcacaggaccatggcgccgccgccgtgctcttcctcgatagcatacttggtcatcagccatcccggcttgatgaccgaccccgacggcgccatgcacctcatggtacgtcagcttttcaaggtatctgccagtagtgcttcctttcaccatcttcttcttgccctccgagtgccacgacctcttct

SEQ ID NO: 3613 - DNA, 268 bp, Zea mays
acacggcttaacacatcaacggtgtcattgtatccatcaccagcgatgaccatgatggactatggttcagtatcattttcactagatggaagatagcaataataatgtcgtggcttgggcgcttggctagcttgctgccgtcgttgcccagtttatcttggttaacaataaaatataggataaatatgttagatgtgttgtgtggtaaggacatgcattccacaaataatactcctcttgtaccagctggttgtggcaattgtaatga

SEQ ID NO: 3614 - DNA, 397 bp, Zea mays
ctgtatagctatgtaaaattggttgcattttaggtgatttgtgggaattaaattgcaatgtaccagaaatcgatcttaatttatgcaatagattatatgggaaaaatcataccatggattggatgtaggctgaaaccagttacttcatctaggctaaaattgttggttctgtacaaaaggtagtctaattaggctttgatatccgaattaaatgtttatcacctacttttagaaaaaagttagtcatcttcacgatccagttgatacatattcacaaatttgtacatgagtaacaggcaacaacttttctcaatttatccagaaaatgacttatttttaggggcctggtgtatatctctatcctattattttattctcagcacattcacattcacaa

SEQ ID NO: 3615 - DNA, 702 bp, Zea mays
agcgtgccatagctagagcgggaacacgaagaatgctgcgagaattttcaccccgtgcgaccggccggccctccatgatcgaccattcgatcctgctcattagactacctgttcttgtcaagccactcgaggatccgtttctccgactccgtgcgctcctcttctgtcttctctctgacctggccctcgatgagcccgaagtagtccctgtaattcctcttgttgtagtcatccagcctctggaacatgagcatatcaacaattcaacatgatcagtgccgtgttttcagtccttcaatgtatatcgttcgcttaactacgtaatcaagcctctcttaaaagtgtccacatgtttgtgggatggttagttcactccacgcacccattcttacccctcaatcgatcggcaacgataggacactattaaaccacgggaaaagagtctccagttacctccttgtcgttcttctccttgttctccttcgatttcttcagatactctgtgcgcacgcgcgcggacgcactaactgcattagttttgcatgcaaaggacgaaccgcgaataccaattcctcaagcccaggaaaggtctgatcagtttcccgctcaccttgcagtagagccttcctcgattcgctgccgccaggtatggccgcagtggacgtcagcagcgccagaaggcacctcctgctgactccattc

SEQ ID NO: 3616 - DNA, 443 bp, Zea mays
aggagtctgctcatcttaaggctgtactggacaacccgcagttccagcttgacccattcgctgcgatccatcagcacctgctggcaacgcagccgcctgcagctgcaaagaaggacgacgcagcggggaagcaggggaaggtttccaaggacaagaaaagcaggaggaagaagggcacatcgtcaatctctcaggcaatggatatctgattgtgttccttcagtactagtaacttggtccgatgtcgactgcccgtgttccactagagggagctcatcgaagttcgatatcgatggttggcatagtttgagtaccagtagaggtagtactgtaccagccctctcttttggcagcctgttgattgatgtttgcagaatcggtgccatcaacatttggtgctactttggaaactggggattaggagaggattgagggagaaaaaa

SEQ ID NO: 3617 - DNA, 407 bp, Zea mays
cagctgctcgatgcaatggcactgatggagaagcgcttgacagctgcgttggctggcagtcatggtgagcaaactgctcgcggatgcactgccttcttcgacgacggtcgcatcgatgaactcgatgtgtgggacgaggacgccacgagcgtcgacgcagatgactctgtctccgcctccatggtagatcgagaactgcgcttcgacgagttcaccttcaacgacaaatctgcgcagtatcacctctcgtccacccacgaggccctcttctccgacggcgccaaccccttcttcaacgaggcgtgctatgcactcacagtgttcgatcaaatgcccagcccatgcttcgatggagagcctattttcgacgaggtgcccaacgactccatcaccgagtacgaattgta

SEQ ID NO: 3618 - DNA, 858 bp, Zea mays
gctgatcctagtgatgattccagtgatgaatctggttcagaacatacttctgccccaaagaaggtgtgcactagataattgttcttttcctctagtacttattttagtcatgtctcaccctatttattctttatattgttattctttacattggtagactgatgtagtagttggcaagaagagagcaatcaaagctgaggcaccttatggtaagaaggctaagtctgaacaatcttctcagaaaacaggtgagctactacttttatgttcttataaagcccaactaaaaacaggtgagctactacttttatgtagactatcttcagtagacgaccatatctcactctctatttcaaacttcactctgcaaacagtgcaatctacagtataaaacaatattttacacggcctgctggagatggccttaaagcccaactaatggatgtgtaacgttaacatgtgaattgaactcttttttgtccttacaaagaccactctttttatgttcttataaagcccaaactctaagggatgtgtaaggttaacatgtgaatgtttaactatattttcgtttacctaaggtgacaaggcttcaacttctcatcctgcaaagcagtccatcaagactcctgcagacaaatctaggaagacccccacagctgacaagaaatcccccaaatctgggagccatggctgcaagtaacgcaacaagtatgtatagtttataatttttctttttcttttggtgaacgattataatttggtattatagtttgctaatagtatcctgctggaccagatctttcagcagtgcgtcagcactttagtcccatcagagccaaaaaagcatgaagccta

SEQ ID NO: 3619 - DNA, 644 bp, Zea mays
gctcgacgccatgctcatcgtaagaatcgagatcagatcccaaacacgtgctgctccctccattgattctgctttagtcagcactcggcaatgatgatgatccgatcatgcgcgcggcgtgcggtgcaggacattctggacagcttccagaaggcggagttctggtacgcggacgccgggacgaggtcgttcggctcggtcacctcgtcctcgtcgtcgaggatgtcgtgttcgtcgtcattcaggaggtcggctcaccggaacgacgataagtggtggctgccggtgccctgcgtcccggacgccggcctcaccgacaaggcgcgcaaggacctgcagcagaggcgcgactgcgccaaccagatccacaaggccgctgtctccatcaacagcggcgtcctcggagacatggaggtgccggagtcgttcatggccgtgctccccaaggtacgaaaccaaggcatccatccattcccgacggaaacagcatgcataatacagatctctctcctcgttctctgcctcgctgctgagaagtgaaatcctttggcgatcttgatgcacattcagagcggtcgggcaagcgtgggggactcggtgtaccgcgtcatgcttggcgccgacaagttctcgccggagttcct

SEQ ID NO: 3620 - DNA, 406 bp, Zea mays
ctgtctggtcggggccagaactggcggagtggtcgcgtgacggccaggaagcggagcaggagcccgagtcggtgcctcgtcgcaagtcatggtcggcgccagaactggcgcagtggtcgcgtgccggcaaggaaaaggagcaggaggagcccgagtcgtcggagcctcagcgcaagtgggtggccctcgtctccgttgccgtcgtcctccccggcaacgaggacgagcgggcccatgagatcatccccggcaccgacatgctgatgctcgacatcaacgacccgccgctgccctcctacctggtgcttcacccccgcgtcgcccccaatcccaggcgcaccaacgagccactgtccgcctacatcctcgccgccgaccgctccggctacatcctcctccaggtcgt

SEQ ID NO: 3621 - DNA, 230 bp, Zea mays
tcacctggcgctgccgccggccgagatggtgatgtgattgctgccgtccaggaggctaatcgattgctcagttaattagtcaccattagtagctaatcgatcaaggcagccgtcaggcagaggtgtaaataggatgcagatttgctcggttttcgtttgactgtggtggcatggtttgcttcttcgctgcgactctgcgagtcacgcaacaatgcaaaagcaaaatgaaa

SEQ ID NO: 3622 - DNA, 571 bp, Zea mays
agacccgagcgatcgtgccccggcccccgatcctgattcccacaaatttccgccatggcgatccgcccggactgatgcccgattctccatctgacgatcctcggtaagccttcgccccccgctggtttgatcctgcgtgattgacatggcttgtcaggttcttgcgggttcttttgcgtctttttgttgtggttgcagattcgtcttgcgtatgagtgttccgcggattccctcgttgcctggtcgagtatttgtattttccattggcccattcgcgacgattcttaggactccttcggttctatagggttctgttaccaatccgtgggttttctattgcagaattgatcttttttcttgcgaagtcttcgaccactctagtgcgctcctttgattctcttctacccctgcgaatttcgttgctgaacgtcatctgtccgcccgcatggtcttcttctggaggaagattggggggaattctggtggggttcgtgtgggcgcgtagggcccctgacgacctggcctgacgcatcagcggcgagccatggctccggcttccgttccagctcta

SEQ ID NO: 3623 - DNA, 366 bp, Zea mays
ttctgcaagtggaaaactatctgtaccatctggcgctgtaactgctgtttttcataattccatctaccagggttctttgccagttccatctaaggctaatgctttagaacatctactggtgtattcgccatctggtcatgttattcaacatgaacttttaccttcttcaggttctgagtcctctggtagcagcccaagagttggttcaggtcataactcgcaactccaagatgatgagatgcatgttactgctgaaccaattcaatggtgggatgtgtgccgtaggacaaactggcccgaaagagatgaaaacattgcaaacattgtactgtataaccaaagaagcagtatgatggctatggatgt

SEQ ID NO: 3624 - DNA, 518 bp, Zea mays
acgacgacaattttgggatgccagtggaggaacaaccacagatgaaatacactgggaggttttggaccagggaggagcacaggtcattgattctctttatttctactgtttttgaaattctagttgtcacatatttcattgttaattactagtaaagttattaataagcatgtggcggagaatattgattaccgcgaatatcctcaagttttttaagtgcttttcgagatatatgatgtgacgactgacgatatttatattctcatatcctaaccccaatgtaccaacgcaggaatttcctccgtggcctgaacatgtatggtcgtggtaactggatgtacatctctagggacttcgtccccactaagacgccaatgcagatctatagccatgcacagaagttcttccgtaggtaggagcgcacctgcagctggaagcaacgccatgatatcaaatgatattggcctctatgatatgctgagccctagacaaataacggctcttagtttatctcaaga

SEQ ID NO: 3625 - DNA, 377 bp, Zea mays
agcagcagcacagagcaagaccgcaaagaaagcaagcgggcgggcaagcctccttcaccattaccgcgcatgtgatctgcgccggtcatctgccttcggtgtaggaactcttgcctgtttgcttggtgatggacaggcacacctgcaagctctgctcccgtcggttccacaatggccgcgcgctgggcggccacatgcgctcccacgtcatgaccgcgtcgtcggctgcagcgtactactcgccgccgccgctctccctggcgtccacctcgtcgacagagatggacgacgacgccgatccggcgccgcagaagccacccacgccgtgcgttgcacgcgaagaaggcgccaagaaagcgttctgctttcctgaactc

SEQ ID NO: 3626 - DNA, 359 bp, Zea mays
atgacatcacacaataatacaagagcaccaagtaacttttcctatatctatcatgggtacaaatgctatatggtcattcactgccctagcacccaatggatcaaacgacacaatactgctaggaacaccgactgtacaaataaaatgaactgagaaaacggtgccatcgtcaccatagaattaaagcgcatatcacacattgtctatatatattgggtataacaaattatattacttgcattaagaaaaataaaaaacaaacgagagagacatataataaataaagaaataaacaataattaggcaagcacattccatgtgtttgccactcgcattccatacactgatgcacgtacatg

SEQ ID NO: 3627 - DNA, 370 bp, Zea mays
atggtggtgatgagggatcagatgacaatgggaatgaggaggaagatgacgacgacgatgataacgatcctgcagccaacggtgaaggaggaagtgacgacgatgatgatggtggagaggatgaagaggaggatgatgacgacgatgatgatggggatggtgacaatgaggaagatgaggaggaagaagaggaagaggaggatgacgatgatgtcccccaaccacctactaagaagaggaaatgatagatggctgtgatttggttggctggttgcttacatgcaggaatgctccctgttcgcccctgcctagcagtctcctgtttagtgggtagggggttttagcttgatcgtggacaattcatagccta

SEQ ID NO: 3628 - DNA, 467 bp, Zea mays
gggcgcactcttctttggtgtgcttatgatcatgttcaatggcttctctgagctggcactaactgtcttcaagctgcctgtattcttcaagcagagggatctccttttctttccagcatggtcctatactataccctcatggatcctcaaggtacccatcacatttatcgaggttggtggttatgtattcttgacatactatgtcattgggttcgacccaaatgtcggcaggtgagatttcctgactgtttaaatgtttacccttagccattcttattgcgctggtaatatactatggatgttctaacagtaatggtcacccccaggttcttcaagcagtatctgcttctgttagtagtcaatcagatggcagcatcactcttccggtttattggtggggtatcgaggaacatgattgttgctaatgtcttcgcatcgttcatgttgctagttgtcatggtgttggg

SEQ ID NO: 3629 - DNA, 395 bp, Zea mays
cagacggccaggaatctcggagcagctggctttgttgttgctgtggagaatagttacccaggaacaaaatttgatcctgtaccattcagcatccctggaattctcatcacagatgtcagcaaaacggaggtattatacttctagcagagccttatttcatatttgcatatggttgccacttgtagacaacatcatacatagacatatggaaaaatgagactgtatattcatgaatagatcaataaatatgcaatttagttattgaaatagcatgaattgggcttcaaaaaacaatgtgcaaagaggtgcaagatagtggcatgaattctatatggctgctgctactgctactataggatgactgggcagaaaggtaaagtacctatgcatggttg

SEQ ID NO: 3630 - DNA, 771 bp, Zea mays
tcgatccacatcataacattttatcaaagcctctgcaccaaagagtcctacttcgaacttacatctcactgtctgccttaaaatgatcgcaggactatgttgctactagatggtacagagctcctgagctgtgtggatctttctttagtaaggtacccattttttctcatactgttgttttattaagccttattggtctttttttttgttttctccaccttcagtgtttactttaaaatgtttatgttatccccatgttattaacacgattctcttgtgcagtattcaccggctattgatatgtggagcatcggttgcatttttgcggagattttgactgggaagcctttattccctggtaaaaatgtggttcaccagctggatttgatgactgatctcctgggtacaccatcagcagatactatttcacaggtatggtttattatttatcgatatattgagacatgtaaaaaattgtagcataaattattgctaagtctcaaacgtttttgttccttgttctacagattcggaatgagaaagcaaggaggtatctaagcagcatgaggaggaaacagccaatacccttctcagagaagttccccaatgcagatcattcggcgctcaagctcttacaaaggcttcttgcatttgatcctaaggatcgaccaacggccgaagaggtaggcttttcgtgatgaaacataggttttatgtttgcactgctgttatttgtgttactttgcagaattatattctaacaaaaatagc

SEQ ID NO: 3631 - DNA, 640 bp, Zea mays
agttatttaccaccacacatacctgattaccacacaaggaattatccaagtaatgctggcccccctggtcctagattcttttttgaacaagagatagtgttcaggatgataattctgaatgagatggtgggaagcataattggaaaaggtggttccactattcgggcattgcaaagtgaaactggtgcttgtataaagatcttagagccagttgctgattcagatgagcgtgttgttgcgataactgcacgtgaggtatgtatacggggcatgggccagaaaaggtttcaatcctgtttcagtgttttgtctgaagtggtcacaaatcattgtttttcttatgaggaactgaacaagaatttttttatggtaatttgatgtatgtgtctgttcctcttcgagaactgccatgctatcccaatgcctggtagttcaatcactatatcctgccaatttataatagggatttgggattaaatttcctaagaaatatatttcctgctgccacctgtaatattggttgatggatgtgtatctcttggtgcagaattctgacatgctgcattctccagcgcaagatgcagttgttcgggtgtactctaggatctcagaggcatctattgatagaagttctcataca

SEQ ID NO: 3632 - DNA, 612 bp, Zea mays
atcgagccagctggaggcgcgcggcggccaaaggctagcttatattcaactggaacccggcgtcgctgcgggccgcggccgccagcagctgcacgtgcacgtcgttgaacgcgtcgtcgtcgtcatcttcctcctcctgccgtggctccatcacggtcctgctcgccttcatctgctcctcgaacatcttctgcagcttcttcccctgcacctcgatcctcagctggaggttcctctggatctgcaagacacatgcatcaccccacccccaccgccaaaaaaaaggtcacccgatgccacgaccacacatcaatcttgaagaatggattctagccggccaggtttatttatcggcgccgcgctcggctagtgtttgtggcgtagacagagcacctcaagctgctcgtggaggcgcctctgcacgtcgagctgcacgcgtagtgcttcggtgatcttcatcccactgtgtgcgaagtaaagaaaataggatggcaactgttagctagtggcacgtcgcatggtcgccattagaattcttgcaatgtcgtcaaaaggtagacgacgacaactacgacgtcacgtacgtgctggggtcgagattctgcacgtcgt

SEQ ID NO: 3633 - DNA, 364 bp, Zea mays
atgcgagcagcttagcttctcccggtggcggcgcggagggcagtggtggatacggacgaggttgcatcggaacaagcggaaatgtggaacccatcagagagaacgaggcgtgcgtttccttaccagcgggaaggagaatgccgccggagcacacgagggaaggggagggaggatccgcggagggggggcaagccgcagccggcgacgcggggcgagctttggaatgagaaggcgggagcggatggataccgaggaggaggaggaggaggaggagcggggcaggctggagtagaagatccggcggagccagtgagccagccagtactgaagtcaggcaggcgaggcgagggtgcgatccggaccg

SEQ ID NO: 3634 - DNA, 405 bp, Zea mays
aagcaggaaatggtcaggaatctggtcgccgcggcggcgctcgccagagagcaggaaatgatcgcgcagcagcagcagcagcagcagcagcaccccgaggcgcagtactccgggacagagctcgacatctcgctgtggcaaggccccggccccggccacggccacggccacccgtactggcatcagccgacgatgcagcagatgctgcaggagaagcagctgccgacggtgcaacagctgttgcaggagcagcagctggtcgacgcgattggattcggcacgcaccaggccagcacgactttggtgccgcagtatgcgaacggtgagcacgggagcggcaccggcgccgcaatggcgttccagtcgccggggtctcacaaggacgcgccattcccattcccattc

SEQ ID NO: 3635 - DNA, 400 bp, Zea mays
gacaggtagtgaagatgatgacgacgacgaagagagcgatacaaaactggagagggaaattaagaaagtgaagaggcaagcgaaggaaaattcaaaccttattgatgctgatgacagtgacgagttaagaagtatatgccctgagagtgatgaagatgatatgactctctggagtggcagtgaagacgacgacgacgacgatattccctctgaggcacatcctagtgaacgcagtgactcatatcttgataaggtgtttgaatttgaggagtcaccaaagtaccacacaatctcagagctgttgaaagcagagaacgaaccacctgagctatctccgggaaagcaagcaaggaaacttgctgtagaaaatgctcttaagaagttaaagaaaggccctgat

SEQ ID NO: 3636 - DNA, 601 bp, Zea mays
catgagtggtagttatgaagtggccacaaggtgaccaagcaagtcgtctaaaaaatgttgaaccaagctgcaggaacaaacaacatgagaaaggcattcagtaagacaggttgatcacagctagatctaacagagaaataaaaaaatacgacatacagattttgtccaatggccttctgtcttgtgagcaagactccagtcacttgtacgccatatcataacagtcttatcatctgattggcttgcaataaaggaaccaatagggtcccaggtaacccctttcactaagctggtgtgccctcgcaagacagcagtgcaaatgccgttgttcatgttccatatgtgaatggtattatccaagctaccgctggccaacgttgaatcatcaggggaccaactaagatctacctaccttatgcacaagaaatggaaaaggtgttctatagttacaaaataattatcacaaacataaacacagcacagtggaattttagaagataattaccacatcggcagtatgccctctcaaggtcataatgaccttccagttctctgcatctggtggttctccactaccaaactcagatgtacctgagccagc

SEQ ID NO: 3637 - DNA, 309 bp, Zea mays
catgagcccgaccgctttgacaagcactgcctgtggcagtggtagatgcaggaggaggggacccacttctaaagtctggatttactttgaggagatgaccatgatggagcaaggtaaggaggtaagtatctttgccatctaccatcactccaaggagaccttatcagctaaatctagttctgatactaggcatttgctccagcactttgatcattgtcgtgctaagaaagaaaaggagagatctgtcattgtttagttagttcttaagtacaacacaaatggtagtgttatgcgttgggagtactctgt

SEQ ID NO: 3638 - DNA, 384 bp, Zea mays
gtggcaacggggacttggaacttttgtcgagaaaatccagaccaaaatttgaatttgagaatgttagctaaccatccattcttttttaaaaatgaaaccattaacctgcaaaagttccagaaagcttgcaaagatgcaaaattaaaaaggcatccaagtgagcttgtaccctttctaacacggggggccgggcggtcaaatcggcaaccattatctaaattttgtcagctgatcgtgtagtgaacacgaggacatgcaatctttggaatctcgggagggcttgagtgggggtgcaggctacaccaggtgctcctacaccgcagatcaatgcgccacatggtgccggtcgctggcgatcacggtatgatctgtttcaagtcatgc

SEQ ID NO: 3639 - DNA, 383 bp, Zea mays
  misc_feature (271)..(272): n is a, c, g, or t
  misc_feature (286)..(288): n is a, c, g, or t
  misc_feature (337)..(339): n is a, c, g, or t
  misc_feature (364)..(368): n is a, c, g, or t
tttgtcatacaatgactcatttatgtcctacagatttgttatgcccatacaccagttattggaaaaacctatcatgagcagcaatactgattaaaataataatcaactttgctattttcatgtgttgcagaataagtagaacatatcattgaacaacatgttgtcattttttggacatttttatgttgagtatcaacatggctcttgtttaaattattgcgctcttactcaggatgagattgaagctgctcgaatggcagcgatcaacaannaaattaagcgtgtnnngactgaagtcctttcaaaggttttattcttgacttgatcttgtttacannntacattattgaatccgtctaagagnnnnnaggttattcctgatt

SEQ ID NO: 3640 - DNA, 394 bp, Zea mays
gctggagaagacgcagaacgacatcgccaaggcgcggcgcaaggcggaggagaagcgggcgtcggcggaggccaagcggggcctcaagctggccaaggtgctggagctcgccaacttcatgaaggccgtcggcagggtgcccaccaagcgctccttcttctagccagccgactaccgctaccacctccgtctctctctccctgcctgcgtgtgatcgatgtacgctcgctgctgcatccgagaacctaactgtaaagaaaaaaaactgtaagctgtatacgtactactgcctgctatggtcccctgtgatgtctgtcagtgtcatccatcacagggtgccagttgttctcttctctttctcttctcttctcttctcttggcttgtatatcggat

SEQ ID NO: 3641 - DNA, 275 bp, Zea mays
gtcgtgctatggacagcaaacaccgagaggtatagcaacgtggttgcagggcttaacgacaccatggacaacctcttggcatcgctggacaagaatgaagcagagatctcaccatccaccttgtacgcaatagcctgtgtctttgagggtgttccattcgtcaatggcagccctcagaacaccttcgtgcctggtgcgtagcgctgcactacaaaattttacatgtgtgtatttgcttgtgtagtaatgttcagttcatgcacagggctgatgga

SEQ ID NO: 3642 - DNA, 361 bp, Zea mays
gtctctactctctactccctgcccccccccctgaatttgccgcagggcacacctcctctctcactggatccgacgagccgtgcaccgcgccagtctggctgcagcagcaccacaataccacatgttgctttgcttcgccgagtcgagttcaccaggacggaagggacatcttgcacggcgaactgagcgtgtggcggtgtgggagagaatgtggcgatgtcgccgtcggtgccgtctgtatggtggacgctctgcgtttggttgcagtgacatcgacatggcgtatgcatttttggcgtggcgccaagcgcaccgcaacagctacgagctgcggtgccgaacctgtctcacgatctcacta

SEQ ID NO: 3643 - DNA, 211 bp, Zea mays
tacgacatcccggacctcctgaagaagttcaggaacccctacgactgaagccggaaacccactctcttgcctcctcctcctccttagggaggggtggcagagcttcagcgacggacgaggaggacgtgccggtgcagcagcggttcatctggtcagggaagagaaagatgcggcgcctttttcacgactccatcatctctcttctggataa

SEQ ID NO: 3644 - DNA, 349 bp, Zea mays
cgcgcagcttccatgtcgccgaggcgcgcgtacaagtccatgagcgcgttctgcacgaatgggttatccgccatgccgcgcttcaggacgtaaccgtgcacagcttccttgccggcaaaggtctctgaacgagcgcacgcgggcagcacgcccgcaatggtggtctcgctgggtacgatgccggcctcggcctccatccgggcgaagagctccaatgcctcctcgtccatgccagcctgcgcatacccgcagaccatggcgttccacagcccgagctgacggtgtccgcccgggaccatgtcgaacaccctcctcgccacgcccacccgctcatggctcgcgtacatgt

SEQ ID NO: 3645 - DNA, 460 bp, Zea mays
tacaccctcggcgcgctccttgaccccagtgacatcgccttcctcaccaatcgcgccgccgcctacctccgcatgggcaaggtctctcccggttcgcgctcccactctccgttccctctatgattctatgctacccgccggcggcttacgctttgggacatgttcagtacgaggagtgcgtgagggactgcgatgaggccgtgaagcgcggcagggagctcagctccggcagcgagctgatcgcgaaggcgctgtctcggaaggcgtcggcgctgctcgagctcgcgtgctgcgccgcggactacgcaccggctatcggcgccctcaagctgtcgctggccgaaaattacagcgaggagacgctcgagaagctcaacgacgcggagagcgtgaggaaggaggttgaggaacaggagcgattggatcaggaggccgccaaccaatgccgcgaggaaggttt

SEQ ID NO: 3646 - DNA, 586 bp, Zea mays
actggaagctgtaaacgccggatgactgtacgggtttggcaagagctcctccacctcgatcctagagctgaaatagcccgcgtttctccttctgtgccggatgctctcgacctcggccatgaaaatactgtacactggtctgtggtcagagaagcgagactctccgcgaacgtacgacagctgcatgagaccgctaccatgccacagaatgcgatcgcaccttcatttgagacaaaagaaaacacgcgtcagggaattccttccttcggagtaactcgacggagggtgaaattgtcgttggataacgcggcagaagaagaagaagaagaagaaaaattaccaagcgggcgttctccgcttttctttgggccgaaccccagaataacggtctgagttgaatgagtacttatatgttggaggaaaataaatcctgccttctttccatccctggaaaacacgcccacatctccgttctatccgtagctgctttcaagcaagtaatttcagacacactgactaggaaaaagatatatatagcgagacagcagtagcaagttacctgatctttctccaacagttgcttcca

SEQ ID NO: 3647 - DNA, 367 bp, Zea mays
ccttcttcgcggtgcagagcggggtcaccgtcgtctgcgcggccggcaactccggcccgcagccgagcaccgctaccaaccttgccccgtggatcctgacggtcggcgcgagcaccatggacagggatttcccagcttatgtcagcttcaatggcgacaccatccaggtacgtacggtacggctagtggattgaattgaatgtatgcgggcctagctagattttttgctcatcgatcgatcacgtatggcgtcccggtcccgcatgaagggacaaagcctcgcagacagcactctgcccattggccagccgtatccgattatcagcggggggaaggccaacgccgcgaaccagccaaccggaaactc

SEQ ID NO: 3648 - DNA, 237 bp, Zea mays
  misc_feature (226)..(227): n is a, c, g, or t
gtgtagcggcgcctgaggaaagggttcgagcctgctacgctgcgcccaaagatggaaggaagatggctggacgctggggctacaggggcacgggcaacgttgcgccgggcttggacaggggcagccacacgagtcgccggtgttgccgtgcctgggctggggctccatgcctgttcctcgatgtgcacacggccacaccaaacgccacaacaaacgggaagaacgnngaaaggaaca

SEQ ID NO: 3649 - DNA, 916 bp, Zea mays
ggtagtgatgatgttggcatttgtgttctatgtgctgtgtttactgacactttaatctgaagctgtttgtccttttgtgataggtgctgtatgaggatccagttgtagcatttgatggcaaaacgcaaaccttaaagacttcatcggggaaagttctgaaatacggctcacttattatttctactggatgtgaagcatcgaggtatacaactacacttatgtgaatgaggtgcatttaaatgtatgggaaaccatatttctgatgtcattatcatcatgtccatttttcttaaactttttctcccgagatttaagacatttttatgaattcctgttaggttttatgtatgcattggatgcacaagctttgtctactcacatggttacaatgaacctaaacattatgctcttctaataccaaacgtccatttttttcagattacctgagaaaattggagggaaattacctggagttcactacatacgggatgttgctgatgctgatgctctagtatcctcattggtatgttcggtagattaatgtagtaattgtcatcatttctcatccaccagagttaatgccaatgccatctcatttgacaacctcacctctttgatatttgcaagtaattattttttctttgcttattttttgtagggaagtgcaaagaaggtggtggttattggtgggggctatattggcatggaggtagctgcagcagcttgtggctggaatcttgacacaacggtaaggagctaccttttttttgttcagtttgatacgctgaagcttggacttcttcctatatgccaaaaagtcacttctctaattagggctgctacatgcatagattatattaccagaggaccacattatgccaagattatttacgccctcgctgctaagaagtagaga

SEQ ID NO: 3650 - DNA, 457 bp, Zea mays
aggactgcaacggtattttattttatactttatgtttgttaggagccaaacgtttgggcattcattctgaaggatttctttttgcaggaatgtgcgacaattgtgcttccactattgagcagaaggatattgatgtcacctgtatgatttattttgcgtcagtttaaaaattacaacaaatgaccaacatttattcactttatttcagggggaaaatgttttttatttcatgatattctcacagtaattttttctacttcctgtttagaccatacaaaaattatagtttcacttcttcacgatatgcaacttaatgatcaaagagctacactactacagctggtggataagttcaagtcaaagtggaaaggtttaggtacatctcctcgacaaaatttttacgatgttgtaactttttattgatgtaattttacctcttttgttgatagagatggat

SEQ ID NO: 3651 - DNA, 483 bp, Zea mays
cttgcgatatacttgatcttatcctcagtaaggtaagtatcggaaagttcgctcatttgattgaatgaagtaacgtaaactcccatgcatgactgaatcttgataaccgattttctgtttttttcagaatgactcggatggagattcgagcggccaggtgggcttcttatgcggctcgcctccgatacgcgctaacaaccctgttatccatgatccacagtttggtaaaagactgccatccttttctcctctaggagggagctcctatggcaaaatgccagcagtaagagttgaagtaggctcgccatcttgcggcgttagcagcagcccaaaagtaaggatcgaaggtttcgcctgtggcaactctgagacccactatgcagttacctttgtctgagcatttcgttggtatgttcctgattttgccctccgaccgaccgaccgctcgctccttgtgaatcaccgtggtggtgtgcaggatat

SEQ ID NO: 3652 - DNA, 356 bp, Zea mays
cgccggagacggtgtaggactggccctcgtagctgtgcccgccgctgcgcacgcggatggccagcgacgcactacgcgcgcagagaaccgcgcgctggaggccgcgtctggaagtgggcagcactacagcctccggcttgcggaaccccggggctgcgaaccggaggttctggatggagaagtcgaagatggtggcgtagcccggagacccggccatggagaagttacggacgccggaggccagtaggcaggtcgacaaggacctggcgcgcacgtcattgtcgcgcggagactgcgacgcgatgacatggcgatgcgttgataagagtatgctgagtatgcctagaagtaaggaa

SEQ ID NO: 3653 - DNA, 495 bp, Zea mays
gcatttatagtgtcggttggagctattcttcaggccatagtcctgttctggctgcttcttttttacaggtttgatttctgtaaaagctattccgcagtcgtgcctataactgccactgtgattgctcactcacctttatcttgcccacagtccaatggatggactgcttggcgcagcgataccattattcataggtgccttgtggggtgttggtgacggtgtcttgaatacacagttaagtgcattacttgggcttctgttcgaagatgtcaaggtaatcttgttttagtgtttgttgtttggtgtttcatgtacacacataggcttccatctcatctgctgtagctacttgtcttgtcctcaacaaatactaaaatttgacaccatggcctatgcaggaggctgcctttgcacagctgaaggtgtggcagtcgggcgccatcgcagtcatcttcttcctgagcccaagcatcacgctgcaagccatgcttctcc

SEQ ID NO: 3654 - DNA, 442 bp, Zea mays
acggatgcatggttgatcttctgagtcgtgctggtcttgttcaggaggctgttgaattgattgaagggatgcgcatcccacctgacccagttctctggggcacaatactgtcagcttgcaagagacatggccttgtggacttgggcattactgttggtaataagctaattgaactggatccagctcatgatggatactatgttctccttgcaagtatatatgcaaaagcaaagaaatgggacgaagtcaggaaagttaggaaattaatgtctaaccgtggcaccagcaagtcagctggttggagcttgatggaggcacatggaattgtgcacaagtttctagtaggggacatgaatcacaaagattctgcgcggatatataacatgctttgcacgattaacagaaggttggctgaggcgggctatgtaccagacgtgtcatc

SEQ ID NO: 3655 - DNA, 506 bp, Zea mays
ggggctccattcagcagcatggtccgggcaaaagggttcccatctttcgacgagagatggtactcttccctcttggaaaacccatcggaggctttgctcccgacccaagaaaccgtcctcttcaggccatggacaaaggcactgtccctcctgatcccttgcccttctgcgaggttgacatttaggtcgttcctgactgagaccatgaagcccatcgttcggtgcaggttcagcaagagaagagtgacgccaccctgtagtaaaaaaatattttggaagccaagaatcagctgtctgttaatttgaaatcccattaagctaaactaaaatgctgaaataactgcagttgtgcactatgatttgaatatatattttggatagttaatctcgtgttagcaatagttgagtaatcaacattgtgtttctgaaaaaaaaacatcttagggtaggtagactcgtaccttttgcttggcgcaatgcacgtaggcgcgcaagtacgaagaacc

SEQ ID NO: 3656 - DNA, 482 bp, Zea mays
agtgcgctttcagttcttgagcatcaatgaagagagagttacaaggatatgaaatgaacatcagaggactaactccaatctgccatgcaaactgattcagtttagttcgacacgaacctgtgtgcctggatttttgtcatcccaactgaaccatgttggccttccccaatcagcataacttttcccgttctgtacagttacatagctgagatacgtctggtcgcctgtggcgtggtagagccaactcgctgcccatagaagctcatcaacgtaactggtggagttatagaaatcctggagcttgggatagctctcgcttgagaggcctctataagtgtcagcaaaagtgaatagtttctgagcatgctgaagaagcacatcagaatacgtggtatctctggatttgaagaccattgaagcagctgccatggctgctgctgcctcagcagcaacatctgatccgggagtcttcttgttgatct

SEQ ID NO: 3657 - DNA, 218 bp, Zea mays
tcctgggctggatacctcagatgcttggcgtacgacatcgaagacctaatagcaggccaccgtgccggaaccatgacaggtgcgaagcttaatggcaagattactatcatccaggatttaatcagatgtgtagagtcctatccggagtttatggcggttccgacgaatgaggctcctagtcaaggcgctgcttcttcctccactacttcaagcaccca

SEQ ID NO: 3658 - DNA, 355 bp, Zea mays
  misc_feature (7)..(9): n is a, c, g, or t
  misc_feature (349)..(349): n is a, c, g, or t
tcgaccnnntcagatgccttggggtaagcttgttttgcatcgtcgttaagtgctatatatagctgtggataccttttgagctgaatctcatggatagtggcattgaacggcctgttgctgtttttttttggtttgccgtcgtcactgcaagtaaatcttgtgttgctcatgtaaacgtgcaggccatcgcttctcagttatccagccaggatgagaaagttcttattgtaagcatcaatagtctgagcaaggtatgtagtcagcccaccaggttttgccgcgcgcattcatgtgtacagctcattgtcttgccttgacccgtgtgttaggtgtgagggatgcaactagncatgtg

SEQ ID NO: 3659 - DNA, 356 bp, Zea mays
gttggctcgtttgccatcccgccggcatccatgccgatcattggtgtgctcagcttcctcatctgggtcgccgcctatgaaaccgtcctagcgccattggcgcggcgcttcaccggaaacgagaagggcttctcccagtggcagcgcctcgccatcggccaagccctgtccattctgacaatggcgcttgctgcgctggtggagacaaggaggctggcgatcgcggaagccagcgggctgaggcatcgggaggtgccggtgcccatgagcatcctgtggcagggcccagttttctttgtgcatggtgcggccgaggtctttggcgccatcggcatgacagagttcttctacgacca

SEQ ID NO: 3660 - DNA, 335 bp, Zea mays
ctgcccccgtgtaggttgcggtgttcgcgcagaacatcccggccttctgcgagctccacttcggcattcccatggcgggcgccgtgatctgcgcgctcaactcgcggctcgacgccggcatggcgttcgtgctgttgcagcactcggaggccaaggtcgtgttcgtggacgtcgcgctgctgggcgtcgcccgggaagcgctccgcttcatctcccagcaggccggcggagcgagcagggtacccgccgtggtgctaatcaacggggcgctcgatgagccgccgccagcggcgacaggaaacgacaagatcccaggcgtcgatcggtgctacgag

SEQ ID NO: 3661 - DNA, 444 bp, Zea mays
agagcccatgacgccctactcgttcgcctcaggcgccgacttcccgctcttctcgccgacgggcttggacgggcagctgagaagcagccacggggccggcatcggcgtggagttcgagaccctgttcgaggagctgttcaccaatgctacggagcccttccaatgggacctctatgccgccaattagatagatggaatgggctatgtatgctatctatgcaaccatacatgtatgtacacgtgtccggcaacagaattagcttcggactagactagagtatagtcttcaactactatcaacagctcggtgtactgttccgccctgtccatgcagagttgcaaaccatggaatcccagtggaaaaaaaaacgttgtgcccaggctatctgaatctaatctaatgataggagccaagattcagaccaagcaatcacgttgaagcac

SEQ ID NO: 3662 - DNA, 340 bp, Zea mays
tcgtatatggttgccatatgatgttgccagttccattcctgaatgcagtagcattccgaattttccagctctatatggtaatcttcgaactgtaagtccaaaccttctctctgcatgctgcaaaaataaatacctcatggaggaagtcagaataaatgatctggcagacatgctccaaaggatcggggtgcggaagttgtctgggcatgacattgttaaaaatcacatcatggtgtccttgcgtaacggtttagatgctaatgtggctgatatagtgattagagagtatgtgagctttattatggttcatcttcagtcttcttgcaccagctgtaacttt

SEQ ID NO: 3663 - DNA, 1312 bp, Zea mays
  misc_feature (57)..(61): n is a, c, g, or t
  misc_feature (1251)..(1252): n is a, c, g, or t
caacagggtaggtgttcttttctcgctctctggaacagcagcaggtgtagatgatcnnnnnaatgctggatgcatagtataggagacacttaggtcatgtttggtttctttagtctagggactaaagtttagttatgggactaaagtttagagtctaacatgtttggttttaggggttaaaaatagtaagaatatactaaatgattcataagaagactaaaatggcctttaacattcttctactattagtgcaattgaactaaatgataggtaaatgtggaattaatatggtttagtcatttttagcacatatgtgaatgactaaagactaaatcattttagtcctagtgtttggcaaaaaaaagactaaataagactaaaaactagagactaatctttagtccctctaaccaaacaccccttacatacgttgcttgatcaccgtaccgacagtgtatctgggagcttatgacgaggaggaggctgctgcgagggcctacgacctcgctgctctcaagtactgggggcctaccacctacacgaacttcccggtacggtataaacttcgagcgtcttcttcttcactgtctgcgtctgcgagcagcagcagttagtgagccagagccacactggacaagtgaatttcggcatttgttttgacacatgactgtgctagtgacttggttgagtttgtatttgtgtctctcaggtcatggactacgagaaggagctgaaggtgatggagaacctcaccaaggaagagtaccttgcatcgctgaggaggtgcgtgcacgctgctgctgcccctcgacctggaggggcaaagaaaaaaaatcgtttttttttcaggactgaaaccgttacagttcgaaattctgaaaggagtttgtcttgaccacaggaagagcagtggcttttcaagaggagtgtctaagtacagaggggttgccaggtacggttttttttaacaacaaaagagataaaaaataaaattgctccaagtgtctctccataaatcagtagctccaaggttgcatgcatctgttgatgtgttagatgctcaagacagtgcacgcatgtttcgttcagacatcatcagaacgggagatgggaagcgagaatcgggcgcgtcttcggcaacaagtacctctacctaggaacttacagtgagcacatcacatccccaacacaatgcaacttatcatacaaattccgcctgccgtcgtcgtcgtcatcgtgactcgtagaaannaacaaagaaaaaaaaactgctccgatctatctaggcacgcaagaagaagccgcccgcgca

SEQ ID NO: 3664 - DNA, 431 bp, Zea mays
tgtggtcctcgtccttgaagtatatcttgatgaggagatcgacgtggccgacctcgtcgacggggctcgtgggcgtgtacgcgcgcatgcagagcttgccgcctatcgacgcgcacacgtacacgtgcctgccgacgggaaggccgagcttctggtccggcgatggcagcgcgaaccggaagaggcgcacgttgtaggacaggctcttcttatcgacgagccggcacctgaccttctctcgcggattggagagcgcgacggtcgacgtcaccggtaacggcgcggctgcagcgggggcctcgacgatggccttgaggtcggcgtggctgttctgcggggagtagtcgctgccggtgacaacgagctcgcccacgcggtacatctcgaggaggccgcgggccttgtcggagtggatggcgtcgaactcctcg

SEQ ID NO: 3665 - DNA, 1547 bp, Zea mays
  misc_feature (1487)..(1488): n is a, c, g, or t
agccactctaccactattcaataagacaagcattagtgtggttactgactgccgttgttttttgttgcttatgcttgcagtgctacgaaggcaagccgatatttgatttcgaccgtgctaggatgttccggtctggccttgttggtttcacgcttcatgggtcactttcacattactactaccatatatgcgaggtaaccattgctacatgatctgctcagccttgtttttgtacattcaagtcaaaattgcccttgtgtgacgtatttcaaccacacaaaaagctatgaaaattcttaacttgatgaattgacgaagcaaatgaaacgggttttaaggtgttcaagtatgtgatgatttggccaacttttcccatcagtttgacatttaattgtggggctcaactaatcggcacatagcaggcaccagatagagctcttgagttgatgcatacaactaaataaaagggggtagtctcaacattttcaagtcggacgacttgctggtcattctggctgaccgactagggcgattaatcacgattagtcggacgacttgggcgattaatcgtgattggtccaaaccgacttggatgattaatcgcgattaatcggatgacttgaaaacattgtctcaccggatagagcttgactaatcggcacatatatatgaatcattttaatttttttcaacaattttggaggctaacatgctttctaaggcaaacctgatggagtaaatacttttgttatgttgacaggcactgttcccattcaaggattggtgggttgtccctgcaaaggttgcattcgatcagaccatctggtctgcgatctggaacagtatctactttgtggtcttgggtttccttcggttggaatcacctaccactatctacaacgagctcaagtccacattctggcccatgcttactgtaaggattcatcttccctgaataagtttaatcagtttgcagggtgagaatcgagcaagcattaaaagagttgtgctccttatcttcactgtcattacgaacaacccatgggcattttatacatatcggccacatgaattattgttttgatactacccatatctttgggattaattgtctacctttatagtggtatgtgtgtaatatatactcctgcctctgggcatagaatgatgacttctacagacatcacatgtagcagaataattcaaagctagaactgaacttaattatatcattgttagcaccagcagaaccgtgtgtacttaaccattttatttgcttttccaatgttgtagcactcaagttagaaacccttcatcattctatgcttgtgcttttactaccctccctcactccattattggaggttttcaagtgaacatgcagcagggctcgtaacaataacatacctgtctcttgataatgttgttgcaaatatttctaattactagctattttgtctttcttctttcctgttctgacaaagttnnccttgtttgaattgttgcaggctggatggaagttgtggccttttgcacacttagtacat

SEQ ID NO: 3666 - DNA, 342 bp, Zea mays
  misc_feature (337)..(338): n is a, c, g, or t
cggcggcaccaagatcacccaaatgaggaatttactagtaatacgagctagtgaaaaccatacgtttttcgtaggtttttaatttaactactggccccgttgtcatggaacataggaacaattcgtggtcaaacctgtcttcctgcctgcttgttgattcatactttgagcctaggattttttttttggagaagttcaatcagtagaatgtagtggtagctgtgacagacattgaacgtggaattgaggattaatacttataggggactcagttgtgaagtcctctattcatacaccttgagtgtataatctaatctaacacacataaagcatgctnnactg

SEQ ID NO: 3667 - DNA, 408 bp, Zea mays
tgtgctgtgcatgccgtacgtgtgcggccggcctcgacctcgatctcgaagagaggatgtgatcaagctgagttacggataagggggaacaacccatatccaggcatccacacgtacttctccgatgatccaacattatttgttgttaactagtttttttcttttctttatctctttctttcttttgcactctctgtacgtgtaatgtaatgcagtgtaatttaattagtgagagaagcatgacgccctactaccggccggattattagttaacagcaaattaattactacgtacctagctactactcgcgtcagcagcttctactgtacttgaggtttcagaagcccaatatatatgtatattgtcaaatttgtaacctgcattatatgcagaggtcgtcgtacgtg

SEQ ID NO: 3668 - DNA, 402 bp, Zea mays
tctgagatacctgggtttccgcagcgcaagtggtgtcgtgctaccggctcaaataggaaatttacaccatctgcagaccatcgatttaagcgggactggagtgacacagctgccagaaagcattgtccagctcaagcgactgatgcatcttgttgggcaacggctcatcatgccagacgggtttggtagcatggaatcccttgaggagttaggtactatcgactgctgcaagtgccccgtcagttttggggaagacctagcacttctgagcaggctgagggtgctccgagtgaccgagtggctttcgtcggggtcgaaacaagtgacatggaaaccagaaggaaatctttgatgtcatccctctgcaaactcggaggagacaaccttcggcgtgtcactatt

SEQ ID NO: 3669 - DNA, 269 bp, Zea mays
ggtgctcgggagtctaggattaagagaaggtctagggatggatgagtgcgagcagatgatcgccaagtatgacacgaacaaggacgggaggatagatgttgcggagttcaccagggttttggagtctgctggcatttgctaaactaatttgtttgttgggtttgtgtgggtgtgtgtttgctttacccgaccgcgcgtgttcgaccagcagcaaggagatgatactaacaggatgctgagatttggtctggaagagtaacagtgttaga

SEQ ID NO: 3670 - DNA, 394 bp, Zea mays
  misc_feature (378)..(379): n is a, c, g, or t
aaccggccgatgcaggcgtcggcgaggaaggcaccgatgaggggcgtcgcggcggaggtgccgccgaagttggtgagcgtggtggcggccttcgccagcggcatgtgcagctgagtggtcaggtacgtcagcatgttggtcgagaaacccaccacggcgagcttctccgccacctcgttggctgcgcgggcgtaagtgcaaacgcaaaaattaaaccaattgaggtcaaggttcccagcaaaaacagcacctgttggttagtaaactcgcttaccgaagatgaagggcattgttctcagaccacccttcttcctgcacgtcatcttccccgcttcctccatggccatggctgccgccttctccgttcgtggtggaaannctcgaccaacatgct

SEQ ID NO: 3671 - DNA, 877 bp, Zea mays
  misc_feature (814)..(818): n is a, c, g, or t
  misc_feature (852)..(853): n is a, c, g, or t
actagttgttaaaaaccaaaacaagcagaaaaacgtgtcgcaacgagaacaaaatgttcagacctagataaccaatcccaattgagtaattgctatattgcagggatctgtaaaaaaagaaccgcacagttcgctcaactatgattctaagaaggattgcaagttttggatgtcaggtacaatatgagaacctagtcaagaactactactccctaaagcgaaccaaatgaggagcaagaggtcgacaaaaaaacagtccggccaacagaacttggacttctgaaccgaagtagtactgatcttggcacgaaatgcacaaagagttgaatcatcatcagacagaactcagtaataactgacagcttcagtagcaacggaggaaaatctggcgaaatgtaaaaagaatttcgccaaagagggggggggggagtctggggaatatggtcagcaagtttcagtagcaacggtgtaaagatttgcggaatcgacagattccaagaactctactcaaatcgacgcaaataattgcaaaaagaggagagtaggggacggcgagctcacgtcagttgggactgggacgggaaaggcggatggacatggtagtggtctcgcgggaatagcctcgaccgtccaatgcatcatggtgccgtaataatggccggggtgatcgacgaagacgtatctgaagaaggtggtgttctgggtgctggcgcggagaagacggtgagaggcttggagcatgacgacgtggacgttgtccacataggcagcctcccagaggacgtcgtcctgctccggggtctcgtagacgccnnnnnccgtgaggttcgcatggtgacgggtgtcgacccnncatcgtgacgcgcgagacggcgag

SEQ ID NO: 3672 - DNA, 458 bp, Zea mays
agtttccatccaagatcaggacattgcgatcaaaacatgtgggcgacaaagaagctcgccacgactgccctgctcgtgctcacctctctgctggctgcacggtatctgatagagcacaccgcgagctcagggatgtcgtctcggtaccagatcctgcatctggttcaccacctcgagtggctcaagagcccagcggacgcgaaagaaaccagtccgggagtcgtcatcacaacggcagcttcttcaaacacctcctcggagccggaggactctgctagtaaaaactcctccgccgccgctcaagtgtttccgtggctagacacgtggagccagatgacgcggctagccgacatcgccagcggccttccgcacgcgaccgaggcggtggacgacgggaggactgcgtgggaaaacctgacagcatccgtccacgttcaccagaggcagaaagcagagag

SEQ ID NO: 3673 - DNA, 1030 bp, Zea mays
cggacagatgttgaattgctcttgatcatcccgtgtgttatatgacatggacagcgttgatgaagagtggatatcaagctggcggaaatccttagtaagagacaacaccaccacacttcagtttgcagaagatttgtttgagagggttatggacaaactagagaagtttgcatatagccacaactgtaatggactcagcattgatcagatgaaggaactggagactgatgatgtacctctgcacactattgaagtgatacatgcatattggcaagacaagaggcagaaaaggggaatgccacttattcgacattttcaggtgagcatatatttttgccttttatttatctatttttggcttctttttttagctttctattgtttagtggtcatttagttgatacaataaagaaagcaggtgagcattggatagatgttatctagctctgttattatgtttcatgtaatgtttagtaagcagtcttgggttcttggtcacaccttaactagataaagataactgcagttcacttacataattttatgaacatatttatttatttatttagctgggcatatagtactgaagcatgcttgaaattatttttgcaaacaaagtgtactgtcagccttttggtactgccagtgccaatgtagtgaagtaaaaagccataacactctttacatttgctgcaaatccattgtgtcccagagtatgattctgactaagtacttattgaactacatcctcaggggaccttttttgttgcctattcattggtaaagatatgaaagccttctttttgaacagtagcaatgaagcaattgtttggtcatagttgattgtacttatcaattatttttagaattcatggtaacatagatgcttcctgtcaaataattgattgtttttcctgagctttgattatgacatatcttacgaagcagaccacaatcttgttctaagtcttgcataattttcatttttcagtcggctatgtggaagatctacgagcagcagctgcatgaa

SEQ ID NO: 3674 - DNA, 417 bp, Zea mays
tggtgaggaggagatgctagaagcaggagctcgtgatctgctcactgagacggagaagaatccggttcttgtggtacatgtgcctgctgctgctgctggtggtggtggcggttctgccattcctgaacatgctgaagccggtaaggagactgctcagagccctgtgcttgtaggcgtgctgcatattgatggcaccgtttttactcatcaacatctttaattatatccctattccatttcagaatctaacaaagttgaagatcatcatgtaaacgcggagcatgggacaaagaataatgaaagtgataatggcgtagctcattttgataaggaaatacagaacaatgtgcctgatgacatagaggaaagctccaaggaacatgaaggtgatggagcacctgtagttgaccagacaaa

SEQ ID NO: 3675 - DNA, 372 bp, Zea mays
ggcgagggcccgcagttcccggccgccgtgcggtggatccggaacaaccagctccccgacggctcgtggggcgacgcggccctgttctccgcgtacgaccgcctgatcaacacgctggcgtgcgtcgtcacgctcaccaggtggtcgctggagcccgagatgcgcggcagaggtacgtaattactgtgtgctggccgatcgagagaacacacgacggcagtgtacctcgacagaaaacgggcgttgctgaagactcaagtgtgtgtgtgtgtgtgttcacagggctctctttcctcggccggaacatgtggaagctagcgacggaggacgaggagtccatgccgatagggttcgagctcgcgttcccttccc

SEQ ID NO: 3676 - DNA, 1403 bp, Zea mays
  misc_feature (674)..(674): n is a, c, g, or t
  misc_feature (700)..(703): n is a, c, g, or t
  misc_feature (706)..(706): n is a, c, g, or t
  misc_feature (720)..(720): n is a, c, g, or t
  misc_feature (797)..(797): n is a, c, g, or t
  misc_feature (815)..(816): n is a, c, g, or t
  misc_feature (1328)..(1335): n is a, c, g, or t
  misc_feature (1370)..(1372): n is a, c, g, or t
  misc_feature (1388)..(1390): n is a, c, g, or t
  misc_feature (1393)..(1399): n is a, c, g, or t
tcgcgctaaacccattcaatttggagccagttgatgctcctcctagtggtttgttgccatcttcatcattcctattcatttatatatcattaattgttcgctagccactcgtaacatgatatgtttttactaagtttccatcatgccttttctcacagtacctgaatcttacactatgatctcggagtcgaagtttcaggtttgcaagtttccatttgtttgtagtagtattgacaattacgtttacaacactaatatcctaaaaacaggtgcctgtggaggttctctttaatttcttgttgtctgatggtgcttttggctttgtggatgatttccacacaaaatgtggtgacaaaggttgatgccaatctataatttcattattcatgaatatcttttggtctttagaagtattttgagttttgacctggatgacctgcagaatttagttgctccaaatggcgtacagatgagcaagggggacttgtaagggatgtctcatttttgcatccaataaaaatttatcttggtaagtcaagtgctttcagttaactgaagaaattggttggcattgaatatgacatgggctatgacttgctttatattttcttatgttccattttgattacactaaattttctttaggtgcaaaatttgggacttgtcaagaggtncagaaacttcgtctttacaaaaacannnnagnctaagatccactgnctgccagttaagttgcgtctttactgagcttttggtcattggggaataaagaatctgtttggtttgctgcctcagtngccatagtttgccacgtnnaaggttaggcaggtttgaccggcttgcgtgtgtgtttggtttgtagccacacttgtggcaagttttttctcttgcgtaagtctcactcgtcaatgacttgtaaaagtgtgatatgaatcctttaggcatatgccaagatgtggcgaagaatttgagcgcctaaccttaggcaagtgtggcagaaaatatgtggtattttttggcatcttaagtatacaaccaaacatgctatttttttgagacgtagaactagcaattattttagtgtcctctttttgtcgttttaatcaaacttagttctgtacctgaacaaaattcatgccttaattccttatatttggattttggcccaattaggttgccttcttggcagttgatggctatgtgcatgtcttagctttctaacatgatgtcctgtgccatcttctgtgttaagatattatccatttggcgtccagagatgatcatgctaacagtgatctgttgctagtcctgttcattctgctgcatgnnnnnnnnttgtagtaatgtttcccttccgaagaataattgannnacagctccctgcaatnnntcnnnnnnntggg

SEQ ID NO: 3677 - DNA, 771 bp, Zea mays
agcgcacacggagatgtcccagctgagccctgctggccacatggctgcgacgctcctcctcatcctcctggcctccgcagcagcagcagcggtgtcagctgaccaacaggtctctgcctgccagaatgacatagacgcactgtggcgcagctgcaagcagttcgtccagaaggaggggcccaagatgcctccgtccgaggactgctgcaaaaccatcaaggccttagacgcccacgcgtcctgcatctgcgactacgtcggctccccggacgccaggaataagctagacctggacaaggtgttcttcgttaccaaacagtgcggcgtcaccgtccccaagggctgcggtgagtataatagctttagctgggcatggccaatgatcatttgagaacgacaatgacatgctggcccgctcacagtagcagccagagagggtcctgcatgtcgatgtcagtcagctcatgctccacgtggcgtgatcatggtggaataatattctgtcatcaatcagacaagtaaacagacagggatatttacaagcatatgaaaacaacctactcagcagcaactcatgtgaagatcaagacttgcttacctgtgacctgatgactttttaccactgcacctgcacaaaaaataaaccgttagatttttagatctcaggtagttatgggctatatacatagattaagcattatagatctcgtctgttaccattgcttttactgccctcctcatttcgtgtcccttccactgcaggatcaaagc

SEQ ID NO: 3678 - DNA, 378 bp, Zea mays
tgttccattgtaagtgatcgggacacagttttcactagccagttttggactgaactgtttcacatggccggggttaagttacagatgagctcagcctttcacccacaatcagatggtcaatcagaagtggtgaaccggattataactatgtacctccgctgtctcgctggggatcggcctaaatcgtggttgaagtggcttccatgggctgaatattgctataattcatcatatcagtcggctctaaagtgctcgccattcaaagtagtgtatggcagggaccctcctcctatggtttcctaccagccagggaactccaaggtagcagccgttgatgtccagctgcaggacagagatgcatttcttgaggaaatcaaa

SEQ ID NO: 3679 - DNA, 484 bp, Zea mays
cgccgccgcactggatggccacgcgggcgcctgatgcatgcatgcatcatcaaacacacacacgtcgacctcgtgacccatccatccatccatccatccatccatcacaagttcattcattaggtgcgaggatgcaacagcatgcatgtacctaccgtagagcgggtagtcgaagagtcccctggcgccgtccttgcactgatcgcagaacaccatgccggccaccaccgtgctggccatggccggcaccgccaccgcggcgaattccagcagcagcagggtcagtagtagcctgctgctgctggtgttgatgaccatcatatgacgcggctccttcaccatatatataatatatgcagcacaagcagagcagacgatcgttgttgatgcttaatttgccagcaaaactcagatgtgtatatatagagagagagagagctgaactagctagctcaaaggtatagtagtaagtagctcgctttgc

SEQ ID NO: 3680 - DNA, 315 bp, Zea mays
acacaagttcaaagctgatggttctcttgagcgctacaaggcaagatgggttcttcggggtttcactcaacgccctggtattgatttttcagaaactttcagtccagtggtcaagccagctacagtccgaaccgttctttccctggctctctcgcacagatggccgattcaccaacttgatgtcaacaatgctttccttcaggggaccttgtcagagactgtttattgtgttcagcccactggttttgaagattccactcatcctgattatgtgtgccgtctcaatcggtcactttatggcctcaaacaggcccc

SEQ ID NO: 3681 - DNA, 459 bp, Zea mays
tatgtgtgttgaggagcgaaatccgtgaaatctaggtgaagaagagacgaagcactaatgtgaattgtgtttatgtgcctatgtgtgttgaggagcgaaatccgtgaaatctaggtgaagaagagacggagcacgtcgtcgtcatggttgcagctttgcttttgtcgtcgtggagcctccaccagtgccgtgtagcagtgagcccctcgctagtagtccgttgttttttgcatccctagtgcttgataaaatgttgaaccgttgtgtgtcgttaatcgcagccaccatcgacgttgtgcctcgcgcttcaccaatgcgatgaaatgttttagttgtgtgagataatatggttgtcgttcgaatggaaagtagaattaatctatatatgtgattagaaagtgccaagcacatgataattataggagtaaattgaatacttgctgtttggactgtgttcag

SEQ ID NO: 3682 - DNA, 353 bp, Zea mays
  misc_feature (345)..(346): n is a, c, g, or t
gcagaagctccgtgcaatactatggccactgagcacctcatctattgctaagaccttggatgtgttttgtgtgagcaccaccccatccatgacagcatcaggacaggagtggccgcgtctatgtaaatgggaagaaaagaggaaggaggctaactctgcttctactacagaatcctcatccttggacagaaactggtacatttgtgtaagggatgcgaggctcctccggtcgctacaaatctttcgtacctatgaaaacaatcgtttttcccttggctggcctacacgtgtggagatcactacaccaccagcatcaggtgatcttgttgctgctcaaggagtcannatcttgc

SEQ ID NO: 3683 - DNA, 353 bp, Zea mays
  misc_feature (30)..(30): n is a, c, g, or t
  misc_feature (34)..(35): n is a, c, g, or t
  misc_feature (40)..(40): n is a, c, g, or t
  misc_feature (109)..(109): n is a, c, g, or t
  misc_feature (115)..(115): n is a, c, g, or t
  misc_feature (117)..(117): n is a, c, g, or t
  misc_feature (153)..(153): n is a, c, g, or t
  misc_feature (167)..(167): n is a, c, g, or t
  misc_feature (175)..(175): n is a, c, g, or t
  misc_feature (180)..(180): n is a, c, g, or t
  misc_feature (189)..(189): n is a, c, g, or t
  misc_feature (232)..(232): n is a, c, g, or t
  misc_feature (237)..(239): n is a, c, g, or t
  misc_feature (245)..(246): n is a, c, g, or t
  misc_feature (252)..(252): n is a, c, g, or t
  misc_feature (257)..(257): n is a, c, g, or t
  misc_feature (261)..(261): n is a, c, g, or t
  misc_feature (278)..(278): n is a, c, g, or t
  misc_feature (284)..(284): n is a, c, g, or t
  misc_feature (296)..(296): n is a, c, g, or t
  misc_feature (345)..(346): n is a, c, g, or t
gcagaagctccgtgcaatactatggccacngagnncctcntctattgctaagaccttggatgtgttttgtgtgagcaccaccccatccatgacagcatcaggacaggantggccncntctatgtaaatgggaagaaaagaggaaggaggctanctctgcttctactncagaatcntcatncttggacanaaactggtacatttgtgtaagggatgcgaggctcctccggtcnctacnnntctttnntacctntgaanacantcgtttttcccttggcnggcctncacgtgtggagntcactacaccaccagcatcaggtgatcttgttgctgctcaaggagtcannatcttgc

SEQ ID NO: 3684 - DNA, 398 bp, Zea mays
gcgccagcgtttgggaacgtagcccacacctcccgtctcgcgccattcttctccactcccaacttgagagcttcatcttcctcgtcctgctccacctcgacctgacccgcccaacgacgtcggcgatgccgaccttggaagcggccagaggtgagattagtccgttgcggcgccttgccgggactagaggaggaggcaggcgaggccctcgctaggaccggggcgccggcgtgggcgcggaggagaaggtcgccgctggccatctccggcaggcagtgttttgtgaggacacggaggagaaggtcgccgctggccatctccggcaggcagtgttttgtgaggacacggggtttcttgggcgtgctgtgtcgtggcgcgcggcgtctaggataaacggc

SEQ ID NO: 3685 - DNA, 616 bp, Zea mays
tagtggaggagatctcgctctcgagtaagaagaaattttctttcttaaatttcaccctgagattctgcttagtacgtacgacggaaacagatcgatcgacaaggctttccatgaaaaagggacgtgcttctcagcaactctttttacatgcagcagacagtcccaagcacagggcagcagcaggggagatactgcggatcggcaaccacaacatccccagcagggtgtttacgttccgtgaactggtggacgccaccaactctttctgcccagaaaacctgctgggcgagggcggcttcgggagggtgtacaagggatgcattccagacaccatggaagtaataaatgagcatttcattccttgtgcacgttccattaaatttttttttaaactaataaggccatgaagaaacacatgttaaatatgcaggtcatagcggttaagcagctcgacaaagatgggctgcaaggtaaccgtgagttcctcgtcgaggtgctgatgcttagcctgctgcaccatccaaacctagtcaccttggtcgggtacagcacagactgtgaccagaggatcctagtgtacgagtacatgtcactcggttcactgcaagaccatctc

SEQ ID NO: 3686 - DNA, 424 bp, Zea mays
tcccactgcacttctcgagctcctcaatttttgaccacagctttactgcttcagccttctgagtgtccagagccttcagaactgaattcttctcatcatgcaggcgtgaacacttcatatcaagatcattgcaggaagcttgaagttgggacatggaactgtggagctcctccaatttggccctcaacttaatggcctgagcatccttctcacgggttgctacctcagctacttctttgtctgcctggatttcctccaacttcctcttcaggctctccaactcgcccaaaagtctagccttctcagcatcaaatgccttagcagcagcctcattctcagccagcaacgtggacaattccatcctgagacttttaacctctgcgacagcaaagttgtgcttcttctcagcagccacaacctcaga

SEQ ID NO: 3687 - DNA, 355 bp, Zea mays
tcagctggaaaacgtgggtttttttctaaaaagtctgttggaccacaagctcgtgagaagttcactttggaagatatgttgtgctttcaaaaggtgatgctgtgaaatctcattccatctgtgaagttacaccgttgcacttgtttcaacttatttttcttctaaacttctatgttaaagctttacatcaaatcacatctatgaatctatcgttttgttctgctaatttggcgcttctttgtatctcctgcaggatcctattccaacttcattactgaagataagcagtgaccttgtaagccgctcaattaaattgttccatgtcatattgaagtacatgggcgtcgattcacca

SEQ ID NO: 3688 - DNA, 344 bp, Zea mays
agcctcattgcctcaaccccaaaccaatccgtcgcagacactcaaggtcgcaggatgccgccgccgcgtgagcaccaccagccccaggacgaagaggacgacgataccgcaggcgttgtcaagctcatcagcgccgagggcttcgaattcgttgttgacaggaaggccgccatggtctccaacaccctccgcaacatgctcacatccccaggtagggtactcttcacctcttccattcccatcagcgcgccgtcctcgcatcacatccatccctctcgtcttccccacaggcggcttctctgagacgcgccagggcgaggtccgcttcccagagatccccacca

SEQ ID NO: 3689 - DNA, 557 bp, Zea mays
gcacgcgacgcttgacaccccgactgcctcgacccgcctgcgcccaggaagacccgacgccgccaggcgacccctcacctctctcctcccttccctcgggaccagggcaacgcacaacgcgccggcggtgaccagtagcccgctctggcaccagctcggcagctccttgcatcgcatctcccctgctaggcctcctcgtcccggtacgtcgtgcctcctcacctcccgctttccaaactctcgtctgctgctttgcttcgccccgccccgcaatgggggagatgtccggtcgtccgggccgtgttcttagcctgggttcagcaagagctgctcatggtgctgcagctcggaagatgattcagctggtgcatgcgaggaacctattatgctgaaacaaagtaccagctcaagaggtcctagccgctcctcaaaggattcaaagagcctctacgcaaaggtcagaagcactcagcgtaaatttcacagtgatcactgaacctgcattttttgttttctgatggtttagttatactacataacagaggagaagggagagg

SEQ ID NO: 3690 - DNA, 364 bp, Zea mays
gggaagccgctggccaacgtggtgttcaagacgtacggcttcatcagcatgggccaggcgctggcgttcctggccgacttgaagctgggccactacatgaagatacccccgaggtccatgttcttcgcgcagctcgccggaacgctcacggcgtccacggtgcacttcgccaccgcgtggtggctgctcaccacggtcaaggacatctgcgacgtgggcaggctccccgccggcagcccctggacgtgccccggcgacgacgtcttctacaacgcctccatcatctggggcgtcgtcggcccgctgcggatgttcggcagcctcggcaactactggcagatgaactacttgttcctcgtcggcc

SEQ ID NO: 3691 - DNA, 298 bp, Zea mays
  misc_feature (289)..(294): n is a, c, g, or t
gtcttcacgagggaagctgtctgccgccggcgtcctcctgctaatgacgctcctcatggtggccgccatgcgggcggttgaggcacgagactgcctgacgcagagtacccggttaccggggcatctgtgcgtgcggtcggactactgcgcgatcgggtgcagggcggagggcaagggctacacgggcggcaggtgcctcatctctcccatcccgctcgacgggattctctgctactgcgtcaagccttgcacatccaccacgacaaaatgatgagacaagagcggaggnnnnnntgca

SEQ ID NO: 3692 - DNA, 341 bp, Zea mays
ctgaagatgatggcattcggaggcaacaaccgggcacatgctttcttcaagcagcatggatggaccgatggcgggaaggtcgaggcaaaatacacatcaagagccgctgaactttacaggcagatgcttaccaaggaggtcgctaagagcgccacgaccgataatgccctgccatcgtcacctgtcgcatctgaggcttccaagccgccatccgatgacttccctgaattcaaactcccagatgtgccagcaccaccggcagaggatctgaatgggaagcatgagcccaagtcccccaaagctgctcctcgttcaccaaaggccgctactcattccacctt

SEQ ID NO: 3693 - DNA, 440 bp, Zea mays
aacaatacctctctagctcgccaccaacaatggcctctaggttctccatcatgctcgccacaacggcactggctacgttttttgtgattggttcgtgcaccaccccgctcaccttcaaggtcggcaaaggctccaagcctggccacctggtcctcacccccaacattgccaccatctccgaagtggagatcaaggagcacggtggcgatgacttctcctttgagctcaaggagggcccggccggcacctggacgcttgacacaaaggccccactcaagtaccccctctgcatccgctttgccgtcaagtctggcggctaccgcatcgccgatgacgtcatccccgaaaattttaaggccgacaccacctacaagaccaccctcagcatctgatcatcctcttatgaggaataatattttgaaagagctcatctgatccat

SEQ ID NO: 3694 - DNA, 574 bp, Zea mays
cacttcaattaggtgttcgtgtaattgaattggacatatggccaaattcttgtaaagatgacattgatgttctccatggaaggtatatatctgcatactttgtgcattcctttcatcaggatgttttttttgcacaccatcttgtcgaaacattatttctagactgaaactgaagctgccatgagatgtgctgactgtgacttcattcacgttttcactcttgataggacactcactgccccagtatcacttatcaaatgcttgagatccatcaaagaatatgcttttgttgcatctccctatcctgttattataactctagaagaccaccttacacctgatcttcaggagagagtagctaaggtaactgcatttctttgaatgattaatatatggcaggtgattctagtgtagctatttctgaaattttgtatagatggtccttgaagtgtttggagacatcctgtattaccctgaatcgaaacatcttcaagaatttccttcacctgaagctctaaaggggcgtgtcatgctgtcaacaaaacccccaaaggagtatctcgaagcaaagggt

SEQ ID NO: 3695 - DNA, 534 bp, Zea mays
caaacatattgacctggataaggggtgcacatacagccatgccacactgtcaaattgcgcctcaaatgcttttggagatgatttatacggcttcagagaatttacagtgttggatatgcaatctgctacgtgtaaattctcagagagcttcatgatgtggtcgcaaggtggtgggtgtgtttacaaaggagaaattatgaacagaactgtgatgatctataagctgcactgccatagcattgagagcgtgaggcagttccagcaagaggtattccatgtttctccgattttctcatcttttgcacttgatatgtttattgattagccagtgcactctagaagttgctattgaattcatggggaccttttatcagttatgcatgtatctaagaacatatcctcgcatagctgaagatacttatttctcttttctatgtcaggtttatatcctcagcaatgtgaggcaccctcatctagtgacactggttggggcgtgcccggaagcgctgtgcctcgtttatgaatacctgccaa

SEQ ID NO: 3696 - DNA, 455 bp, Zea mays
tggcccttgtagggcgacaccactcccacgcggatcgccttcctcgtgtcaaccgactctgcgcacacacacgttcatcagatcagctcgacgtacgtactgtgtgctctaggtccagggagatcttggaaccgcgtcagatacctatgaacagcctctggacgatccgggcgacagccgctgcctcgacggggttgatcaggctgcggtcctgcttgcccgtggcctcgctgccgccgtcgatgttgatgaacgagtaggacccgtacatggggccggccaagtgccgcctctcgtagttcctgttcaggacattggggccgtcggttatccggccgccgtagaagctggagacagggaacttgctgatccatgggtgcatcctgtactgtacgtcgaggaggtgcttgggctgttctagagatgttagcctctcaaacaaacttcttccaaaa

SEQ ID NO: 3697 - DNA, 393 bp, Zea mays
gtggtcgtgcgtgcgcagcaccgcctcggcggcccgtggcgacgacaccacgatgaccggcatggcgccgaggcggaggaacatgaggtccgtgccgtgcttcctggcgaggttccagagggagaggtgagggagcgagccgaccaggtggaggtgcccaaggacgggcagcgccggaggcgaaggcgggagagggtcgtcgtcgtcgtctaccagcagaggttgcctctgcctctctctctcttggcaccgaacgagtagcgcacgaggaagagcaggagtgggatgagtagtagaaaccatgctcgtggagacgtcatctcacgcatgaacacctgctgcacttggtttgccatggcaaaggacgcgaactaggaatagcgcactgatcag

SEQ ID NO: 3698 - DNA, 355 bp, Zea mays
aagagaacgtgactcctgcctctaaggtgaagaccgttgttaggggagttcttggtacaaggatggataattcagtgtcagcagcaaatgcttcaaataagaagaaagttcttgggtcaagggtagataattcagtgtcaacagagaatagctcaaataagaagcaatgtgaattatcatcgaagtccaaaaaagtccacacagtagattttgatgttttctattcggataaggagaacttgactcctatatcttcaggaggcatgaaagcaaggaagtgttttcccaaggacctctcagtcgacttagaccaagatctggaagcattctgctcagacaaggagaacttgacacc

SEQ ID NO: 3699 - DNA, 340 bp, Zea mays
aaacctacactgtacacatcttgactactaaacaggcaccacatttacatactccgccgcagcaacagctgccgcgtcctgttccgggtgctgttcctccatctctccgctgatctcctccagtgccttccccttggactccggcaagaggagcgtaaacacaaggccaacaaggttgcacccaaccaaggcgaacagcatgcttcggttgttgttatgtttttcggcgtaaacgaaggcaaacacgccaattatggcgccgagcttaccgaatgccccagatatgccgtggcatgtcgaacgtagccgtgccgggaagatctccgctgggattatgaat

SEQ ID NO: 3700 - DNA, 315 bp, Zea mays
gtggagcagatctacggcacgccggggcggccgtacggcctgttcatgggcggcggcggaaggctgctggccgcgaacgtggtgatgatcctggtgatcgccgcgtgggttagcgtcaccatggctccgctgttcctggcgctcaacaagatggggctgctccgagtctcggccgaggacgagatggccggcatggaccagacgcggcacggcgggttcgcgtacgcgtaccacgacgacgacttgagcttgagcagcaggcccaaggggatgcagagcacgcagatcgcggacgcggccagcggcgagttctag

SEQ ID NO: 3701 - DNA, 454 bp, Zea mays
  misc_feature (437)..(438): n is a, c, g, or t
ccgaacataccacggggtccggggcgtcatcctgcttgcacatcacccacggcacgccggcgttggtcccgacagccatctgggccgcccagtgagcgtatggcttgccgccactgcccacgacggactccattggcccgaactcgttctccacctgcgcatagtgcgtggccggatgaaggctctaaaagttctgctccagtttcgagttgcgtttgcaagtttggactggaaatgtgacggtggtgtggtgcacacctgagccatgatgatcgggcctccctgccactcgaacagcccctccgacttcatcatggacactatcttctccacgaacttctgcattgccgcctgccgtaaaaaaaagagagagaaatcaggcacacatccctgccaccccaattggtgcaaagtgaaagaatgacaaaaaaaaattnnccataaccaaaaaaaa

SEQ ID NO: 3702 - DNA, 973 bp, Zea mays
  misc_feature (60)..(61): n is a, c, g, or t
  misc_feature (63)..(65): n is a, c, g, or t
  misc_feature (283)..(283): n is a, c, g, or t
ttcagatttcctcccacgaaggctactggtacctctccagcttcttcatcctcagtactnntnnncgaaccataagattctaattaggccgataaagcgcaggggaaaatatgaagtacacacatcaggaactagctacgttaaaactcacgacgtcacagccacatcaacaattccagggtgttcgatcaaaactgcttccaagtcagctggagctatctgacggtcagaaaaagtggggaaacagtttgttattactaaaaaaaaaagaacagaccaaacncggtggtgacggctttcacacaagtagccttgtttctgcagttttgcggagaggctgcatcgaactcagaaacattggctcagtgaaaaaggctcgccactgcgccaggcttgttcttctcagtttattattatttttctcacaatatatataatataataacaatggcaaaaacagtgtactttatttggcctgctaaaggaagcccgcatacctgaaatcccttgtacttgatcacctctttcaagcggcccactatatacaagtacccatcgaaatcgaagtaggcaatgtcaccagttcgcagccagccaccatttattgcgcatggatcaacatgattcaagtaacctgtgaagaaacgttcttcagaatccaaacacatatttggtcttattaggatttcagtcaccagctcacagcagataagcacaatcaggtctgtttaagttttatagcatattagcaatcctaccattatctgtgaaagaactactaaacatctgaatgctaattgacaatgaaacatgagtttaatagagtgcatgcaaaatggtacccagttcgtcccaaagtgacaaagtagcattaaactcatgaggttacctttcattatagctggaccatggagccagagctccccacaagagcctggagacaaggagcaaccagttccacagaacaatctgc

SEQ ID NO: 3703 - DNA, 470 bp, Zea mays
cttattgggaattacgttctgtacaaatcttcttttagtacttcaacctaaataaagcgtgtgacccagccaaatgcgcaagcaaaatactcctatgtgcaacaaacgctgtcgtctgtacatctccggaggctgcaaaccaaaatcaccggtcttcccgtcgaaccgtgtttgggtccgacatcatgtccatcatcatcttctctggagagtcttcccagctagcaaaagttttgagatcaacctgaaagagtaaacgggaatattgtgggcatgcatgcacgtttcaataacgatgaacatggcaacaaatggttcaagtttgctcttagtcttggtagtacctttcttcgctgctctgagaagatgtcctccctcttcttgtacatattctgctgtcgtttcgttgcttctccacccagcccccatacctcaacatcaagcactgaagcctcaacaggcaaataaca

SEQ ID NO: 3704 - DNA, 891 bp, Zea mays
catcctcttcacttcacctgattctagatactgtaattctgtaaaaacacctttacaaacatgtattaactcattaatatggaactgcgatggttagctgaactatgtataacaacttctgcttaccaaattgttgtcacacgttcttctagagaagataatcagtgaatttaagactcttatattatagcactaaacaaggtaatatatcttcaaacaatgtacttagctttctttttacctggccatttaggaatttagcagtgaaggttttgctcttgccactaaacaaattcaagtgttattctgtattttggtttggcatgcattgggtttcataccgtagcatcatcacttctcatcacattggtatgtctgatagtatccctatctgatgcattgggctggttaattttgtgatttacttgatattgtttttatcacttcatattaactttaagtgcatatttgcactattttatttgaaatgaactgtaggtatacagtctccaaatattgagagcttcttttttgcatgcagattatccattacgaattgccaaatgatccagaaacttttgtccatcgttctggacgcactggacgtgctgggaaagcaggaactgcaatcttgatgtttaccagcagccagaaaaggacagttatgtcacttgagcgtgatgttggttgcaagtttgagtttataagccctccgtccatagaagaagtgctggagtcatctgctgagcatgtcattgctacattgcgaggggtgcacccagagtcaactcaatactttcttggagcagctgagaaattaacagaagaactaggacctcatgcccttgcttctgcactggcacatctgagtggattttctcagccaccttc

SEQ ID NO: 3705 - DNA, 333 bp, Zea mays
ggagtccaatggcaacgatgagaaaacagatgcctcagcagttgataagtatccacttgtatctgtccctgatgagacactgacgccagaacagttaaaggaaaagaagaaacaaatcttacttaaaaccacaacagagggcaaattgcgcgctaagcagaaacgtgctgaagaggaggctttgcaggagaaacaagaagaaaaggggcgtgcggagaacccagagttataccttgaaaagcttcaggcccgatattcagaactttctgataaatttgagcagaggaagcgacagaaagttaatggtagtcagacaaatgggaaccatagttc

SEQ ID NO: 3706 - DNA, 465 bp, Zea mays
atggaagcacgatgcagcatttcggtactctaaaaggtaagtaatttacattctcaatatgcttttccagaagaactttgttgaattagagtagcagtttgtgctgatcttttactccacgctagcagctcaagtttttagcagcactggcgaccatgatggacgatttcatattaagaggactatatgctttgctgctacggacaagcaggagccggtcgtttcacgttcctcagacatgccggttttgcatgaggcagaaagtggtactaaagttacccctgcatctgaaaactcctacttcgctggcagaggtgctggaaaaccaggattcatctcttttcaagaaagcagcttccgaaagacaactgtggagagcgtgccacatcctggcaaggaagcatctcgattagtttggtttattggccctactattctcgtgtctttcttggttcttccataaaa

SEQ ID NO: 3707 - DNA, 527 bp, Zea mays
actggcggcgccaccggcgtggcggacggcagcgcccttgtccacccttgggatgttccctctcaggcacaccacgatctttcccctggtcttctcggggtccagcgaccccaccaagcacaactggctgcacaaggctcgaatacacgcacgcatggtcaatacattgcacactgtgattagtgcagttaatggtgagctagcttacgcgtcttcctgcttgctgccaggatgtatggcttggtcgccggtgatgagcgggtagaagcctttcccgtgcagccacctcgccgagaggctcacgccctgacaaagcacaaggcatgtgacgttacggtgcatggctttaggtgtgtgtgccgcacgtacgcagtgcagaagcgcgcacgcacctcgaccctggtgtggttgaacacggcgaaggccgagaactccctgtcgacggagctggcggcgacggtgaggatccacggcgcgacgttggtgacggtgccgaggtccgggccctcgttgctggcggagcagac

SEQ ID NO: 3708 - DNA, 411 bp, Zea mays
atcaagaggttgcaggacactcagcattcagaggaccaatttacatctgagatgtcaactctgggaagtgtaaggcaacgtaacttagtgccacttttgggatactgcattgtcaagaatgagaggctcttggtgtataagtacatgccaaagggttcactttatgataatttacaccagcaaaacagtgacaaaaaggcattggaatggccattgaggctaaaaattgccattgggagtgctagaggtttggcgtggcttcatcacagttgcaaccctcgcattcttcataggaacattagttccaagtgcatattgcttgatgatgactatgagcctaagatttctgattttggcttggcaaggcttatgaatcccatcgacacccacctgagcacatttgtgaatggt

SEQ ID NO: 3709 - DNA, 402 bp, Zea mays
gctgcccaccaagaacgcgctgctcttcacggtgctgtcgcagtacgtgccccgcctggtgcgcttctaccccatcacctcggagctgaagcgcaccacgggggtgttcgccgagacggccttcggcggcgccgccttctacctgctgctctacatgctggccagccacatggtgggggccttctggtacctgctggccatcgagcggctggacgactgctggcgggacaagtgcaccaacctcaacttccaccagtgccgcacctacatgtactgcggcggcggcagccagggccagtcgggcttcctcgagtggcgcaccatgatccggcaggtgctggcgcaggagtgcgcccccgtcgacggcagcggcacggggttcccctacggcatctacaccac

SEQ ID NO: 3710 - DNA, 564 bp, Zea mays
tgccccaggtagtacggtaccctgttctgttctttacgccacagatacttgtatatcgatcgatcagggtgtcgtaccgtcagtccgtcacacactgtgcttacggctatatatatatatatatcaggttttcgtgtgggtagtgcggccacacctccagagttcagaggttatgaacgcgaaaaacgtgctgatgttcatgatcctacttcagtacgtgcctcggctggtccggataataccactctacctcgaaatcacgagatcagccggcacagtagtggacactgcatggccgggggcagcctttaacctgctagtttacatactcgctagccatgtaagttctctgatcatttaccaatgctgttgaaatatactcacaggatgtaagtcctctgatcatttaccaatgcattggcttcgttcttacaggtccttggagctctttggtacattctggccatacagcgagaggacacctgttggagagaagcttgcaacagccaggaaggctgtgatctggcaagtctgtactgtgggagtactgcatctggaaacaac

SEQ ID NO: 3711 - DNA, 393 bp, Zea mays
acgacacgacagcagcaaggtcatggtcatcgtcacgagccggtccgagaaggtaaccaggttcgggacgacgacagcggccgtgcgtctgcagaacctgtcgcacgaggcgttctggtacttcttcaagacgctggcgttcggcggcacggaccccggcgccgggacgacgcacgcgagctcctccgtgcgcgtggcgatggagatcgccgggatgctaggcgggtgcctcgtcggcgccaacatcaccgcctatctcctgagagacaactgcgacgtccgcttctggcgcaaggtgctggccttcctgcgaggcgtcgtgctcacgcacaggcagccagacgacagcggcgacggcgagcacccgttcgacctcataagcgacaacaggct

SEQ ID NO: 3712 - DNA, 360 bp, Zea mays
  misc_feature (329)..(333): n is a, c, g, or t
agccggagtccgtccagcgcggcgcgggttgatcccttgcgtctccgcccctgccccgcgccggcgacacctttttgcggtgcttgcgttgcgtcgaggagggacaggcgcgctgcgtccttcgcacggcaacggcaagacggcggcgttgaagatgcgggtgttggaggaggacctcttcccctccaccccaggcaaggtgaagatcgagcgggcgggcgccatgaaccggcagctccaccgctgcttcgcgtccaccagcaccatgttcctgtgggcgctgttcctcgtcgccatgacggcgtcctacctcagcttccagtccttcnnnnnacggcgtcctacctcagcttccagtcc

SEQ ID NO: 3713 - DNA, 397 bp, Zea mays
  misc_feature (390)..(391): n is a, c, g, or t
cggagaagtgtcggctctgctcggaaagatggcctcgctgcaggatcttgaccttagcggcaaccccggcctgtgcggcgacatcgccggcctgagttcctgttactcggatccgattcgaggcggctcccgctccagacgctacagagcgaggctagtcctcgtcgtcgtcacgctggtttccgccacggcgcttctgccctccgtagctgcagtgtcgttgctgctgatggccaggaggaggaggaggcgagccggacatgacagcggccccgacacgacggcgagcggtgccggcggcgcgatggctctaacggtgtccatatggggcaaggacgcggcgttctcgttcggcgacatcctggcggcgacggaacacttcaacgaggnnctactg

SEQ ID NO: 3714 - DNA, 362 bp, Zea mays
tttgccaggctgttgaactccactgattttgagggcagtgcagggtaacgccgctgggaaagcgtcatgagcctcttgattgactgaaggtacttgcgagtggtctcgtcattcatgatgtgggcgacgctgtttgtgtagatcttctctcgggcagaacgctcgtggatgccaaccatagtcactccaatgggccatggtgcattcccgattgccaacttgatatattggtccattgctgctaaataatctcgcttcatgcaacactcgacaataacaagcaacgctcgacggatatcatcaggaagaacctaaaaatggatccagccatacatgcatcagaatcagtgaagcaccaagaa

SEQ ID NO: 3715 - DNA, 384 bp, Zea mays
ttttttccttctttgtgccctccaaaaagttgcatgagaaccgagctagtgcttaggtcgataagcaaggtgggctatgatgggtgtgtgtaggggtggtaatgggctctatgttttagattataaaatttaaggatcggatcattattaggatcggactctatttttattcatttttgaactaaaaattaattaagagattaaacaaatcgtgaagaaacatttgagttgtgatccattaccacccttaggtgtgtgtgagtagcgtgtgtgtgtgttcacatatgaaccaatgctacagctgtacccagatgcgaggcttcaaaaaaaagttgcatggaattggagatgtctggagtatgaactgactgcagacttcacgag

SEQ ID NO: 3716 - DNA, 781 bp, Zea mays
ggagccctccgaggagcgcggccacgacgctggaggagcttatggtgctcagccggagactgaggtgcggacaagctctgccggttgacgtcgggaagaagagactgccctccgtggtaattctctactaccactcacgttcatcttcatctttgtttatatctgcatcagcgaatctgaaacagccacgcccttcatttaataaatagccagggacaagcttgcaaaatccgtaaagttggttagcattaatcagttaaaaaatacaaaaaaagtgtcacatcgctgcagcatattcagacaaattcatatcatatcgttgtgtgaatgggaccattacatctgcattgccgttgaggcaacaggcaagccacggatgcatcttctcattggcaagcagaagttgttgttattattatattgttgtcagtgtatgatgcagacaccacaactgctctagccaaacgctgatgacagtgctttgtccctgctcttgctctgtctgatgtttcaggagctcatgaagaagctcttcatcgtgtgttcttagctgcactgcacatggacgtgccaaaaggtacaggctgcatgtgagaccataatagaggaagcatggcaaagtggggcgttcgcaagtagaaagcctaactgtcgggtgactggagttgtaccgtcagagtcgtcaaaatgttggtctttgtgtgtgtgtgtgtgaaatgaaacgttgtgcaggagagatactctggatttttgtttgtacgacaagtttgaaagaaatgtt

SEQ ID NO: 3717 - DNA, 351 bp, Zea mays
  misc_feature (345)..(346): n is a, c, g, or t
aggagacagctagctgctactcttgatgagttctgggggcatctgtttgattaccatggtaagctcactcaagaagctagcaccaaaaagtttggtatcttgcttgggatagaccttagaacacctagcacatctgtaagaacggataaacaagctgctgaaatacttaagagcccactggtgagagactcaatgcggggggcagcttttttgtcaagctcagtggacctgatgtcccctaagaatgaaacatcgaatttggaacttgcatatgggcttcagaggggacctggcatgggattgtcaagctggtctcagggtatgcagctaccaaatacacagctnnagagc

SEQ ID NO: 3718 - DNA, 353 bp, Zea mays
ctcatcaaatgcatataaatttgtcaagagattgtagtagccaacatggtcaggatccagcttgagcagattctttgctgctacttcgctcatcttagtgttgttgtgttttctgcatgcagcaagtaaggcacaccaagtatgggcaacagctcttccatccatatcacgaatgactcttatagcctcttgcagttcaccagcccggccaaggagatcaaccatagcactttgatgctcggcatttggcacgactccaaaaacttgagtcatgctatcaaaaatttgtattccttcctgaaccaggccagagtggctgcatgctgataacactgacagaaacgtcacactgt

SEQ ID NO: 3719 - DNA, 398 bp, Zea mays
gagcaaacccatttggtgcaaagcttcctgagccgccgcttgggttggccatggaaggggagaagtggcggaaacagcggattttggagctggaggtgtacttgaagaggatcgagctgctgcaggatcaggcgaaggcaacgcttgaggagctcaagtcatcaacccctgggtcttaattcatgataagatgagatcgctttggttttaggattcttgctctgattcttagtgtagatgtttaggcatttttgcatatgttacgtccataaaagaatattgttgacctgattggggcttggaactagtttatttgttgttctgtatgttcatgtgatattagcttcaatttatgatctttttttctttataacataggttcatgttcctttgtttac

SEQ ID NO: 3720 - DNA, 394 bp, Zea mays
cgggtggtggaccttggcggcaacaagctcgctggtccgttcccgacttggattgctggggcgggagggctgacgctgctcgatctctcgggcaatgtgttcacaggcgagttgccgccagcggtcgggcagctcactgcgctgcttgagctgcgcctcggcggcaatgctttcaccggcgccgtacctgcggagattggcagatgcagcgcactccaggtgcttgatctcgaggacaaccacttcaccggcgaggtgccatcagctctaggtggtctcccgaggctcagggaggtctatcttggtggaaacactttctccggccagattccggcgaccttggggaatctgtcgtggctagaggcattgtccatacccaggaacagactcactg

SEQ ID NO: 3721 - DNA, 919 bp, Zea mays
  misc_feature (908)..(914): n is a, c, g, or t
ttttgatatataaaaagtagtagcttctattgacttagaaaacaccttaggaagtagtaggaattaccttatttatggttttctaagacggcgtttcagaattgaggttgtggactgattgcaacatttgcttcgacctgtggggcagatttttttcaatgagggaatgcagtaactggaaatacttatcatagtaataaactataaaaaaggatgtagtattggggaaaaagattcagggaaaccttttttgcaggtgaatataatgtattggacagaatgtcgagatcgctagatcctaaattttctgtaacttgcgatttttttaatcagcaaaagtaagcgagaaaatgaatagagagctatgttatagactaaaggaaaggagaagagcaggatgcaaactagagaagagcacgatgcaaactttgccgccagtcacaaagcgctgccttatccccttccttttttctttttaacttaccacatcggacatcagataactctcgtagcttctggaacctcccacaaatgacagtacattatcgggagaaggggaaaaaaggtgcagaagccagcatctagatgatatccgacggctgacaccaattagaacgtaccatgcttgttaagctgtttatttagcagtagaattctatatttgagatgagatttgaatgaaaaaactttttctttcaagcggaaatcagttggtaccttgggagggggaaggactggtgcttcttgctatccagctaccggacagaatgctcaggtcggtccttccccattcgctccttgggcagcggtggattgaaggtgcatcattcagatatgcagggacaacgggtatggggtagcgacatggtggtggagagggccaaatcttcgatgaatgcaaccggcannnnnnncatca

SEQ ID NO: 3722 - DNA, 355 bp, Zea mays
ggaggccggcggcggcgagagcggggttgacctggacaagttcttcgaggacgtggagggctggaggcggtgaaggaggacatgcgcgggctggagggcatgtacaagggcctccagtccaccaacgaggagaccaagacggcgcacgacgcccgcaccgtcaagtccctccgctcccgcatggacaaagacgtggagcaggtgctacgccgcgccaaggccatcaagggcaagctcgaggatctcgaccgctccaacgctacctcacgccaggtgcccgggtgcgggccggggtcctccaccgaccgcacccgcacctccgtcgtcgctggcctcggcaagaagctcaaggacc

SEQ ID NO: 3723 - DNA, 472 bp, Zea mays
cttttttttgactgtgtatatctttttcatgtggagtccattaaaaatccatgcataagcagccgcgagaggtctcagacagataagatggtcgacggcatggacttcgaggagctctgcagcgacttcgaatgcataagcagcccctacgtggagtccataatgaggcaggtcgcgcgggacatctttgagcttcgcgaggataaccgcgcattcagctgctacgccgtccccgtgaagtatgaggtgttcctctgctatgtgaaatcttttacattttgtacattaattggctctttcaggcttttggtttgagtcctcttagatcgatatttcactttggattttgcacttgaaaacttgcaggcggttacactatgttgccacggttatcagtttctatgcgtttttatcatttatgttatatgacattttcatgacacgtatgtagagcatttgatagggcgttttt

SEQ ID NO: 3724 - DNA, 507 bp, Zea mays
gtcatgtaagggcagacaggatgaaattaatcatgcataagacatatgcattgcaccgtcagttatcatcaacatgatctgtatatatatacccccgtgtgcacgcaggtacggttcatttgaagatggtgacgcaaagctagacgagatggaaatggcggatggtttcgagatagctatcaagaaactgacggaatggcttgcagagaacattgacaagaacaagactaggatatttttcgcaggatcatcaccaacacattcctggtaatatatataagatcgagatgtggtgttgttgttgttgttgctgcttaattaattaattaatttcagggctagcaactggggcggacaagacaagaacaagtgcctgaacgaaacggagccgatcagctacagacccggcggcgggtacaaggctgcaaccacggactacagcctgatggccatggccaggtcctacttccggcggacgctggagccgagaggcatacgcgtccagat

SEQ ID NO: 3725 - DNA, 309 bp, Zea mays
  misc_feature (23)..(24): n is a, c, g, or t
  misc_feature (27)..(32): n is a, c, g, or t
  misc_feature (48)..(49): n is a, c, g, or t
cgccattacggcagcaggtgganncannnnnntaatggcaacatactnncatgtagccttgtctgggccagcccggacctggctcatgaacctcaccccaggatcgatctactcctgggaagagctctgtgcgcggttcacagcgaacttcgccagcgcttatcaacagcatggcgtggaggctcatctccatgcagtgaggcaggaacccggggaaactctccgggctttcatctcccgcttcaccaaggtacgagggaccatacctcgcatctccgatgcttccatcatcactgctttccgccaggg

SEQ ID NO: 3726 - DNA, 259 bp, Zea mays
  misc_feature (249)..(253): n is a, c, g, or t
gccgccctcggcggcccgcacgatgacgttggccacccgctcgcaggcctggcagatgtgcatccgcgagaagtcgctgagggtgaagagccgctcgtggaggttggcggcggcgccgtgcgccagcatgcagtcgcgctccatctccccgaacttgacgccgccgaaccgcttcttgtcctccaccggctgccgcgtgagcgggtgcaccggccccgtgttccggaacttcaccttgtcctccgcatnnnnngaccag

SEQ ID NO: 3727 - DNA, 361 bp, Zea mays
tcgatctggtcgtcgtagcgctcatcgcccccgtcgtcgccggcctcctcctcctcctcctccgctccctcgcctgctccagccgatctatgcgcaaggggctcaacggatggaacaaatcctcgtcgatgctcaggtccgtgccccccgctctctttttcctccgtgttttcgccgatctgggaggtttttgaccgggttttgtggccctgttcgtccagatctggggagttcgtggctgctccttccatgggttttgacaaaaaaaaatctgctcttgtggttgcagggacgggttcggggtcaagtattccggattcctccacatacggccgtgcggtttctgtagaggagactgacg

SEQ ID NO: 3728 - DNA, 360 bp, Zea mays
ccttcacaaatacaagctagcaaggcatctggataacttacaagataagtttatgcgtgccacctatcatttgatactgcctgatcaagtctttggatcaagtatgtttagaaaaaggaatatgcacaggaaatcaagcaagaggatgcggacagtaacgatcgcgtaaaggagggcccgcttactaatacggagagggttccgcatgaaaaagacaatcctaaacttcttcgtttcgttggtttttccaaggtcttttaaattatcttttttttgaacatgaacggaagtagcgtaggacacccaatcctcggtcaaacctctacttcaatgaaccacgtcgcgttctttatctttctc

SEQ ID NO: 3729 - DNA, 435 bp, Zea mays
catgctgttcgagaattgtttcatcaagaaactgggaaggcgacaagtttctttcgaaacatcggtcagccaaggacgccacttgtgtcttcacctgttgcggataagataattcgagcccagcttcttgagaaacaggttgctgggtttggcgggctgaggaattggcttttcggttgtggtcttggatggtttgtcaacatactggacagtgaaaagctggggacgtatcagcttgcctctcttactatggaacagctgaaagatatgggtcttgttgctgtaggtccacggaggaaactgatccacgctatcgacagtttatgcggcccgcaccatgctgagatgctttcttgatcccttgcattttagttagctagaagaaaaattattacaggaaggatgtctgaagtggtctctggttgtagccaactc

SEQ ID NO: 3730 - DNA, 610 bp, Zea mays
gggtggaatcatgtgcgcaaaagcatcgatgctgctgcaggtttgtacatgcgctccattctgtgtcatgtttgttcgcttgttagttcattttagttgcttgttagctgttacaatactaaacaaacaatcttcatggtagttttccttgcataaagttgtttctgtggtacaattaaccttaccccgatgtacttcttttgatattgcagaatgtgccacctgctctacttgtgcgatttttgagggagcatcggtctgaatgggctgatcctggcatcgatgcttattctgtcgcctctttgagggccaacccatacactgttccaggtttaagggctggtgggtttatgggcaaccaggttatactgccccttgcacgcaccttggagcatgaagaggtaataatctattgatcatggttccttccacctgtcttcttgttaatgtccaaccaatataagctccatctaacttaatgttttaatttcagtccttggaggttattaggcttgaaggacatggctttagccatgaggaggtgcttatgtcccgggatatgtttcttctacaggtatggaggccttccaatctgtttcttgcttcttgg

SEQ ID NO: 3731 - DNA, 556 bp, Zea mays
tctcgagctctcagtcgctctcttcagatctcctccaacggttcgtcgacagagcctacagcttctccgaggagccttctctgaacgaggtaaaagaaaagaaaaaaaagaaaaaaaaaaaaactgaatgcacgcaaagacgcatgatcgatcggtgccaaagctgctgctttttcgcatctgatatgcaaatgtctacgagcaaattaaactaaactttcccagctcgtgacgctacgtactactacaggggaatttccggcctgtcgacgaaaccgacgaggcagtttcactttcactcagcagtctcgacggagaggaggtcgtcccggcagattttcctgagggtgtctacatcagaaacggttaaccactcagcccatgtaaagtcttcacgaagctactaccatcgtatccatggcatgcctaattggtgattgtgtattgaacacctgcaacaggtccgaaccctctcaacccaacacagacggtcgcgggctccgtgttcggctcgacgtcgtacacgtactacgaaggccacgggatgctacacgcc

SEQ ID NO: 3732 - DNA, 510 bp, Zea mays
tttgaagctggtctctgctatgaaaggaggccgtgaaaagaacggagtggcatcatcaccaactgaaaaccgccatgtcaagtgggctcctgatgtgtacgacccccctgtgacatcggtatgccattcagtgaccaacagctatcagcgccggtcaaagcaccgcaagaaggagaagaacaaacagaagaagaggcagaaggggaagtcgaagaagaaccaacaacagagttctgcccagaatccatctgcgccgcaggttcctggtctcgggtatgttttgctagcgtattttttactgctattttgtctctgtgagcatgtgacgcattccgttgattttacacactgtgaacttgttaggccgaaaggcgttagcaccactggtggccagtctccagtagacgatctcagcgaacatgaggccgggatcatggactacagcatgggtagccaggaagccaactgtggaagcagcttcttgcgcgagtctgttgctaagatgcactt

SEQ ID NO: 3733 - DNA, 783 bp, Zea mays
  misc_feature (163)..(166): n is a, c, g, or t
  misc_feature (173)..(177): n is a, c, g, or t
  misc_feature (618)..(619): n is a, c, g, or t
  misc_feature (622)..(627): n is a, c, g, or t
  misc_feature (630)..(631): n is a, c, g, or t
  misc_feature (635)..(635): n is a, c, g, or t
  misc_feature (667)..(669): n is a, c, g, or t
  misc_feature (700)..(704): n is a, c, g, or t
  misc_feature (710)..(710): n is a, c, g, or t
  misc_feature (712)..(714): n is a, c, g, or t
  misc_feature (749)..(753): n is a, c, g, or t
  misc_feature (755)..(761): n is a, c, g, or t
  misc_feature (767)..(768): n is a, c, g, or t
  misc_feature (777)..(777): n is a, c, g, or t
gtccatgatctccaccctctgcgactgcgagtgcgtctccttcatggggccaaagaactgggccatgaaaaccgggaccctcgatgcaagtatgccctttgcgctgcgaaggactcaccgcacaccaccagcacgacatcggatccggttcccttgcccaagnnnncaccgannnnncctgaacctgatacagcaaagactaacgccgtcttgccccgaattcggcgattgacgggcgtgcattccttgcaccatgatctcggtgagctcttgggcaagggaaccggatccgatgtcgtgctggtggtttgcggtgagtccttcgcagcgcacaaggccatacttgcatcgaggtccccggttttcatggcccagttctttggccccatgaaggagacgcactcgcagtcgcagagggtggagatcatggacatggaggcggccgtattcggggccatgcttcgcttcatgtacaccgacgtggtgcccgagcttgagcggcaggagaacggcgacgtcatcgcgcagcatctgcttgcagctgcggacagatatggactcgacaagctcaagagctcgggcaccacgtcggtgtacatgaagcgaagcatggccccnnaannnnnnctnntgtnctgatctccaccctctgcgactgcgagtgcgnnncttcatggggccaaagaactgggccatgaannnnnggggantnnntgcaagtatggccttgtgcgctgcgaaggactcannnnnannnnnnnacgacnncgatccgtnccttgc

SEQ ID NO: 3734 - DNA, 383 bp, Zea mays
atttatctagttttaactcagtcgcctcacgggcttattcaaagtatatgtagttggtgtccagtaagagtaacacaaaaattctagaaagtgtgaaaacagacaaaccgtgaatccctggaacttctgttttctataatcagcttcttccttttggcccatgctggcccaaacatctgtatacacaacatctgctcccttaactgcttccctgggatcgtttgttatttcaatcttactgattccagcactcctggcgatctccactgtctttgcatcgggctcaaatcccttgggacaagcacatacaaagtgaaaaggaagtacagcagccaatagaagccacgagtgcacaatgttgttcccatctccaacatagacaa

SEQ ID NO: 3735 - DNA, 379 bp, Zea mays
  misc_feature (17)..(18): n is a, c, g, or t
tgtctctattatctttnnttcatcagtcggtgcaatatacattaatggatcgttttttctccaggccacaaatcggcaatcaagaaacgctacttccaccacacggaggagctgctacgcggccaccctgcattcatcgaccggtccatgccatcgttacatgagcggcaggacatcatggctagtgccgttcccgagctcgctgccgcggccgcagttgacgctatcgccgagtgggggcgtccagccacggagatcacgcacctcgtggtgaccacctactccggcgcccacatgccgggcgtggactggctcgtggcctcactgctcggcctgcgccccaccgtgcgccgcaccatgctctacatgaacggctgct

SEQ ID NO: 3736 - DNA, 645 bp, Zea mays
gagcttctccatcccacacaaactgcatgtgttctgatcaggcaatccatcaattgatgggaattcttgagatgtcaccttgctctgaaaaaatcaaggtaaattatgttcaaatactaaatgatgcaattgatccaatctgagtgaaataaaatttatattcttaaccatggataaatcatgcgcaggattctcgtttgatcttttagcatcaatgtactatgtcgccaagcaattagacagttatataatagccatgagcccatgagtatgattagacagtgatatcatagccatgacccatgaatgtgattattgttcaactatccaactgtttggtggcataatatgttgattctacagaatcaaataaagtcgcagaaaacatagggagattgaaagggttatccactcacctgacaagtatgccggtttattagactactcatgtgatctctaagctcctcagcagttaatccataaagtatagaagcccctctctttcgtcttgaacttaaattgaccccttttggtgtatgatccaatgcaacagtcttagcatctttcatctcaatgtcaccttttacacgggacaattcctcttccttaacaatatccatgttgggtacatcttcactaccctga

SEQ ID NO: 3737 - DNA, 505 bp, Zea mays
cgccgccgcgcagcagcgccgtcatcgacgccgacaacgatgccaaggccgcccctgccatcgtctcgccgcccttcgagagcatcccagagctccccgagagcgccatgaaggggaactactccttcgccttcccaaagtactacgcataccgccacctcgttccatgcgacacgttcttgttgttttagaaagctgaatcttctcgaccggaccaactgatgaacaaaatctgatggcgcagtttgatagaggacaagaggaactactccaagaagcagtctcatcgagaccaccagccggaagcagcagcagcaacgacggaggcggtcaaggccgcgccagcaccgccagtagttgaagcgaaggcggagccgcagccggagacaagaagcaaaccggaggcaggaaagggcggcttgttctcctgcttcccctgctgctgataagcaagcaaaatgcagcggccagcatgatgtctctgtaaatagccacttgggcgtta

SEQ ID NO: 3738 - DNA, 505 bp, Zea mays
  misc_feature (358)..(358): n is a, c, g, or t
  misc_feature (365)..(365): n is a, c, g, or t
cgccgccgcgcagcagcgccgtcatcgacgccgacaacgatgccaaggccgcccctgccatcgtctcgccgcccttcgagagcatcccagagctccccgagagcgccatgaaggggaactactccttcgccttcccaaagtactacgcataccgccacctcgttccatgcgacacgttcttgttgttttagaaagctgaatcttctcgaccggaccaactgatgaacaaaatctgatggcgcagtttgatagaggacaagaggaactactccaagaagcagtctcatcgagaccaccagccggaagcagcagcagcaacgacggaggcggtcaaggccgcgccagcaccgccagtagntgaagcnaaggcggagccgcagccggagacaagaagcaaaccggaggcaggaaagggcggcttgttctcctgcttcccctgctgctgataagcaagcaaaatgcagcggccagcatgatgtctctgtaaatagccacttgggcgtta

SEQ ID NO: 3739 - DNA, 364 bp, Zea mays
tattagtatggtgatgtgcagttgttttactaatccctcatactgaaaattctattcgcatggtgacgtatagttgttttactaatctctcgtacagtcatactctttaatttttatgtctttttcttcaccttgtcttgcgaattacatctgaattgtccccatgcaattttgacattgtattgacttcatcatagataagtatatgtgttctatggctgttcctactgatgtcttaggagacatgatcagaaggatgagtgtgctttttacattggcatcttgactgctcctgcttgtgtcatgagttttaattgatttagtttgagaagttttaccagagataagttagttggcttgattg

SEQ ID NO: 3740 - DNA, 767 bp, Zea mays
gatgacctttcctggcaagatttccttggaagggttaattataccgagtgagttattttcttgtcatgatactttgaaatttggggagaagcccaggttctatgacagtctttcctgtgtcatctgaacacttggcgatttctagagtgaattgtactgagctgtctctagaacacaagtcaaattaccgagcagttctagattattttcacaatgtgcaataagctaactagttttttggttaagtaatacgaaaataaattagttaactcatgaaatccacctagtttccttggaataacttgatgctattggacattcactgactgaaccagaaaaaaactgcagggctgaaaattacactgctgttaaccaacctgccgatgcattcaccaatattctattttcatcagggaccacaggtaagatgatgtttgataattttgtcagttctgacatgtctcgcccatatgcaattattaggtatacagctgcatactgcaaactggccaatggcagatccaatttatgataacaagttgatcaattagtgcatttaaaaatatttttgtacagaaaattctgacagttctccatattcaggggagcccaaagcaattccatggacacatataacacccctaaaggcagctgccgatggatggtgtcacatggatattcgtaaaggagatgttgttgcttggccaacaaatcttggttggatgatgggcccttggcttgtttatgcctccttgctgaatggagct

SEQ ID NO: 3741 - DNA, 365 bp, Zea mays
tctggtatttcctcgcggaggaggagctcggcggggaggcgtcgtcttcggctgcgatcgaggaggaggaagcggtggccgtggcggcggcgcggccgtccgccgtggtcatggtgcaggtgggcaagctggtggacaattacctcgccgaggtcgcgtcagacgccaacctcaagcccgccaagttctgcgagctcgcgctttcgttgcccgaccatgcccgtatctacgacgatggcgtctaccgcgccgtcgacatctacctcaaggtacgtgccagatcaccacggaacatgtcgtccaggctaaaaggacaaggaaaatatgtctcctttcgagctgtcacgctcacgcccaaagacctc

SEQ ID NO: 3742 - DNA, 426 bp, Zea mays
gacgggacggactagttttatctgtagatgctctggcacgcaccgatcagcagctggtagctatggctatatttatacatatatattgtttattactaaggtaataaggtaaaggagagtggtcgtcgtcgtcgagttgttcctagctatagcctatagctacttatatagctagtcaatcgagtgttagttgtgagtgagtgtgtgtgaactcccatgcatgcatgcatgcatgcatatggctttgttgactgcctagtcaaacttagctgctgctgctagtactagtagtactgagtactgccctaatatgtataataatatagttcttcgctagctatagggcctaatgatcatcagaggatcgacgacttcgagacgactatattattgaactccatccatctgtaatggccgtgatttgtt

SEQ ID NO: 3743 - DNA, 506 bp, Zea mays
gtctactccacccctcacccgctcgccggtgagaaggtccccctgaccgtcttcgaccgcgccgccttcgacatcttcgtgcccaccgtgctcgcctaccccgcgccggcaccgtccaacgaggcgctcaaagatggactccgcagggccgtggctctgtaccctcacctcgcgggccgactcgccgtcgacgaccggggccgccggttccttcacgtaaacgacgagggcgtgcttgtggtcgaagcagcaatctcggctgacctgtccggcgtgctcgccggcggtatgaccgacgcaaacgtcgtcgtcgacgagctgtacccgagtctcccagaggtaacgagctgtcagctatctgcctatctgtggacgtgcgctgtgggcctgtggcatatgtgttatgttcctgctgacgtcgttggtgcactgtctggcttgcatgcatgttacaacacacgcgtacaggacaacgttggcgcggcactcctgcagatcaagctcaa

SEQ ID NO: 3744 - DNA, 245 bp, Zea mays
tctttactcctactagtcctagtagtactaattattattattattattattattattatcttattattattattattattattattattattattattattattattattattattattattattattattattattattcttcttcttcggtaaaagatggtaaaataagaaagggagcagaaaagaacacctcatcaacaaaaggagaaaaaaaaatactactactgtacacatcagccgcat

SEQ ID NO: 3745 - DNA, 375 bp, Zea mays
ataactctctggagctgtggaaagcagaaagtgatggtagcataccttgcccaccaaaggagctaggaggctgtggcggttcgattttggatctcaagtgtttttttccagaaaagatgctttcaaatttagaagaacgagctgacagaattatgaggagcgaagtatttgcaaaagcagtagccaaaagaagtgaccagtgcccttgttatgaccattcaggaaacataagaactcaggacgtgcgagagactgcaaatacgaaaggctcaagtgataaccatctctactgcccagttgccactgctatcaaggaggatgacttggcgcactttcagatgcactggacaaaaggcgaaccagttattgtttctg

SEQ ID NO: 3746 - DNA, 564 bp, Zea mays
cgccctacgccaggtgccgaggcctccgccgatctcttcgccggcgaagagcggccaccaggtattgcccacacccttctcatctcttccctgtctgctgtgcgaaaccgagtttccaaactcttaacctcaagctatttggctattttacgccgaccaacttctaacatttcgcaaacaaaataaaattatccgcctctgattggaagcacttaaaggttgcaattaatgttgcgaattcagaattctggtggttcctgtagcttgtggatggaggaggaggcgctgggtcgtggtggtggtgaaaagctttgatttcgtagccgtggtggacgccgctgctaatgcccttgccgtgcctcgttggtggcgtgcaagatgtatgccgtggggaaggtgggcagcctcatctcccgcagcgtgtacaccgtctccggcccgttccacccgttcggcggcgcggtcgacatagtcgttgtgcagcagcaggacggcagcttcaagagctcgccgtggtacgtgcggttcggcaagttccagggggttctcaagtcgagggagaaa

SEQ ID NO: 3747 - DNA, 545 bp, Zea mays
ttctatgaggaaggtgttcgtgttttgcgtgaggtctgatcacatccctttccttatccttaatcaacaagtggcatactaaatcaattatctcataaataaaagacaaactatggctatcataaatccaaaaaaagttaactatttgctgatccaccattgtttcttaagcagtttctattggctttgcatcatccagtgataataaatgtgcttatatttagatgattggaacttcgacaaggttgcctccaacccaacgcctggttgagataaaagcagttgccgagcaatttcactttaagatatcaaccttgctacttcatgccgggaaagtggtagaagcaatcacatggttccgtaagcatatcaaaagctatgaacgggttgttggaacaccagaagttgcttttcttcactgggaatggtttagcaggcagttccttgtctttggtgagctgatagaaacaacatccacaactattccagatacactatctcctcgatttggcactgcagacaacacattgactgagtgggaattt

SEQ ID NO: 3748 - DNA, 587 bp, Zea mays
  misc_feature (572)..(577): n is a, c, g, or t
gtgacgtgggtagtggcgcaccaggtaaacaaacgtaaaatttcatcactacagtaaacggaacaacgtccgacgaccaaaaccgtcggacataaggtcaaaaggctgtccacggcgacgaacgtgtgtgtgacgcggcgccacttacgtccagacacggcgggtgacgcggcgccaggtcaggctgctgcggaacgccgtccacgacgtaagcacccttcagtcatccacctcggtcgccggtcggccgtgccgtgcggtgcggtgccgccaccgccgttgcgttgcgtcatggagttgcagctagtagtagacttgcaaggcctgacgaaacatgtgtggctttcgctgcgcagggcaccaggagcaacaggaggccactccaggaagccaacggcagggccatcaccttctactacacctcgccggcgcacggccgaggggcgaacggggactagcacgcattgcaaggagacggccggcggaatcttggcgtccccgtgctccttttctgtccaggcgacacaggccatggccaagcaaactcttgcatgtgatcgatgtccgacagnnnnnntcagagtgca

SEQ ID NO: 3749 - DNA, 374 bp, Zea mays
tcgacgcgttcccgccggggagctttcgggagaaccccaagctctgcggcaaggtgatcgccgtcccgtgtactaagcccaatgccggaggcgagtcggcttcgtccaaactagtcagcaaaaggactctcgtgaccatcgtccttgcagtttgctctggagtggtcgccatcgtcgtcttggcaggatgcatggtgatcgccgtcaggagggtgaaaccgaaggggtcagtcgacgacgccggcaagtttgcggaggcatccatgttcgactcgacgacagacttatacggcgacgactccaaggacacgatcctgttcatgtcggaggccggcggcgacgcggcgaggcatgtcacgttctcggacatcctc

SEQ ID NO: 3750 - DNA, 405 bp, Zea mays
gctatggttgaaaataataaaaaatctgaaaagggattacggtggttgcagtcgcagtcgcagtcgcagtcgcagtcgcagctggagcagaagcgggaggagtagcgccgttgaacacatgcgaaacgccgatcgcctgggctccctgcttcggcaagacctgggtctgcgttcccctctgccttggactgcactacaccggcggtttctgccagcaggagcagatgagcgagggagacgccggcgccgagcctgctataatcggaggcgccatctgcgtgtgcaccaagcagtgtcttttggatgtggaggcggtgcaaggtgcaccggcaccgtcgcagccgcccgtcgccgagcctccgcgggggatgcgtggggttgggatgctcaactgatgatggtcta

SEQ ID NO: 3751 - DNA, 903 bp, Zea mays
gtactccactacactactctaatataacccctggcggtgtagcagtgatcacagcattctaacgtatgaacgatgacgccgcagcgtgagggtgagcaacgagctcggcgccgggcaccccaaggctgcatccttctccgtcaaggtcgtcacgattgtgtcgttcacggtggcgtcgactatagccgtcgtcctcatgtgcctccgcgactacctcagctacgtcttcaccaaaggggacgacgtcgcgcgcgccgtgtccgccatgaccccgctgctcgccgtcaccattgtgttcaacggaatccagcccgtcctgtctggtacacactcctactactcatcaaattaactgtctcgatcgagcaacgtgctagctacttcctctatagtattcctattttaccttctccctctatatatctcattcttatgtagcagtatcctctaaatttcgttctttattcaccgccgggtcaacaccggcgcccactcggctcgtcggcaaacgtgcaatataattgtagtgatactgtaaagatttaaattgaatattttttatagcgaccactcatcaacgtctcgctttgttcgatgtcaatcatgtggtggcgtcgtgttctttagcagctacacgatctttcagtatatagtactcctactagcccggatcggagtcccggaccggtcatcaacagcaagctagctagctggtgcagtggagtggagtgggtgaaaaaacatgcatgcatgcatgcatgagatcgtgcaccgacgacgacatgtattttgagagagacgtgtccacgcctcgcaacgtgcttgcttttgcaggtgtcgcggttggatgcgggtggcaatcgttcgtggcgtacgtgaacgtcgcgtgctactacggcgtcg

SEQ ID NO: 3752 - DNA, 320 bp, Zea mays
ggatgaaaatggaggcgtcatcattgagatgaagactccaatggatcctggagtgttttcagcttacttgaaagcagcgctggcaaaatggagggagcaggtgacccccccccccttctctcagcatcaatgttaccatttatcctatcatgccaagtaaatatcccaatatttaagttttgaactgtggacgacatacctcaaagatccatcaatccatgcaagcatctttatatggtaggtttggtaggtgaaaaaaatggtgctgtgcatgacaactattttaaaggtttaagtacactgtatatcttctatgagcc

SEQ ID NO: 3753 - DNA, 717 bp, Zea mays
  misc_feature (691)..(698): n is a, c, g, or t
  misc_feature (704)..(710): n is a, c, g, or t
cacgcctccttcaccatcacgcacccgctcacaaattttctgaggatttcctcaggcgtcatcttggtgtacctagggttttcacgaataaggttcacaagatgagggtcaattactgtaaatgacctgagcatgagtcggacaacgtcatgatccgtccatcttgtgattccatagcttcagattttgttgaccagggttttgagcctgttgtaggtctgtgttggctcctctccccttatcatcgcgaacctccccagctcgccttccaccagttccatcttggtgattagggatgaaagtgataatccaaactgttaggacaaatttaacattttacaatagatatgtataaaatttgatgatgatatttctttatattatcaagcacatttgtacaaatatgaataaaatattacataaattgttttatgtattatttggtccctacaacacaaatagttgaaaaaattaccgaatttgtttttgaatcaataccgaagtttatatctattatttgagaaaatatatgatgaatttgaggttatcttttatgaatctttacaagctagatgttaaaaacaagaatacaaaattgtattatagattctataacctatttattcacaatcaaaggaaaatgacttaaaaactgattaccgaataaatatcgtttccgacctttttcatnnnnnnnnggtgannnnnnntggcgtc

SEQ ID NO: 3754 - DNA, 579 bp, Zea mays
ttccacagtttccaccacaatttcattttcaaattaccgtgcgcattctggaataataataataaaaaactcccggtgttgaccttgatgcccagcgcatgtgtcggaattggaactagtatttctgatggacatggtgtacgcagtttcttttcgtcatctgggattaaccttgcggcacagtgtctgacatgtttcagatacagatgtgtaatactgattcatgttggtacacacaggcgcccacatagatgatagatacaggcggggccccttagctattgctgtttttcctgttccaggataggcaattggggtcaccttgcggcctgcgggttcatcaaacacgagacttgagttacatagcttaaaaacgaccgcaaaaaatacaccaagcttttttaaagaaaaaaaataaggatgagcaggaggttccgtcctttcgcacgtgaatgcacacagcccatgggtttggttcttatgaaagataacaagcagagatgcagatgacgtgagcttattgtttaccttgggtacttcacatggatcagagcaaagagaatcgatatgatgatgctc

SEQ ID NO: 3755 - DNA, 466 bp, Zea mays
tccggatgactaaaatatagtatgtttttatgctatgatttttttactgttactttatgaacatataaagctgagatttatcttatatagtaaaaaataagtaacgaagtggatataatatcttttagtgctactttggaaactctatttttttaaggaatttatattttttaagaaaaaatgaactaattttatttgagaaaatataaataatataaatctttgaaaaaatgggttttcaaactggccctccttaaagagaagataaaaatcggagacctcatatcactagtgaccatagaaaaaatgagaatttcgtgggtctgtctgaatatgaaattcaattccacctagggaagggagacacttccagttccagtgcgggattttaccgaacgctaacaatgagcgcctggcgtgcgttaatttggcagtgtcggcgcagcagaaattcgggatcaactac

SEQ ID NO: 3756 - DNA, 700 bp, Zea mays
  misc_feature (459)..(459): n is a, c, g, or t
  misc_feature (461)..(465): n is a, c, g, or t
  misc_feature (655)..(657): n is a, c, g, or t
atttcaccatccttcttttgggctgccgcttgcagctcatctacattctgtagaagcttttgtgccgcttcggtagcctgctttacctctatgtgcttgctcttaatagttccagtgtaatctttttccatatttttgagctggttccaaacaaaattcttttctgcttgtaatgctgaaatttccttgtccttttctgatctcattgtcttgtaagctttctttaatttctgtaactcttccttagtatatttcccacttttctcgtgatctgaattgtcggtgctaatctgcacctgactttcaaccatcttcagtttttcctggcattatgagagaaggtaaaaactcaataagatggacaatttgaaatccacaatggtccaggcaaactaaactcatgtatttgtaattacctttagctcagtattttcagcagccaaattcaaaatacaactngnnnnntgagtttagtttgcctggaccattgtggatttcaaattgtccatcttattgagtttttaccttctctcataatgccaggaaaaactgaagaaggttgaaagtcaggtgcagaattagcaccgaccattcagatcacgagaaaagtgggaaatatactaaggaagagttacagaaattaaagaaagcttannngacaatgagatcagaaaaggacaaggaaatttcagcattacaa

SEQ ID NO: 3757 - DNA, 432 bp, Zea mays
tagcagcgccatcgccagtggggcaaatcgtcgaacagacgccgcgcggccagtgggctgctgcgctattggcctattgcctttgtttggcgtcagtttaccccaccacatcaagaggcccaaccgtcgagagaggaagcaggagtaccgagtactccgagatctggcctgtgtccacagccttctcttccctgacctcgacatcttgccgatctgcactgactccgcggcccgcgttcatggcggtgacctttccctctcccaccccgcggtccccgcgccggccggatgccattgtggctcctgacccctcgtctgctgacatgtcgccctccctcgacttcggcgacccgacctccttcaccgcgctgcgcgtcctcaccgacgggggtgccgccacccgccttctccacgagtgcgtggcctaccagc

SEQ ID NO: 3758 - DNA, 407 bp, Zea mays
cttcccgcccttgcagcccatacatggtccgacgtcgtcgcttccctgccggcttcctcggcgctggttacggccatcgccaccatccaggcggctgtttctgcttctcgcgaccacaagcgcgtcgcgacactcgtcctggagtcagagcatgccatgagcgccgctgctctgaccgcccggatggccaccacgcagcacctcatcctcgggcatcctccagtcgttcatgaggctcatccgcccactgctaagggccccctcacctctgaactcgacgctgaccacgtcgctactcttcacgctcaggccaccaggttgcacaatatccgatccctcatgtccatcatattggacccaacatcctcccacaacccttgttggtggagtcagatcctcctcactct

SEQ ID NO: 3759 - DNA, 306 bp, Zea mays
gagcattatgaagttgatccctaatttattggaacattcatcttctatgaagggaccggtaaattgaaaaactaatgtcactactcagtactcattatggctatcaacatgtctctttcctgttttgatggcaacttacgtttctgtttaggaagctaaggacaatcttttggggcgcctgtttggatttggagcaattgagaggtctggtcgtgtgccacgacagtggtcacgtgacaaaagctcacccattgttaaggaatttgtgagtgtggttgtagaactcggtggcaagaaacgatattt

SEQ ID NO: 3760 - DNA, 371 bp, Zea mays
accttccttagcatccttgctaaaatctgatgatattatcaataaatactttgctgctcaggcactggctagccttgtttccactgggagcagaggtatacagcttgctattgcgaattctggtgcagttttgggtgctgtagcattgatcggacaggtagaatctgatatgccaaaccttgttacaatggctgaagaattcaagttgtcagacaatccatgtcaaataatgttgagaagcctttttgagcttgaagatgtctgcactggtgcttccgcccggaggtccatacccttgctagtggatctacttaaaccaatgccagataggccaggtgcacctctgattgctttgcaccttctgactcaac

SEQ ID NO: 3761 - DNA, 765 bp, Zea mays
  misc_feature (720)..(722): n is a, c, g, or t
cattgacattggatatgaacgctttcttgggccagaggtttattgctatttctgtcatcccaactacaaatagttttagtttttttgttcccaaactattcatccaaaatggtataatattatggccagtaatcatcttttgagttaccttgaagttatgttcccaaatcccaagcatgatcagcttgaagaatgattttaaattctttaagatttacagtaaaaggacatttaattcccagaaaagtggggagttccaacggaaagaaattagtaagtttgatggttcacacagtgaaattatgttgaattgctaaattgttatcaccagagttcacatcaatgattggatttatagatgtagagttgtgaatgactgtcttgcatacttataaaagcatcctttggcatatagatttgctactatttatgaactgagatcatggtttcctcggttcatccacaaaattgaatagttgagatcatggtttcctcggttcatccacaaaattgaatagttgtcaattgctattattctctggaactgtcttaacctttggcactatttttgttcattacctccttgtagatactgtataaacattggtctctacctccaatgggatactacggtgtgcatcattctacactgttaagtgatatcaataagattttgtagtagttcagaattgttaccttacatcagatgtatgaaattgnnnctaataaatggctattatcaaatatatcttgaaaaggttatta

SEQ ID NO: 3762 - DNA, 533 bp, Zea mays
gcttccctgattactaccgattgtttggcccgatcaaggagaagtaagttcctgttttcaagttgcctgtacctcatcttgtcactcttgaaagttttcagcagcaagccattcatcagttagttacagctcttgaaagccttacctctgaacatgtgtgctttctctgatggtgataggtacattcaagtcgggaacgcagtggctgtccctgttgcccgggcactgggctactgtctggggcaagcctacctgggtgaatctgaggggagtgaccctctgtaccagctgcctccaagtttcacctctgttggaggacgcactgcggggcaggcgagggcctctcctgttggcacccctgcaggggaggtagttgagcagtaaaaggatgacagatctgagctgaggtgaggtgagcagtgcaacatccagcggcaggagcatttctggttcggttcgattcgggctcacgagcgcatcgtgctgattcgcagggtgcactcgagctcgagtgcggagttgttgtaatgtag

SEQ ID NO: 3763 - DNA, 365 bp, Zea mays
cgacccggcgtgcttaattaattaactcgcagtgaaactaaaattaattaaagcaggcgattattattaaccggtgcaaaacggctagaaataaataagtaaagctagcgctggaacaggcatgcataatataatggcggagatacatacatatatatataattagcataagtgtcattaattcatgatcacgagattgatgatcttaccgtggcgcatcacttgctggatgatgctccaagattatctattttgagcgagaagagatgtatgttccatgtaattgtagtgctgttgatgggtgtaaatgcatgtgcaacttattaattggtaattttgcatgctgaggaaacaatctttctttg

SEQ ID NO: 3764 - DNA, 817 bp, Zea mays
gagtgatgaatactgggcttcgattgtggtgggcagcagtgggtttctgaaaactgcttccccaccggaaccctagcaaagccaagtatgaaggatcttgattatatagataagctgctgcagttgattgaaaaggaggagatacccgcacctggacctattgagcagcgttggactgctcgcagcaagagcccgatgagcccgggatcaagctctgaagaagatgatgtattttcatgggtaattaatttgttcttgtccaatagttcttatgttttctgtatgttaatctgtgctgctattgcctcttgtaatcacctgcctaaaagctcatttgcaactcattctggtttgtttgtattggtttatttgcttataatttggttcaaaaaaagcaatattttggtaattaaattcagttcgccatggtgtgaaaaaaggcaattcgattgtgtcctctactctcttctgatagtttctgctaaatatagtagcataacttgcttttttgctttctctactccgacaaatacgagggacatcgtttcttcagcgtagatgatagtaccaaattgttctactgtatgtaggtgttatctttctcatgtttctgagacaatcacatctattgtgacacagtcacactttacaactcttgactgctttggaaagcctgtcttgtcttgcaaaacctggttctattttacaccagtcatctatagtctctgtgaccaactcactgggatccatgtaggttggtattataatgtatctgccaacatctgatgctcgccaaaggaaggaaatcacagaggag

SEQ ID NO: 3765 - DNA, 411 bp, Zea mays
ttgatgggtgtgtaagggcaaccgagaattttgagcaagcacgagtttgcagccaacgaaaattttgatgtatgaaatagcgattgtagtttattatttttttattcggtgtacgtctcaagttttatctttaatgagtgacatatctggcagggaaactgaagcatattattatcttgctgaatgctatgtgaatcctgctgtacgtgttataaaaaaaatcatatctgagctactagctgcaagaacctgacttctaaatactgtggatcctgaatagtttcgacttgtggcttgtttggagatctagatcatgaaggcgcagtggcaactgattctgaagttcacgtttggtttggagtcttgggagacaaggtgagatcagacatgcctttagctgatcgatgtttg

SEQ ID NO: 3766 - DNA, 381 bp, Zea mays
cctgtcaaacaagctgacggcgtcctgtgcacggccagacttcccgtaagctgagaccattgcggtccaaagaacagcgtcgtttgacgatactgcttcgaagacgagctcggccgaatcgacacagccacacttggcgtacatgtccactaaggagttcctgacgacgacatctgcctcgaatccattgccagcaacctgtgcatgcgcctgcatcccctgcttcagcagcgccagctccccgcacgcatccacggctatagagagtgagaaaccatccacaccgacgccagaagaaaccatggaaacgaacagcctcagcgcgtcctcggcctgcccgctcccaagaagcgctgccatcatcgagttccaagcaactat

SEQ ID NO: 3767 - DNA, 472 bp, Zea mays
gtggcatcaggtagcaaactaatggactagcctgtttacacgaaacaaggtacaactagccaaaaataaacaacaatccagtaccacagccttgtcaccagcgcataactgcggagaaaacaaatgagtagttaacaatagctggaaaaaaaatgccacatgttcaatcatgctaaactgctctgttcaaaaccataccttcacttttcacagtgccaaaacccctctctatcagctcaacaatgtttcacttggtcttcctgaccagcaaaacttccggtaaagacgcaggatcaagctcccagtaaccacaaagatcgccagtttcgtctgtcaagcggtaggcaggaacctgatgagagaacatagtcaagtcactccttgctattctcctggatttacggttctgctctggcatgaacaccgtgctaaagccctccgctttagtaaggcacgacactgttatatcacc

SEQ ID NO: 3768 - DNA, 476 bp, Zea mays
gggcaaggttacaagcaggtaaaacacttcatttcccgtggttaagggagggttctatggttcagttgagacagtttgcggatcaagtgtgaagcaaagccatttgacatcagatacacgaccaggtttgtgggcgagcagatgtgtggggcgacggcgttgttcctgagatggcagcgcatctggagggagcgctgaacgtaagctttgacggtgtgtaccactctccggtaggttccgatgatgaacaaaggccctggtatggctctccggcgatcctcaagcagtgggtgcatcaccttctcagctgagatagtgacatacaagaggagctagctgccggaacagacagaaactgggatgtgtcctgcagctgacatgacaccattggccaccaaagggcaaaggggaacttttttctctgaaattgaggtgcatgatatagcatggcagatccctggttgtttgttgtcagt

SEQ ID NO: 3769 - DNA, 359 bp, Zea mays
gagcgggaggagttcttccgcctcaagaagatccaggggtacaagcagcgcgagctcgagcgccagaaggaggccgccagccgctacgccgaggagaaggccgccggcgaggtcgcgctcaagcgcggcgtttccgtcgccactgcggagagcatgctggagaacggcgacagggacgaggaggatatcatcttttgagcctgtggagtgtggagtcctatgagtagagcgtgcagtggctgtgctacacctgcgggctgcggcgccaaacagcaaccttctgtacacacagcccaataagctcgtagctgcagccggtgagccggagcccggaggctacgcgtatattccatctctgc

SEQ ID NO: 3770 - DNA, 553 bp, Zea mays
tcgtcctcctcgcgctcgtctactgcgtcaccggcatcggatacaccttcgcagtcttcttccagccaggttccgcgcagctggtgagtgagtgaggcacctgtcgtcttaatattgctcctgatgaatgaatgaatgaatgaacaacacatgtgtattccagtggtcggccttgcttccggtggttttgactctgatagccactcagcagaaggacactatccttgccgacctgtgctacaccaagtgggctctggaagccttcgtcattgccaacgctcagaagtattcatggctcagcgcctcagctcctcagctcatcaagcttgtccctgtttgttgcagcaacctgacaaaacacaacatttctctgccctccctctccctttggttgcagctattccggcgtgtggctcataacccggtgtggctcgctggtcaggagcggctacgatatcgagcacgaggctctctgtatagcggtcctcatcgccaacggggtactcttccgctgtgtagccttcttctgcatggtcaccttccagaagaactg

SEQ ID NO: 3771 - DNA, 353 bp, Zea mays
cctcagccttcacgacgagggcatgattagcgggactgatcatgattggagcgtggattgccaaggattggagactctctacatgccgtaactatacacacgaccaaaattcttcttcttctcttcttgctaatttgttcttgttcttgtgatgattggtttcctacatatttttctctttcttttctttcgttaaattcggtttggaagaaatatatatagagagatatatatatatctatgtatctatgttttgaagagaggtacgtgagggacaagtcgcgcgctcatgtaattgaattaatgattcggtatacttgtgagatagatcgatgcaatacaataatggtgaa

SEQ ID NO: 3772 - DNA, 533 bp, Zea mays
acgcggccgtgggccacgccgacctgaaaccgcatccccttccggcagtgctccccgtccaaggcgtcggagaagaagtagttggtgccctccgccgtgagcatcacgacgaggaacgcctcctccggcttccacccgccgtcgccgcctctcgccgcgacgccggcgctgcagaacctgtacgccgtggcgttggtcgtgtgcaccaccgtgttgccggtgtccgtcctgaagcctttgcgatggatggagcatgccgccagccacacacgtcagacacgtcagtacgtaaccagcgtcgatcgattgagctccatacagaaacagtagtttggacttgggcaggggaggaagccgaggatgaggactcactgaggtagtcgccgaggaagaaagtgcggttcgcagcccaggcggagtagttggcggccgaggcgttcgccttccagtcgaagatccaccccgcgccgtcgcccacggcgtggttcgtgccaaacggcggcaacagtggcgccgtggcgttcttggtcgag

SEQ ID NO: 3773 - DNA, 482 bp, Zea mays
ggcccttgatggctacatcaccacgcggcagaatgctcgcgtccgacgtgtgaaagaaatcgtagtctgaccgttttctctctgccacggccatgaaattctcgtactccacaccagcaaactcggggaaaactccaacctgtaacagaatgtttcacacgcacgcatcacactcgctcgcttccatcactctctcatggcactcaataaacaggaaacatttttttgaaaagaacaggagacatcatccttaacagcagtggaaacctacaagaatcactcctttgtcgccgatggacgcctgagcagcctccgccgaactgagctcgatggaagccgggccgacctgcttcttgaggtactccacgatgccatcggcatccctcggaccaccatagccacgcacgtccttccctccgttctctatgatcttgagggtggggtacgcgtgcacctggtacttgtccttgatatccttgttc

SEQ ID NO: 3774 - DNA, 458 bp, Zea mays
cgctctgcctcgtccgctgtccgctgccggtgttgcgtctgtttcgaccgccgccatcacgtccatcttctacgtcgactcggccccgccagtgtcgtccacagcgccgtccgtccggctcgccagggacttgagcaccgccgcgaccttcttctccgccgccgtccgcgaagtctgccacatctgcgaccttctcctatgccgtctcgttgtccgggcaaccatcgactttttttcttctaaatataatgatacgcagctcaactgtgtgttcaagaaaaaatattgccatttcagtatggtccgcttatctatttatgtgggaaaatgtcttaggttcttgctgaagttaaaccacatgagaaaaagaagttcatatctgaactccagaaagagcacaagttagttgccatggttggtgacggcattaatgatgccgcagcactagcttcagctga

SEQ ID NO: 3775 - DNA, 199 bp, Zea mays
  misc_feature (97)..(97): n is a, c, g, or t
aactgtaagggtttgtccaggcagaagtgtacggtcttccacggacgtcaaagcaagaaaagcatgcttttcctcctcattagcatcatctgacggnggtctcatcattgatagaacatagctgtcttctgggttcgaagagaaaattcttacactccacagatttacagattcaggagaggtattctcaatctgtatg

SEQ ID NO: 3776 - DNA, 597 bp, Zea mays
gatggtaagctcataagacaggaaatttcaacctgtcaacctgctgtagtcaccatatgcctgctgtttattcggtacttcacatttaacagcaacatactgctgttctaggtggcacgttcgccctctactcacttatatcgcggcactccaaggtaaggctgataccaaatcagcaggctgaggatgccatggtgtcaaattatggcatcgaagcgcccagtccggaactgagggtggcacagtggctgaagcagaagctcgagtctagcaaggcagcaaagattagcctctttatcattacaatccttggcacatcaatggtgatgggggatggaaccttgacaccatcaatttctggtaacagaaacagtatacggagaagtcataagcacattcgtatccagtattcaaaatcctaacgtgtttcttgctcttctagtgctctctgcagtgagtgggatcagggagaaggtgccaagcttaactgaaagtatgtgaaaaaagagctcctacagacattgatcagttggtacgctttgttcaacatgtaaattgtttgctgtcacttttcgtgcagcgcaggtagtctggatc

SEQ ID NO: 3777 - DNA, 407 bp, Zea mays
gaatttggtctcagggtttgaaggtgctatgctgtatcagactgctaggatattcgttgtgccatcgtcctatgccttcatgctcaagagccatggccgacattttgtccgccttcacttcttccccttcaaataccagagctatgacctcaccacggcgaccttcaaggtgtccacgcaggatgtcgtgctcctcgacaatttcacagcgcccagtagttcttcgccggtgttcaaggagtattccctgaacattaccagggacatgctcatcctcacatttgtgcctcttgggaacaacacaccggccttcgtcaatgctatcgaggtcatctctgtccctgatctcataaccgactcggtactaagtctggaccctgtcggtcagtatcttgggctgtcaacac

SEQ ID NO: 3778 - DNA, 356 bp, Zea mays
  misc_feature (274)..(274): n is a, c, g, or t
tatgttgtgaagctcaatcctgatgaggataagcagcatattctccttgccggaatgagcgataagaagattgtgcaatgggatatgaagtcagggcagattacacaagagtatgatcagcatttaggggctgtgaacaccataacttttgtggataacaacaggagatttgtgacctcaagtgatgacaagtctcttcgtgtgtgggagtttggcatccctgtggtgattaagtacatcagtgagccgcacatgcattcaatgccatcgatgncactgcatcccaactccaattggctggcagcacagagtttggacaatcagatactgatatacagcaccaaggagaggtttca

SEQ ID NO: 3779 - DNA, 362 bp, Zea mays
agctttcgccttgccaggctcgagagcttgtgctgttgaatccttccttggatgtctgagccaaaatttctcttattgtccagctcttcatctttcttgggtgttgtttttttgacgtgacgatcctttccccaaattaccgactttgattgtactgtgcgatttttcgagttccgtctcctcggagatgggatcttaagccagatgttctgatcgaaacaacaacactcagtttcctcttcaacacatcattccttccgcatgttcttgactttggatcttggaatttttctttggtctctttgacgatggaaatgaggaccctttccccagctgatcgactacgattacactgtgcgcaa

SEQ ID NO: 3780 - DNA, 401 bp, Zea mays
ttgatggtccttctatttttttcttttatttcaagtaatatgtgttatgtgtaaaacgcctaggctcatctaagctctaggtggagggtcaccacctagaaaacgcctgatgcctaatgcaactttgatggcaatatttggagatttgattagagaccgttagagagttttttttttcaccataatttctagtcctatcaacaaggaaggatataaaagatgctcttgtgattgctatcatctgacctatttagcgaacatgacagtctgcctacatgtaggtttgcagctgcatcccaatcagctcgaatggactggtcttcatttaccaagggttacttcttgaacagagataccttggttggcgtacttcttcttattgatgccagtattccacctca

SEQ ID NO: 3781 - DNA, 366 bp, Zea mays
  misc_feature (358)..(358): n is a, c, g, or t
ctcttgagcctgccgagctgcgacgggacggacccggacaacgcgttctcgtagaggtagatgttctccaggctggtgcagtggccgagctccggcggtatcgggccagagagcagcgccgtgtaaatggctagcgtggtgaggttcttgagctggccgaggctcgccggcagcggcccggtgatgctggtctcggcgaggccgatcatggttagccgagagcaattgccgatctcggtagggagcgcgctgtggaggttcttgttcccgccgccacggagcacctcaaggctggccatccggccgatagccgccggtatcttgcccgcaagctggttgtcgtagatgatgagctccncggagaga

SEQ ID NO: 3782 - DNA, 799 bp, Zea mays
  misc_feature (492)..(796): n is a, c, g, or t
ctggaacaagaattggaagtgctaaatcagacttcagacagtctctataatattgtggctcctactcaagctactgttgcaaagatggtacaggttggtggtgatcacatcgagggaaacaccatactgaagttggacgaaatgatgataattcaacccacaggtggtactcctgattcagcacttcccataacaggtaaccctgcacatattatttttttttgaagatttgcattctcaagaagatcctctttatttaaccatgacagaagtaaatcttcaggacattattagcacccctgtagaggatgctatgactggtattatgaatacatccacagaggatgctacaccaaaggatatttcagattcagatgtgaaggatggttatgccttcatagaggccgtggaagtgcaggagactgttgtcaggagactgttgtatctatggacaacatcaaaatacccaagaaggttacagctgaattgcannnnnnnnnnnnnnnnnnnnnnnnnnnnnnnnnnnnnnnnnnnnnnnnnnnnnnnnnnnnnnnnnnnnnnnnnnnnnnnnnnnnnnnnnnnnnnnnnnnnnnnnnnnnnnnnnnnnnnnnnnnnnnnnnnnnnnnnnnnnnnnnnnnnnnnnnnnnnnnnnnnnnnnnnnnnnnnnnnnnnnnnnnnnnnnnnnnnnnnnnnnnnnnnnnnnnnnnnnnnnnnnnnnnnnnnnnnnnnnnnnnnnnnnnnnnnnnnnnnnnnnnnnnnnnnnnnnnnnnnnnnnnnnnnnnnnnnnnnnnnnnnntcc

SEQ ID NO: 3783 - DNA, 273 bp, Zea mays
tatgacgagagacgggcgttgacagctaaacactccgtctgttgaatgttgatcccttcaacatttcccctattttaacattattattattattattattaaccaatcgaatcaactgcacctcttgaccgcttctactccaccgcctgctgctccgctagtcttcttcaaccttgtgatgcttcagcccccccgcccctggtattgatcgctcagcacaaagcatcgtacttggataggagaaaacaattctagacagtcgacagagagaga

SEQ ID NO: 3784 - DNA, 404 bp, Zea mays
gaaggacctcgttacccgtcacgagatcgccgagcagattcaggagctcaaggctcggatcgttgaggctagccacagaaggaagaggtacaagattgatgacacagctaattctggtgccgccaatgtgatccctgtggaccggcggttgccagcgctctatgcagaattgggtagccttgttggtagcgatgttcctagagatgagattatcaagctacttgatgatggggcgctggccgtaaaggtggtgtctattgtgggctgtggaggactgggaaagactactgtcgtgaatcaggtttacataaacatcgccgagaaatttgattgccaagcctctgtgtccttgtcccaaaatcctgatatggtgaacatattccggtcaatactgtctcaagtca

SEQ ID NO: 3785 - DNA, 482 bp, Zea mays
  misc_feature (475)..(479): n is a, c, g, or t
gctcgccagcttcgccttcttctgcttcaccggcttcgtggtgtgggcgatcgagcaccggatcaaccccgagttccgaggcacgcggtggcagcagttcggcctcatcttctacttcgccttctccaccctcgtcttctcgcacagtacgcgccaatctgctagtttagttccattctttctttctttctttcttggacgaccgatggctgaaaaggctgagcctgcatcgtgcagaggagaagctggagagcaacctgtcgaggttcgtggtgatcatctgggtgttcgtcgtcctgatcctgacgtcgagttacacagcgagcctgacgtcgatgctgacggtccagaagctccagccggcggcgaccgacgtgacagagctccagcggaccggggcctacatcgggtaccaggagggctccttcatcaagcaacgactccagaaacaaggcttcgacgagaccaagatgannnnntac

SEQ ID NO: 3786 - DNA, 683 bp, Zea mays
caatgtagacgttggaatctttgcccgcagatataaggtatctgccgtctgatgttaacgacggcgatgacagagccttcgacttccaaggccctgtatcagagattcagagataacaagtagagaagaagggagcacatcctatcagtaactgaagttcaagacgtgtaacgtggttgaaccacgatgagtttctgctttctttgtgaatttctaccttcaaacttttggatggtatcaccattgacgactcggattttggaatctcctgatgtaactacaaccctattggaatcacttgtacataactgcaaggcggtgttcagacttcagaggttagagatttgatatggtttaatttataattgcaggaatactagtgcttccaccaatcagctgcacaaaaaccatacagtatgaacaatggagaaaaatgaacctttagattgttgatccgactggcggctgacttcttcttcccttgcacaaacaattctttctctagctggatgttttcacctaaaacgggaaattgaaccgctcactcttagtactgaattatcggtaaatatatttcgttcactattacaagttggagcactcaacataagtggaattacattaagaaataagacctccacgtaccagattgatcatagaaacgacatgcgcctgcaatcgtg

SEQ ID NO: 3787 - DNA, 503 bp, Zea mays
tgttgaagctgatgggcacctcgtcgcccaggtagtaggcgctccgcagcgacgtcagcagacgcagcagcgacttggcgcggttctgcgtgatgatgttcaccgagatccgcatccggttccagtctgcagttagcagatcagatcgagcgaagttagctctgttgcgatgcattcatggccatggcgtggcggcgtgcaaacgatgcagagatgcaggtacgtgcttacttggcagtgaggcgggcttgagggtggccatccagagcaccttggagacagagctcctggggacgaggacgagagcggtgcggttgacggcggctgtagcggcggccatgcggagcgcctccttgaccttgtcgtcgatgtcggcgagggcgacgaccacgctggggttgtgcatctggacgatgccccgcatgctggcgtagacggcctggagcacgggcacctctgagcgcgacggaccggacagcgcgccgatccctaggtcgaagatc

SEQ ID NO: 3788 - DNA, 350 bp, Zea mays
tagtggcttgtgcctagtggtataatgctcatttgtgagtgagtccagatatcccgtggaacaagtgcacaaacatacggttatagagcctctacattatactgcaatgaaatgttgataccctccatgatagtaaaagttgcctttgtatttggaagcatccaacttaatactatttaatagtatccaagcatgcactgcgccagagtcagaacagaacacaaagccagcttcttgttacaatggtagggatcatcagttgtatgcaggaccatccgattcttactgatattttgtcagtatggggatatgttgcaaatgtaccgcagtcgtgtaagcacgatatgttt

SEQ ID NO: 3789 - DNA, 382 bp, Zea mays
agattgactgactctgctcttccaatatttagaggtccatagattggattccccacagatttcttattactgttgtcagaactgcattttccatctccactagactcaactggccaggccttagaaacagaaccgtcgacattaatgatggccatgagctttcttgaggatccaagacgttggatcaatttaaacatccccttggaactcatggaattagccacacattggtttttgtactcttcatttacaatagcaatagtatttccttcagggtcgtataattgatctccattacttcgcctacggaggcaactaaagacagtggcatggatcgaagccacgctccgatcaacattagtgttgttgaccttgggaacta

SEQ ID NO: 3790 - DNA, 868 bp, Zea mays
  misc_feature (860)..(860): n is a, c, g, or t
tatcctccaaatcctttcagagaacaagaaagaaagataccaaacagcagaaacactacttcacaacgaaaaatgcttcacaggctccattgtcattttggcctcactgggcttatgagatgtatgattcgtattcactttccaggagagctgcaggtaccatgttatttatccactgtccactctttgtaatttctcttgattgtagcaaacggaatttatgttactctccattcattgattgttaacttcctgtatttttttctctcggaaacgtaggaaaactctatatctttatattatagagagataagtcctgttatacgaaagggcatctagcgtaatggttaagccttccgagtagcacctctaggtcctgggttcgatccccctcggtggcgaatttctggcttggttaaaaaagttccctcaccgtgcctcgctcgctcccgggttacgtcttgtgcgctaccctccggctgggccgttgcagagtgggcggtgacggcccgctagtgatggggggttagggttcaaggattttctcggcctggaccatgtttcggtctcttcttaatataataccgggagggcggtctttccctccccggccgagttttttgataagtcctgttatgtcaaagtataaatatgtgcagttgtgatttaagtgttgttgtatgtatgaccttgaattttcttcatggcagatttgtggagacaagtaattttaaacccaagcatggatgatcatgtgagaaaaccaaattatttgtcatattgcattggaagcaaacttcctatctcagaatctctgaggcaagaattgcttgagattgatggagtctcatatcgactanagcgggag

SEQ ID NO: 3791 - DNA, 379 bp, Zea mays
  misc_feature (369)..(372): n is a, c, g, or t
gctcttgctcccaccagcaccacctctggtgggaggcatcaggcatggagtcgcgggtgttgtcgggagttgggttttgcctcctatacagcataaatgaattatattgttttacctgttggtagaaagaaccttgaaagatagggaacgtgtcgttttttgtcaaagcggttcctgtgctgtataacatgttgcatgagtattggcgcaacttataagacaatgtcaaatgggtttttgggagtcccattctggtttcttgagtcttcttcattggtgtctattgtgtaacatgtacacaggtttgtggttcgtcacgtcttgtcttgtcttgtctgttgtatttgccaccgttgtctggaagttgtnnnntgcttat

SEQ ID NO: 3792 - DNA, 786 bp, Zea mays
acgaggcgaacaccaactgcttccttccccgccgccgcctacaaccaacacttcacgtgcccccatccttttccgcctcaagtcaagtgttcacggtccatcctctcgagagtctaggcccttctcccgaagccgcagacgcagaaaacggctctacatatggaggcgaagaagaagccgtcggcccccgccgccgtcggagccgcgccgccgcctccgggtaacgggtacttcagcaccgtcttctccgcgccgactgcggtacgggccgtctcttcacgccatcgttctgatattttgctctcagattcctggggtcttagtaatttttttgcatgattagtgagctggtgcgatttgctgaaagagtccgttactatgttgcgatttgtggagggacttcaacggtttcccaatttaattctgatgaggggtgattttgataatagaggacctataggattatgcaaaatctatttggatatgacgttgacattttgactttgttttgcattcaagggtagcgcaagtgacgcaaagcatgcggacttgtacacgatgctgaacaagcagagctccagagggcagaatggcagaggtagttctgggtactcctgtcaatttgatgtttctcttcgatttaggtcgcgttcataagcacaacgatacttaaaaccttttctcaccatcttagcttagaattaatctggagcacactgatgtaactatggaagtttaaattcgtgctcagatggcaaatcccacagccgccctacttacaaggat

SEQ ID NO: 3793 - DNA, 391 bp, Zea mays
gggtgaccagggtggactgaagaccttgagtcagcacgtcatggatgccaagctcagggttcttcacatgcgacaggagggcggggaaggttgaagcaaggtcgttgtcggagcaccaagcatcatgccagaaagcggtgccatgaccatttctgacttcacaagtagtgattgcccgatagatagggaggctggagcggagggcgtgccagtgggcaccggggaggttaccagtgagggtagccaagcagatgtgttgtctttcccaggccccccaagacgagcatgtcgagttgtgaaggcggtggaggagcctcaggtggaggcacgtgttgcaagtttccagatccttcacaccgaggccgccatcagctcgtcctttggttacaga

SEQ ID NO: 3794 - DNA, 402 bp, Zea mays
cgccgccaaccaaggtgatccgcgacgtgcaggtgcagcagatgcaggaccccgccggcgccatcttcaccggtgctactgcttacccgacgatggatgatccccggatggtcggaggcgagttgggcaagtccaacgtcgactacttgctcaacatcaacaatgtcgatggggagcagcagcagcagcaacagccatgcgctgagccgagcagcgacgtgcaggtgcaggtggaccccgccgccaccttgatgcccagctatgttcatggtcatcaacaaggcggggatcccctgatggccggaggcaaggaggaacagagtcgacgcgttgagtcaccagaggcggagctcgactacttcgacgactggctcaacaatgtcgattggaaaggtttcctag

SEQ ID NO: 3795 - DNA, 402 bp, Zea mays
gaggttttgcatgcgcccgaccgcagcggaattccgtgaaccctgtacggcaatggcaattggcaatgacagggttactggggtgggtgaatggtttcgggatagacaattgtttgtgggagctgcgctggcgaaatgtaggctgtctattgttgcaattgcaggatggatgggtagcctctggtcggctctgctagtgtgtagtgttgctgtctgtggtctattcagggattcccatgcccatacccatgcagattgctaggtgccgttctgtcggtacatggttggtggcgtgtctgcgtctttgctgtcactgggtttaaggtttaaggtgtagtatcagtgggtaccctcatgaattaggggttaagcccaatgttcctttgtgggtacatcatgaat

SEQ ID NO: 3796 - DNA, 381 bp, Zea mays
cagctgttgcctcagctgtgtcgtctgtggtacattctgcagaagggccagtgaaggggtctgaactggtagcatccgtgcccgtgcctgtctctgctgagatgccaaagggcaggatggacacactggtgccatcagcgccgtatcttccagatgtggaacgtttgatattggggttgctcttgctacctgcagtgccaatgaagcctgggagcagggattgtgcaatgtgcagagaatttctacctactgaagtgctcctcatactgccagtgtgctcgcacatgttccatcagtcatgcatcatcacttggctatgccgcaccacaccaccatgctgcccgttttgccgtgcctctatcaccattcctggctgtaaca

SEQ ID NO: 3797 - DNA, 577 bp, Zea mays
  misc_feature (522)..(525): n is a, c, g, or t
  misc_feature (531)..(532): n is a, c, g, or t
  misc_feature (536)..(557): n is a, c, g, or t
  misc_feature (563)..(570): n is a, c, g, or t
ccatggaggccgggctgcaggtgacggcgatccggacgcgcttctccgcgggaggcgtgtggatgaacatcggagtggaaggccaggtacgtacgcgaaaagcctagtttatttcatgtccatcatcactcactctggatgtgaaatattctcctgaaattggacattaaacgtttgctctaggtcaaaccccacgtgaacttgttgacccaccaaatgttcagctccatgacaagtcaaaagcatcatttcctgttgaataatagtactcaaaaccacgctagtacgcagacaaaatttaatgaacacatacgtagtactcagcttagacatgtacaacaccatttaataagatctgttgagtgatctttagaggttaattgaaaaaatatataagagacgtgcacattcgcgaagagatcgtctatacattattctctatgtgtattctcttaaatacatttatgacatatgggttaagagtcatatcgtgccgtcttttagatgtcttctttacttaannnnctatcnntgannnnnnnnnnnnnnnnnnnnnntatcannnnnnnnttctttg

SEQ ID NO: 3798 - DNA, 726 bp, Zea mays
  misc_feature (705)..(706): n is a, c, g, or t
  misc_feature (711)..(712): n is a, c, g, or t
acgaggctactttagctttttcacacgaatgctgtttgttttatgcttctgctgttgttattctactgagcaattcaagctaggtttgatttcttgtacggttgagactttactgtcatgacatgtggatgtgtatttagtgagataataatgtcactgtttcatttgctgatcgagaagaatttatattgatgacatgcattttttggctgtaccaataccatttcttacgtggttctgtctctgtgcatcaatcctgttatcatgctgcagagttattccggtcaagaagatctttactgtgtctatgtcccaacgaaccatctttacattggcgatatcttcatggtgaattcaaaggatgtcataaggccaaacctttccgtgcgtgaaggcatcggtaagttcgtactctgccatttcaggagcacggcttaattggtattctgcttcagggaataaggatggctactcctgcgaaaagaaacttaacgtatttgcattcatgggtttgcagaaatcgttgtgtctggtggtatgtcaatgccccagattctgtcaaccctcgacccggagatgatccttggtgacagaaccggaccaagcagaagctgaagctgccacgagccctttgtgtaacttttgtagtggtttgctagtaacattttcatacaggctaccaagagtacggcgaactgaacttgnngcacnngtatctctgtatta

SEQ ID NO: 3799 - DNA, 370 bp, Zea mays
aatctgtgtcaggtgtttcacctctatccaacaaggtttattgtagtaatctatctcctgcaaactatgccatttcacctcagtatgtgccgtctgtaagtgcttcgatctattcttatgtgtttttgattgtttcatttatttcgccttcattggataatactatattatcctcttgatatttaaaaaggctattggatgacaacttgtaacatgcctttggttcaagttgataacttgctgcatatggcttaggcttactccgttatcatttgttctatatttgaggccatgcacgtactcagttactcctatgtgctttgcctttgcagttgagctattcaagccattcttacctgttagctgccta

SEQ ID NO: 3800 - DNA, 375 bp, Zea mays
tgctcctcctcctcctcctcatccttcagcaactgtctgcggctgcggttgcagggatggccaccaccaagcttgggttgtctgacgtggtaaccgacacctgcgacagatgcagcaagagcaatccacaggtgaactacaccctctgcgtctcgtctctgtcgtcggaccccgagagcaggcaggcggacctccacggtctcgccatcatctcggccaagctgctgaggtcaggcgcggtggccatggaggccaagatggcggacctcagcaggaaggagcgcccatggtccccccggaggtcctgcctggacgcctgcgtcggggtgtaccgcaactccctctacgacctcggcagctccatcgtagccatcc

SEQ ID NO: 3801 - DNA, 363 bp, Zea mays
ctcgacggacccggactgcaagacctggagcaacgacgcctcggcgctctgctacaactgccagtcgtgcaaggccggcgtggtggccacgttccagcggaactggaagcgcgtcgccatcgtctgcatcgtcttcctcgtcttcatcatcatcgtctactccgtcggctgctgcgccttcaggaacaaccgcagagacaacgcctaccgcggcgggtggaagggcgggtacgcttgatccaccatcgcgtcgtttaggagcggagccatgcacgcgcgctcggtgctctgctgtctgctccctgcccgccgctgtcgtcgtacgtacatgtttagtaggctcgttgtagctctgtacaggtg

SEQ ID NO: 3802 - DNA, 387 bp, Zea mays
tcgggcgaggaatccggccgccagggtttcttgatccgggcgcgtgattcgtcgtgcccaggcaccagtgagaaatcaaatcaagaacacgccagcggaagtgagacgagagcgcggggaggaatcaaggtcgcttctttgagctgccagttcccccgcgccaatgccggatccggccggcggcgccgggctggcatgttccctctaactgcccctgtccgccgccgcggctcccgatgctcgtgtggtcttcgggagcaggagagggagcagcggccgtcgtgggcggcggctaggagcgaagatgcagatccggctgtcgccgagcatgaggagcatcaccatctccactagccatggcctgctagacttgatgaggctcaaggt

SEQ ID NO: 3803 - DNA, 405 bp, Zea mays
tcctcttctgcagtggttagcttcttatacttatctaattatgtataactgttctctgatagtgatcatgcacaattacaataattagtctcttgaagtcatggaattcaatcattttagagatcatatccaagagcagcgatgtgagcctgcatgatatctgtaaattagttttcatgtggaaattatattatcacgtcaattgggacggttaattctagatgcaacaagttgtccaaacaagcattctgaatgtcaatgaaagcatcatttcatttggagtcaatggagtctctgtgatgtatagtgattctttactgtcctcttaacttgcaacagcgcgtccgattggaaagtgccgactactttcatatatgggcagcaagattggatgaactaccaagg

SEQ ID NO: 3804 - DNA, 432 bp, Zea mays
agaggctgaggctggagaatgacgaagcccttggacacatgttgttgccagacacagacacattcctgcagtactgatggagtgtactgtgcatgtgcagggcagcagaaagatactggcgatgccattctgttcgggcatggttggtatcaatgctgtgcacaaagcctgtgctcactgcccagagcatcagcagccatctcaggcccataacgcactgcaaatgcaaatgcaaatgtggcacgggtcagcactttggaaggagttcgttagggtggtagcagcgccgcggtctacatacccatcattatggctgacgacgattgtttgtcgtcagtggcggcagcagcagatgggcaccaccgggaccggagcgccagcctggacatcagccacttcatgacgttaaacacagatcatcatcacttgata

SEQ ID NO: 3805 - DNA, 266 bp, Zea mays
tgtgtggcgtcagatatgtactgccgccgaactgctgtggttcaagcaatatccttttggatggaagtgaagagatgtgtttctgtccatcattcttcttctgttagtgtatgcataattggaaaaattaatggatcctttattcatcagcagttaatgatgttctccacgcctgtcaaatgtcaatagagttgttgaaggatatcagcttagattggatcatctctttttttttatgttctactgtcttcagtcacatgccattc

SEQ ID NO: 3806 - DNA, 378 bp, Zea mays
cgagctggacaatatcgaagaatttctggagacgtacgacatctacaacaagctcggccgctcctacctgctggcctgcatctcctcgcatgaacgccagcgctacgcagagagaggcggtgccgctcccgtcgacctctacctcacgcagcgcatgaacaagtacttggatcaagcccacaaagttcacaagaatcccaaaaccaaaatctgatctcatgcatgcgatgatcagctagcaagacgatgattcatccgcaccgcgtgcactcgcatcgatcatccaccaataattcccctttactttctttgcttatataataacaggcccagttctatatgttctagtaggccctggattatttactgctgcatgct

SEQ ID NO: 3807 - DNA, 383 bp, Zea mays
agctaacccaacagacactaccatcccctcttcaacgttgcgtatcgactcaacacagcaagcaaatcactaattaatttgaaccaacttagaaggcaatggaacaggcaaccgtcgcacaaacaattgcttaacaaaatgttaccagatcaccggaggccgaggagccaaggggaacgcgtcggcacccggccggcagcgaagttgcggggcggagcaaggaggctagttagtgcctgctggatatgctgaaggaagtgaccttcatgggcgtggccaccaccagtggagcctccggggagtcgctgaccgagtacctgtcgtgcatgaagcggctggccacgatggactcgtccttggggatcaccttgtagcaatagcag

SEQ ID NO: 3808 - DNA, 384 bp, Zea mays
cccggcggcgtgcatgaggagctcgtccagtcgttcgaccgccccaccggtcaccgagccgttgtctcggccgcagagtggcacgagcagcctcagcgcttccatcttcctcctgatcgccatcgcgcgcttcctcgacgctgccgcccttgggcgtttgctgccggcagccttcttccttagcttcctcgccatcaagagcgaggccgacggcctcgtcaatttgaggcgcctcctcctggcagccggtgcagtgccggcggcaacggcatcatcgcagcaagtctggtgagcagtcatctggccggcgcgcggcgacgaggaacgaagctagctagcgctctggctagctttcagctttccaggtagatgcgagctagctag

SEQ ID NO: 3809 - DNA, 458 bp, Zea mays
ataccccctgcaagaatttacgaacaagaagaaaagggggaaagaatcccagtcaatctaacctgcgttaatttcagacgggtgtgaaaaggaggagagcaaaattgctccacgggggcgtaccggcgatgccgaacatggagtccctggtgagcccgacccacttcctgaacacggcctgcacgggcttggtcgggtagaggaagatccccgcggcccaggtgaggaacaccgcccacatcaggaacttgagcacggtcctagccagcgacggcagcgcggcagccgacggcgccggcgccgaggacgagtccttggcaccgcaggcattgccgacgccggtctgtcgttgctgcaggagcggctcccgttcgtgggccatggccaggaccaggagaaggaaagcggaagcgcgagagagaatctaggggcccgggaagcctgcactagcttgtcta

SEQ ID NO: 3810 - DNA, 455 bp, Zea mays
cgctctccttcgtttcgtggttcacgcgtggtgtcgcatcgggcggctcgacgaggcggacaaagccggtggccagtgcgtccaccacctaggggcgcgaccgactcgtcttccccaccggtctggtgctccatggaggtggctgtctccattggtaccacgcagggccaggcttgttccactggctgcagcgtggacaatgacgtgaagccgaagctctagacggcgatcaaagcagaggaggaacaccagctgagactactctacacccgagtgtcacagtggtggcccatgaatacgcaggctggagctgcgatctcgtcgcagaccatgggtgcaatgggtgcagaggtgagtgcctggatgattccgtctgttctgttcttatataatattgaacaaatattcagacatgatacaagtgcagacttaggtggatggttctaaatgttcac

SEQ ID NO: 3811 - DNA, 387 bp, Zea mays
  misc_feature (357)..(375): n is a, c, g, or t
aagaaagaaggaaggaaggaacgagcgggagtggaaaagttggtgagtgaaacttacccactgctgcagctagctgctcccacttcctcgctgcgtcgtcctccctcacgcacctcgcctcgtctcccgcctcctggctccggcacgcgtaccatctcctctcggtctaaagcggtgcgtgcatgccggccgtccagtccttgcattgcatcgcattgcatcaggcaggcaggctctaaaaagttcggcagcatcctgcaatctaaacgttgcccgcgtggatttgtttactgcgccgcgccacaagccgcctgtcgttttctctgatcctccctctgcccgcctgtctgtctgtgnnnnnnnnnnnnnnnnnnnactcactcactc

SEQ ID NO: 3812 - DNA, 526 bp, Zea mays
gcaagaacgtcttctactggttccagaaccacaaggcccgcgagcgccagaagcagaagcgagctgccctcctcaccctcagcaccaccaccactgcttccacgctgctaccaccagctgctgaaaccaaggtatataactatatatgcattgcagcagcttgcgttatgtatatatgcattgcatgcataaatttaaatgcagtgaacagctagcagtatcatcatatgtacgtacgtatgcatgcaatgcaggagggagtggagacgaaaaaagaagaagcgtgtgaagatgcgtcgagccgcaagcggaggtgcaggacctgggaagatgtcgtcgtccatggtggcggcgacgatgccggtacggaggtagctgacgactactacaccgacgacgatgtgaccctggagctcttcccgctgcgtcctgatcaggggaaataaagctagctagctagctagctaactaattaagtaaggcggacaagcgtacgtatatgcgtaaagtatatgcccgatccatg

SEQ ID NO: 3813 - DNA, 420 bp, Zea mays
aggagaggctgaagactaaactcgcgccgaagatccaagtgtccagcgagccgttggacaggtactcgtagacgaggagcctgtgcgatttctcggcgcagaatcctaccagcctgaccaggttcagctgatggatcctgccgatcgtcttcacctctgccaagaactcctccattccctgattgacgccctctaggcgcttcacagcgacggtttgcttgcctatggtgcctctgaagaccgacccgaagccgcccgctccaagcttggtggagaagttgcccgtggcagccttcagctcgtggaaggtgaaacggctcggtgtccccggtatgccgtgaaacagcggctcctcctcttccctccacttcttccatacgacagcgaaacccaaaactgatgcaactgaaatacctgcaa

SEQ ID NO: 3814 - DNA, 797 bp, Zea mays
  misc_feature (782)..(782): n is a, c, g, or t
  misc_feature (790)..(790): n is a, c, g, or t
tcagtagttcacaacaacattaacagagttacatcaaagcaacaaacacaagagaggctaaacaacatagtgcattagtgatttagtgatagagatccataccagagctgcaaagcagaatatcaatggaaatgcacaggcaaacatcatgatcatgccaaactgaagagccagctccagaaagtctgtagtggattcaataatataagcacaaacaccatcatttgctttcaaactgcaaatgctaagcacaggtgttatatatgaactgcatccagagtgactattaaaagaaccgaaaaggacatatttaccatcaaataaaccgtcttcaagttctgctccaatgctcgcagtataagagggttttaaatactctttctccactcttgttgataaccgcactgacctacccactggtgattctttctcatgctttttcttgctacaagatgggagagaattcttgtattactctattgatctgggaataataagtataaggacaagagttcatgtgaaacttactgaacagctatgtactttttgtagctgtacttaaggtaaggaatggaattctcaatcagattttccaatacctgaaaaaaagtaaacatatcgtaaatagggtactatggtacaaacatatttgacagtaaaacaattatgttgcacatgcctgggacacaatgagacgctggatgaggacttggcggagggacagtatatcacgatacaatgaagcatggtaaaataacccaatatatgactgcataaagtanggggccanagggggg

SEQ ID NO: 3815 - DNA, 948 bp, Zea mays
cgcggcctcgtctggctcgacctcgccttcctctggccggtcagcctcgccaacctctacggcatcctcgcgcgccgacgctggtccgccaccacctccctcatggccggtgtccacatgctcacctacctggtaatttgtatgaccatcatctccccgggcaggccttcgtgcatgccaaaaagcagcattatatttagatgataattagaaagaccaaaacataattgagttttaaaattaattatacaaacggtatccagacgaatctattagttctaattagtttaggattagttctccatcctaaaattcaggtaactaaactatatgagaaacgttattacaatcttataatatatattccatttacttttgttttgtttcagtccgcaatgtttggggagatgctgggttcagggagagcaacgccgaagctgctcgggttgtacgttctgttccttgtctttgctgtagcttcagttgcgcgtggcctctgctcccgctcagcacaggctacaccggcggcaggtccatcgcctgtacttgctgctccgaagaagagggtttagatacctgatcaggctatccgcaaccgttacccctaaattttttcccctatatcactttttccccctattttttcatctctcgcagcggttccccataaatactcccctataccccactacaactataaaatattattttctatatcaactatcaattttttatctactaacaattactcgtggacccacaacacagtgtttagggtgatgaacagtgacacactaaatctggagggagagagaaggggaccgacgcgtaggagacgctgtaggggcaccgctgcggccgtagggtgccccctacagacggcatgcaaggggaggggattgccagcggcaaccgctgcgcacagcctcagggcatgtttaggagtct

SEQ ID NO: 3816 - DNA, 294 bp, Zea mays
cacacagacagggaagacaccatgtgcatctagacaacccgtatacatggtcgcctgcacatgtcttcttgatccattttccaccatggtttgctgggcaccttttttctcctccctaggcttcttcccttcaccgacatgccatcatctgaaacctcataacaaatcaaccattccctgtctcccctcccttcgacaaccatccaagactattcacaaagcaggaacatctgtacaaggaccaggaaaatatttgtaaaaaaactaaaaaattaaaaatcttcctactttttt

SEQ ID NO: 3817 - DNA, 557 bp, Zea mays
ataaagttcggccttgttcaatacgtacgtgacgtgacgtgacgtgagctaatatcgttcttccgtcacccgatgccataactgatatatagtaactaattaacttcgtctgacgaaactgcagatgattctcaagacactatgcgctctcttggcgttggtcttggagcctcttggagcctatggagatggcgaattcaagtggaattacgggtagccgtccgtctttctcgttatcagaatttgttactaccatgtcgttgtttcctgattaattaacatgtctgtcatgctttgcctttttttacgcgcaggtatccttacattgccgctgtcataaacttcagccagacatgggccttgtattgccttgtgaagttttacaacgcgacgcatgaaaagctacaggcgataaggccactagccaagttcataagctttaaggccatcgtgtttgccacttggtggcagggagtcggcattgcgatcatctgccaaactggactcctgcccaaagagggcaaagtgcagaacgcgctacaggacttcctcatctg

SEQ ID NO: 3818 - DNA, 379 bp, Zea mays
atacagcgtacacaaattagagtaagctaaaacgggaaactttacattccccttggcaaaagaatgataaatacatgtaagcagaaactcacattgtcaagattccttcataggaggttatgggccctcaaacaaccacctacatgaagcactgcagcttgaaggagacgaggctatcaatccactcattgtgaataatgaataagcatttaatcccaggattcatcatgagccaaagggtatgcacagtttggtcttcaaccttagtgctactcttctattaagttcttgcttacaactcctcttgagcacaacatgctcagtagatcttgggcctccttcaacaaaccttcacgagcaaggccttcgataagtataa

SEQ ID NO: 3819 - DNA, 547 bp, Zea mays
tcctccaacttggggccgagctgcatgaaaaacaaaaccgaaaacttataccaaaacccctgaatgttgcttgcaggtacgacgggaaatgaacaatctaaagtctgaacgagatgtgccaaaagcacacaactacgaacctgatagctacgctttctattagaaaaatgaaaaaaaagaagtggtacctccaagggagagtctccacgctctctcttgacgcctgtgacagagcaacccatgatgaggccatgccttcagacaccacggtaccacttcggtccgatcctttttcagcttgacatccttaaacccagccttcttgaacgactcgatgtactcttcctccttggggaagagcacccacatgtcggcgaagaagcggggtagccagaagggtgggtacatcgggccaatcacgtaagctagctagcccaacgagcctcaagaccctgtatgcttccttgatcccccgctgtgggtcaggccagtactccatgctgcaaggtatcatgacggggcagggaaatcagcaatccgtagtaca

SEQ ID NO: 3820 - DNA, 266 bp, Zea mays
cctccaccgcagcttcgtacaggccatagactgcctcggcggccaacacagtacgttctctccttcctccgatccgcctcgtcccttcatcataaagatctatacgtactgctgcctcccagttgaatgtaatcttgccccccccatttttttatgctcatgtagtaacattgcccttgaccttgagagatttggtagaattatctagtgatttgttccccgccggttctaatattgatcgtgttctttctttttgggaaaaaaaa

SEQ ID NO: 3821 - DNA, 266 bp, Zea mays
  misc_feature (12)..(12): n is a, c, g, or t
  misc_feature (100)..(101): n is a, c, g, or t
  misc_feature (105)..(106): n is a, c, g, or t
  misc_feature (121)..(121): n is a, c, g, or t
  misc_feature (125)..(126): n is a, c, g, or t
  misc_feature (135)..(135): n is a, c, g, or t
  misc_feature (138)..(139): n is a, c, g, or t
  misc_feature (144)..(146): n is a, c, g, or t
  misc_feature (173)..(173): n is a, c, g, or t
  misc_feature (181)..(186): n is a, c, g, or t
  misc_feature (193)..(193): n is a, c, g, or t
  misc_feature (221)..(221): n is a, c, g, or t
  misc_feature (227)..(227): n is a, c, g, or t
  misc_feature (250)..(250): n is a, c, g, or t
  misc_feature (253)..(253): n is a, c, g, or t
  misc_feature (256)..(266): n is a, c, g, or t
cctccaccgcancttcgtacaggccatagactgcctcggcggccaacacagtacgttctctccttcctccgatccgcctcgtcccttcatcataaagatnnatanntactgctgcctcccngttnnatgtaatcntgnnccccnnntttttttatgctcatgtagtaacattncccttgannnnnngagattnggtagaattatctagtgatttgttcccngccggntctaatattgatcgtgttctttnttnttnnnnnnnnnnn

SEQ ID NO: 3822 - DNA, 608 bp, Zea mays
tgcttgatattgaacacggagcaagctcctgaacttgttgccgaggaggccacactcttgcgctgccttggcaatgggggaggttgttgctgcttcctccctggccctggtgctgctcttcttctgctcttgcgggcctgcaagcggccttctctcccccaagggtgtaaactatgaaggtcaatattccgtcccaaatcaagaggcatcttgtttatttttgtgtttgttctctttcgttggtccttgtaatcatccctgtgatgctctcagaccaaacaactctgtgaaagaaatatttgtctattcgtttttccctttttgctacattgttgcagtgagtctctcctttgtttgcagttcaagctctcatgatgatcaagaactacctcaaggatcctcatggtgtactgaagaactgggaccaagactctgtggatccttgcagctggacaatggtcacttgctctccagagaaccttgtcaccggcttgtaagcaagccacctaccatttgtgtgtgtgtgtgtgttccagctcaatcaatgtttcctctgtatcttattgtttctgtggctatttccatttggcagagaagcaccaagccag

SEQ ID NO: 3823 - DNA, 984 bp, Zea mays
  misc_feature (56)..(59): n is a, c, g, or t
ttcggttcgcggccagctgggcagccgctctttgctacacaatcagcgcctgcggnnnncaactgccattcatggggccacccagggtaaatgccccggcgtttggacctccgtcttggcaaactcaggtgatcttgctagttctactgcagaagtttagttttttttgtaagggagtgagtgacactgggaagcggtgtcggtttacactttttgtggtgtttccaatctcacatacccaaggattatgttttgaatgttcatctgctaggtattttaattaggttgtctgatatgacatatgagccttatgttgattgacctgtaaccatgtgtggtagatattagatttgttattaaattatattctaatgacccataatttgttaaggattccaaaagttttgtgttgcctatgtttctgtagttatttgtttggcttaaatagcatatatgtggacttttggcatacatggttgttgtgattactagcttagtagtactcttatcaatatgacgtgaaaatttcgaaacttaatttatttaagtatatggtttcatagtgtgtgagcagagaattactgaatcttaaactccagtgattctaggaaacatagaagtttgacctctgacatgctctatggaattatttgtagggagctgggtctggtgcaatgcagccacctttgagaatgccaggcattcctggtagcatgcagccaaacacactaggaccccctggcaccccgactataccttattctccacatgctggaacccaggtatcaaccccgtccaaaattgatcctaatcaaattccacgtcccatgcgtgaatcatcagtcatcatttatgagacccgtcaaggtggccaagcaaccattcccccggtatgtcttaaagcttggtgtccattttcgttcatatttcgttgcatgctaaacctgttcctgcctctcataaaagagtagttatgatcacagg

SEQ ID NO: 3824 - DNA, 719 bp, Zea mays
gtcgtccggtgagctaccgccgcagaagcagccgagctcggcgccggatctcccgccgggcttccggttccatcccacggacgaggagctggtcgtccactacctcaagaagaaggctgcgtccgtgccactccccgtcgccatcatcgcggaggtcgacctttacaagttcgatccgtgggagctacctggtacgtataagctagcgcgcgccatgccgcggccgccatatacaaatcctttccaacgtgatcgatgaattatttattggcatggtgatctcatcttactcattctgctagtgattatactgtatatacagtctcgatcgtgtctattaaaatattattttttagtcctgtgcatatcttttttcattgtaaataaagtagtactgtgtatatatatatgcgcatctactagctttgcatacatacatactgctagcttccatgcatgcatgtgccttactattctcacgcactgtgtggccgcctggacatgcatgcatggttggatactctggatcagataaggcgacattcggcgagcaggagtggtacttcttcagcccgagggaccgcaagtaccccaacggagcgcggccgaacagggcggcgacgtccggctactggaaggcgactggcacagacaagcccatcatggcgtccggcggcaaccgcgagaaggtcggcgtcaagaaggctctcgtgttctac

SEQ ID NO: 3825 - DNA, 355 bp, Zea mays
  misc_feature (31)..(32): n is a, c, g, or t
tgatggcgggggatcagggtctgggtccggnnccggatccggtgatagtagtccttatggtacccatgcaagtgctggagggggtggtgcaggtggtggagctagccaatacggtgggtctggatatggttcaggatcagggtctggttcagggtctagtacatatagtcaaggagggtattattcgggttatggagaatcttctaatgctggtggttctggtggaggtgggggtggaggacaagctggaggttatgggaattccaatgctcaaggatctggtagtggcaccggttctggctctagctatgctaacaggtattgggatggatcaagtggaggtgcaaatgctaat

SEQ ID NO: 3826 - DNA, 770 bp, Zea mays
agcgggctgaaggagtgcggcttgtgggtcactcggcaaggctacgagcttcatcgaacaagaagacacgcgggtcaaggtatcacgccataccggatgctccaccgctgttccctatccacatcatctgccgcatccatctcatctcgaaaaaacttcgcatgcatctgtttcctgtgccatcccttatgataaccttcgcatctccttcgtgtggcatataggcaatcgacaggattgagaaggtaatgctccttccattatgttattgaaccatgtatgctgttaaatgttactagccaccataagtagagtaagattacttatattcttttagaaacggtaataccacttctgagcggtgccttccatgctgaacgatgccatccagacgtgtactgatcggccggagtggaagaacaactcacatttgtgcagccagcccaagggatcttcagtgccgtcatattttgggaatccaagcttctgcgctcctggagggggtgggccgtgcctgaagtcagcgccattggaggttttggaggaatcgctgaaggtctgtttcttgtctgctaacacctgggattgtagacggttcacagtgacagagatgcggccttgttctgcttgtggtgtattcacggtgtcgttgagagcgcaattgtactgtccaaggggctctgggtgatgacgggatcctctcctggcgctgagtcgttcatcgtgagaacaggccgaccggcggcagcagaagagaagatcaggcggaa

SEQ ID NO: 3827 - DNA, 549 bp, Zea mays
aggaggccctaattatccccttcctccctatggtggtggtggctacatgggagatccatatggtgcttatggtggcggcggtcctgcatacaaccaggtgatccaacctaaccattcagacaatcacatgtatgcaatactgcattgtgttattttgctttattaacataatacttttggcagccaatgatatatggcagaggaccagcaccggcaggaatgaggatggtgccgatggtgcttcctgatggccgccttggctatgttctgtaagaccattcttgcagtttgtgacagcatattctgcctgaagctcaatgtctgcctgagcacatatctgcagtttgtgacagcatattcttctgtcgacaggcaacaacctggtggaatgccgcctccgcccccaccgcggaggggtagtgaccgaagagacagtggcagaggtggcgaagggcacagccggcgatatcgcccttactagcttttcccttatgggctctactcccatcatgtggtatgaagcgtttaacttatgagacaacgagatag

SEQ ID NO: 3828 - DNA, 397 bp, Zea mays
  misc_feature (385)..(389): n is a, c, g, or t
gactgggcgggcatcctttcgggctgcggcgatgacgacgccgccgacataagcggcgtcgatcttttcgaccattacgcgggcgatggctttgatgaacaagtctggatgtgatgcatgctcttcctgcaggtagcagtgagtacactgggcggtaggatggttagaactgtgttgtgttgttactggtgatcgtatctctgctcttgcgtttgcgtgtccagttgcctctcttgttttctttggtttcttgggtcaattcaagttcgcccgcgtccatgcatgcatggttgctggtatgggggagaggcacggcctggtttgtgtggtacgttcttcgtgaagattgaggaatgaattgtgattgcgtcaagctgttgatctnnnnnctcgtggg

SEQ ID NO: 3829 - DNA, 381 bp, Zea mays
aacttgacaggacgcgtccgagcgagaccacgccactgggaaacgacgggcgaccaagcaaaaatccgagctgggcgagttcgactgagctggagcatggaagaccgtggctggggaagtgaggagcagggaggtcgtggccagaaagaccatgggcgagctgcacagccggcgagctggagctgagcgtgcgtgtgaggaagctcgacgtgggtgtccctggccggaccatggcggatagaggcgagctgaaatagggagggacggcgtgctcatctactggaaggggaggagctcggctgggagagggaactggccaccgggctcacttgatgcaaggagctgggcgcctactgctgctccatggagtccgtggctaga

SEQ ID NO: 3830 - DNA, 272 bp, Zea mays
  misc_feature (264)..(264): n is a, c, g, or t
tgttgtcccgactccggtggtggccacttcgccgaaggcggcagtatgcgcgaagggtgcttcgcaggacccgtggtccaccttctgcgcgagcggcacgattccgtcggccgccgccgctaaggacatggcgggttccgtgtcccggcaactgaggcaagcgtcgcagcagctgaagcaagtaagtcgtgttggacttcgatagttcgttgtttttatgaggtggcgagtctcatggtttgtggtggcaggcggccgacttcnccgaccac

SEQ ID NO: 3831 - DNA, 473 bp, Zea mays
aagtttactccataataaaggctatggtacactctgagaggcttgagaatgagaagcagcctgcatttactagtcaaacaggtggaagagggagagaagccagtgagggaattcaggatgagaaatatggtgctggttgcaagaagtgccatatgttgatgaaagacaataatgcggtgtttcaccaagcactgcctaccacatcacagttccttgcacaggacgtcgataggctcaaactgcaactctcatcagcagtcactatgtcttcagacagggcctgcagtacatcagctgatgatccagcaactaatcatgattacatgactgtactgtcagtaaaaggtatccttccttgcttatttaataaaccattctgtctaaatttgcattgggtactacttatggaaatatctgtctcaatactttttcttgctattttgatgatcagcggccactgttgcttctcagtg

SEQ ID NO: 3832 - DNA, 270 bp, Zea mays
cacaggggttccaggcacgagctggtcgcgctgatggcttcagccatcggggacgtacagtggtgagcgtgcagcaggcgaacgaggaatctgcaaaagggagttgttgtttgaagcttataaaggaagcatatgcggaggctagacgccacgcgacgcggtgcattgcaggaatggggcaacacggcagacggttgcccggatggggattggattggaaggattcgggccttgccaagaaaacgtccgcgcgcacgttgttcggtgggc

SEQ ID NO: 3833 - DNA, 352 bp, Zea mays
gcatcgagtgcttatggactgggccgctatttcacctttgctgaaattcagaaagccacaaaaaactttgaagaaaaggatgtcattggtgtcggtggctttgggaaggtttatcttggtgttcttgaggatggtacaaagctagctatcaagagaggcaatccatcttctgatcaaggtatgaatgaattcttgactgaaattcaaatgttgtcaaagctgcgtcaccgccacctggtttcactcattggttgttgtgatgagaacaatgagatgatcctggtttatgagttcatgtcaaacggtccacttagggatcatctatatggtggtacaaacctaaagcctctat

SEQ ID NO: 3834 - DNA, 386 bp, Zea mays
ccctgcacttggtcctcgtcgaggatacgtcgccctccactcggttcatggcgctcggcctccagctcgcgaagcttccctggtggccgcttcctcgtcgttttctatagtcgcgcccggccgaggttcctccctgcgtgcgcaagctctgttgcgagcgccgatccgtacccacaaagcctcgtcggtgctcaattggctcgaaccctctgctcggacctttcttccgtggcgctcagctcggccagatgcgacctcgccttggctctctgtccctactgcgctcgccagtcggactcctggccatcgtcaacgaatctcgcgatcacagctctctgttgctcaaccggcgactcgctactcgtcttgctccaggtacgttaata

SEQ ID NO: 3835 - DNA, 556 bp, Zea mays
cggagggatggtcgcatgacccatcaaccgtgatgtcgctcgcgattgtcacttccacgacgcacttgacaccttgttgcgttgggctttagaccgacacacctggtcggtcgagtatcatcgtgtagtttactagcatagtcgtggcaaatacccgaacctctaggaggctacctttctggtacgccgtctggaggacaacctccagggtgcagaggcctgctcagagcactatgctatctctgagagggcactactgaagcggccatgcaggatgtttcacggcgtgcactctcgtagtattgctctttgttcggtggggtggctgatagtcttaacctcaggtattaccctcaccgttgactggcaacacggagagtgtgattgtcccacccatctgtgaaggcaacccttggttgagcagcacagtaaacctggtcgccatgcttaacactaagctggaccacgctctggacgagatgagcagggatggtacagagatcacggagctgcgtgctgagcgcgcagagtgccagcaccaggagggtggttctct

SEQ ID NO: 3836 - DNA, 1277 bp, Zea mays
  misc_feature (501)..(549): n is a, c, g, or t
  misc_feature (554)..(555): n is a, c, g, or t
  misc_feature (557)..(565): n is a, c, g, or t
  misc_feature (567)..(573): n is a, c, g, or t
  misc_feature (575)..(577): n is a, c, g, or t
  misc_feature (579)..(590): n is a, c, g, or t
  misc_feature (592)..(599): n is a, c, g, or t
  misc_feature (603)..(626): n is a, c, g, or t
  misc_feature (629)..(643): n is a, c, g, or t
  misc_feature (647)..(652): n is a, c, g, or t
  misc_feature (654)..(664): n is a, c, g, or t
  misc_feature (667)..(676): n is a, c, g, or t
  misc_feature (678)..(688): n is a, c, g, or t
  misc_feature (693)..(708): n is a, c, g, or t
  misc_feature (710)..(724): n is a, c, g, or t
  misc_feature (728)..(787): n is a, c, g, or t
  misc_feature (790)..(790): n is a, c, g, or t
  misc_feature (797)..(801): n is a, c, g, or t
  misc_feature (803)..(803): n is a, c, g, or t
  misc_feature (805)..(807): n is a, c, g, or t
  misc_feature (813)..(814): n is a, c, g, or t
  misc_feature (816)..(817): n is a, c, g, or t
  misc_feature (820)..(828): n is a, c, g, or t
  misc_feature (830)..(834): n is a, c, g, or t
  misc_feature (836)..(836): n is a, c, g, or t
  misc_feature (841)..(845): n is a, c, g, or t
  misc_feature (847)..(862): n is a, c, g, or t
  misc_feature (866)..(868): n is a, c, g, or t
  misc_feature (876)..(884): n is a, c, g, or t
  misc_feature (896)..(899): n is a, c, g, or t
  misc_feature (901)..(901): n is a, c, g, or t
  misc_feature (904)..(912): n is a, c, g, or t
  misc_feature (920)..(920): n is a, c, g, or t
  misc_feature (922)..(924): n is a, c, g, or t
  misc_feature (926)..(933): n is a, c, g, or t
  misc_feature (943)..(944): n is a, c, g, or t
  misc_feature (948)..(963): n is a, c, g, or t
  misc_feature (965)..(969): n is a, c, g, or t
  misc_feature (974)..(975): n is a, c, g, or t
  misc_feature (983)..(983): n is a, c, g, or t
  misc_feature (985)..(992): n is a, c, g, or t
  misc_feature (995)..(999): n is a, c, g, or t
  misc_feature (1001)..(1006): n is a, c, g, or t
  misc_feature (1008)..(1012): n is a, c, g, or t
  misc_feature (1014)..(1015): n is a, c, g, or t
  misc_feature (1018)..(1026): n is a, c, g, or t
  misc_feature (1028)..(1047): n is a, c, g, or t
  misc_feature (1051)..(1052): n is a, c, g, or t
  misc_feature (1055)..(1060): n is a, c, g, or t
  misc_feature (1067)..(1072): n is a, c, g, or t
  misc_feature (1076)..(1078): n is a, c, g, or t
  misc_feature (1081)..(1088): n is a, c, g, or t
  misc_feature (1090)..(1098): n is a, c, g, or t
  misc_feature (1114)..(1115): n is a, c, g, or t
  misc_feature (1119)..(1131): n is a, c, g, or t
  misc_feature (1134)..(1139): n is a, c, g, or t
  misc_feature (1146)..(1149): n is a, c, g, or t
  misc_feature (1154)..(1163): n is a, c, g, or t
  misc_feature (1165)..(1168): n is a, c, g, or t
  misc_feature (1171)..(1172): n is a, c, g, or t
  misc_feature (1174)..(1174): n is a, c, g, or t
  misc_feature (1179)..(1179): n is a, c, g, or t
  misc_feature (1181)..(1181): n is a, c, g, or t
  misc_feature (1183)..(1185): n is a, c, g, or t
  misc_feature (1190)..(1197): n is a, c, g, or t
  misc_feature (1204)..(1215): n is a, c, g, or t
  misc_feature (1217)..(1223): n is a, c, g, or t
  misc_feature (1234)..(1240): n is a, c, g, or t
  misc_feature (1244)..(1248): n is a, c, g, or t
  misc_feature (1255)..(1260): n is a, c, g, or t
  misc_feature (1266)..(1268): n is a, c, g, or t
  misc_feature (1271)..(1274): n is a, c, g, or t
ggcatatgaacactgtgtcaagatccatccctactgttatgctcttccaaccaaggatgttgatttttctgaagagaagaggtttcagacaactgggtatctggaaatgatgtggaaaaggcttgatttcttgcggctagtgcttgaaaaaggttacagctttgttttctcggtaaatttataccttgatgtccctcctgttcgaatgcattaaaatacagcttatgaactattcagtatgagtttcttatttgtagttttatctgatataaactactgcttcccctctgtatttcaggatgctgatatcgtgtggttccgcaatccatttccccacttctatactgatggagtttttcagattgcatgtgatcactacgtagggaatgcaactgacttgaggaacatagccaatggagggttcaactatgtgaagtcaaacgaccaaagcatagagttctacaagttttggtattcttcccgatttagatatcctgggtnnnnnnnnnnnnnnnnnnnnnnnnnnnnnnnnnnnnnnnnnnnnnnnnnccccnncnnnnnnnnncnnnnnnncnnncnnnnnnnnnnnncnnnnnnnncccnnnnnnnnnnnnnnnnnnnnnnnnccnnnnnnnnnnnnnnncccnnnnnncnnnnnnnnnnnccnnnnnnnnnncnnnnnnnnnnnccccnnnnnnnnnnnnnnnncnnnnnnnnnnnnnnncccnnnnnnnnnnnnnnnnnnnnnnnnnnnnnnnnnnnnnnnnnnnnnnnnnnnnnnnnnnnnctnccttctnnnnntntnnnctcccnncnnctnnnnnnnnncnnnnncnccttnnnnntnnnnnnnnnnnnnnnnctcnnncccccctnnnnnnnnnttccccttctcnnnncnccnnnnnnnnntcctctcncnnncnnnnnnnncctcctcccnncccnnnnnnnnnnnnnnnncnnnnntcttnnccccctcncnnnnnnnntcnnnnncnnnnnntnnnnncnnctnnnnnnnnncnnnnnnnnnnnnnnnnnnnncccnnctnnnnnncccttcnnnnnncttnnnctnnnnnnnntnnnnnnnnnctccctcctctcttcnntccnnnnnnnnnnnnnctnnnnnnctccttnnnnctccnnnnnnnnnntnnnnttnntnttttncntnnntcctnnnnnnnnccctttnnnnnnnnnnnntnnnnnnnctccttttccnnnnnnntttnnnnntctcttnnnnnncctctnnnccnnnntat

SEQ ID NO: 3837 - DNA, 321 bp, Zea mays
gctgatttgcatcgtgtccaaaccacttaacccgtgggttcatcttcttcctgctgtcggtgcaccttcctatcttattgaagttgctgataccggtcctgccaattgagtaaagaaactgcagccgctaccttgacaatcctgccttcccatctcatctgtgccgcatcttcgtgccgtccgggtccggcgtccatgactggctgccactgatcatctacttccacggaggcggatatgtcctcttccgtgtggcctacgatctgttgtacgacacctgcatggcgctcactgccaccaccttggctgttgtcgtgtcaa

SEQ ID NO: 3838 - DNA, 391 bp, Zea mays
acgacttgccagaacagtggtcggactgggagcaaagaaggatcaggatcacgccgtgaccttgtggactacaggctcgtggccaccatgttgtccaagtactgcgcctacttggtgttctacaaaccgaagctgctccgcgtcgacagcaactccgtgaggtacatgtgcaaagaactcctcaaagaagccaaagcagcggacggcggcggcgagaaggcggccaacgggaagcaggggccggcacatgacagcgaagtagaagacggcggcatggtctcgagaggccgtgagctcgcccaagttcttctgaagagcgtgctggcgcacggtagcgacgacggcaacatgctgtggaaggcgctggccgaactgtggtgcgagctgctaa

SEQ ID NO: 3839 - DNA, 431 bp, Zea mays
acaattcatttgcgcccaagaagaaggaggggacggctgccgctgcctggccctggccctggcaatcgctgaggaagaacagctcccggttcctgccgctgatcttgaacggcgcggcgctcaggtcgtcggaggaggcgttgccgatgaggctgaggtcgcagaaggagccctcctcctgcaggttgacgttggtgacgacgaacgagctgttctcgtacgagatgtccaggacctggtacgtccagtacgagttcttcaggtacaccttcttccgctcctcgcaggtgacctggaacgccttgtagccgcagtgccgctggtgcgtgcccgtgagccagaacgggtagtagatgcttaggttcccgcactgcaccggcgcgcacggcaacgccgacgtgttcacggcggcggcggtggtaggaaggctg

SEQ ID NO: 3840 - DNA, 389 bp, Zea mays
tccgcgagatcgccctgcccgtccccgcgccaccgccaccgccaccagcggctgagcaaagcggcgacgatgaacgcgtccacggcgccaacacctctgatgtaagtcgcagcggtactgatacgcaaatcgcattcgcaatggtgttgtgtcgctgtttcagtctcgggattttgccgatgactaaacgtacggtgtctcctcctctgcacgcttgaaggtggaaatgctgaggatgaagatggaggggatgtcaaagggcatgcgcgagcggatggcggagtacagccggcgcctggaagccgtcgcctccggcgacaacgctggctggggctgccagtcaaggaaatgcggcaaccggcacagccgaaaggcgagcgcaggcagcc

SEQ ID NO: 3841 - DNA, 389 bp, Zea mays
  misc_feature (76)..(76): n is a, c, g, or t
  misc_feature (334)..(334): n is a, c, g, or t
  misc_feature (349)..(349): n is a, c, g, or t
  misc_feature (380)..(382): n is a, c, g, or t
  misc_feature (384)..(385): n is a, c, g, or t
ctgccggtctggcgaaccgccacgccgctgtcatcgagggtcggcaacgtggccaggatcgccgtcctcaggcctnggtcatcacagagcgccgtgatgtcctgggggagtatcagggattcagggacaaaagtctccccagtaatccccccaccaggagttccagctcgtctcaggacagatcggtacccagcccgcgctggatcctacagatgtcgttcgggccggtgaaccagcaggacaggcgtggcctcctctgcagcggcgtgatccggcgcttcaggagatcgccgaccacgtgcattgatgtcaggccgcccgtggccaagacctngatcctgtccaatangggcaggaactctggcgagagggatggcttnnncnnccat

SEQ ID NO: 3842 - DNA, 1157 bp, Zea mays
  misc_feature (1091)..(1091): n is a, c, g, or t
  misc_feature (1093)..(1094): n is a, c, g, or t
  misc_feature (1096)..(1100): n is a, c, g, or t
accctagacttgacatggaggtaaaaaaatgcatcagtttgtgtttgcactggtaataatgtactaatgtccaaggttgttctcactcctaatcaactttatacccatgccaggtatcaaagcacatgaatcatttactaaaagctcccttttgtatacatccaaagacaggtaaaactcaagatgtgttaaattcctgtattagtttgtaatgtgataataaggtggcaggctcttatgctcaggagcgggtggcatgtccttttgaacatctagattcaataacagatgcagtcccttaaaatccttgacattgttgatttagtttattctaacagctgcaggaataatgtttgtcacacaatgttccctattgctcacaactgactcttcttccaggccgtgtttgtgttccgattgaccccagtaactgtgatgattttgatcctgcggctgttccgactctatcacaggtatggtccatagagcctagcatgagaagcactaacatttcatatccttctcccaagcatcatggtgcaatgctgatatgctaaaacaagtgcactcatacagcttttaggagagctgaatgctactggttttcagacagatcctgaaaatagtaagtgattgtagccatgctccttttgtgattcgtgtaaaaacttattatttcataaattgcagaagtaaaggcgttctagtgccaagatgcagccttgcgtaacaggctaacatgctctccttttgacaatcctatcgagtttcagattgggaaagaacgtcccttgggaaatccatcagttttttcagaacttccttcctgcacccattgctgaaagcatgcaaggtatggattctttcctatttcatttctgtggcaatgccggcatccatatgcattatgtgaataattgaaacactgcaaaatatcttaagtagcagaaccttaggagcatatattatagttctcttcatcccgcagcaaccacctgaagagaaaaaaaagttcggatgcacacttactttcagttaaactcttatctcatggttctgacatttcctgaggcataactctgaatcttttntnncnnnnnaattttgcaggaggaactggaaagtgcatatagcgcgaagcttcagcagtccaagaa

SEQ ID NO: 3843 - DNA, 477 bp, Zea mays
gatttaataagtctggaccagtatgtagaaaacatgcctgaaaaccagaaggcgatctattatatcgctactgatagtctccagagcgcgaagactgctcctttcttggaaaagctggttcagaaagatattgaggtacgtggagagtggactacttgttattgggcagacaatcgttttcctcttaagctgtagttttgcttatagtgctcctctttgttctgtaggttctttacctcattgagccaattgatgaggttgccattcagaatttacagacatacaaagagaagaagtttgtagatattagcaaagaggatttggaattgggtaagcaaaaatcttagttgttatgtgattcagtataaaactctttgggtttggcaacgcccatgccacatgcttatacataatgggctggtacaggtgatgaagatgaggacaaggagaaagaaagcaagcaggagtatactcttc

SEQ ID NO: 3844 - DNA, 430 bp, Zea mays
ctctccgatacttgggcctgtccgacaaaagtggctttactgatgagaaatcgaacaaataataatccatacacatgaaaatggaaatatgtatgtaccttggaaggcatgatccttctcttaggtaaagcaagtcattggtgtattcatcgaaaattgctactgctgaaatcatgtatgcaagtcccatttggaaagaagcctcctgcacacatggcatgattgtacaagcatatgagcacagcttccttcttgttgcatcagaggaaacacactagacaggacagacagacctgataagcaaccagtcccgcgcgaaaaccgaagaagaagctgctgaaaaatgaagcaagtaaccccccaatcaccgcaagtggccataacacaatggccaaaccagcaaaaggcacgcagacagtttctaagaaca

SEQ ID NO: 3845 - DNA, 698 bp, Zea mays
  misc_feature (633)..(641): n is a, c, g, or t
  misc_feature (675)..(677): n is a, c, g, or t
acgggcagttgttggtgccttacgagcagcttgcaggaggctttctttagcatcagtgtactccaactgaattgtcctaattttgcccaagtagaacaagtatcggcagaactgcaacaaaagaaatttgtatcagttgtttagtaatttcctacgaagccaattttctgaaaaaagatataatacttcaatcaccaacatgacaaccaataacagtttcttaatagaaatagaaatagttgaatacatggcttgcaagtgctaaatctgaaacatggcaaatccaaaagctgcatcacaacaaatggaataagcaaatggattacttgttggttggaatgtgcttcaaaacgaggtgcctttgatctaagcttttctgcctgatcatacaagttgtagtggaggtaattgcggaggagaagattcagcagagtttcctgcaatcaagaaccaaatacatacaatcatcaggtacacaaaattccacggcataacaataggtcagtggcgaccagaaaatcagcattacctggccgagctcgtcacgatgcaaagttgccattctgtgtagagcaagcagattcctgaaagaaaaaacaaaagcaaatgtaggacagattgagtagacagaannnnnnnnnagaagaagctagggttggtcctgggagtgaacannngaaaaaaatgaaacattagac

SEQ ID NO: 3846 - DNA, 813 bp, Zea mays
  misc_feature (447)..(450): n is a, c, g, or t
  misc_feature (452)..(808): n is a, c, g, or t
ggctcggtatttcgtcgaacgggcaaggcacgacgtcgaccactagctgcgaaaacacataatttgttggcggcagttcatcgaacatcatacacattggaaaataaacatcgagaacagcgggggtttctcaccacgggtttcgacggcgtcacggatggggctgcgcaaaaacagcaaacacctgtcgagcgtcgatggcgtgctgctcactgcgcaacacaaaacagcaagccggcagcgcgcggagccatcggggctgctgttttggatcggcaccgctgcgcagagacttggacgccacggctgcactccgagcaggggctccttgctgccgcaccagggaaaaggaggaaggggcgagcagcagcaggggaggaaagtcggctgggaggaagatgaacagggaggcgctgaaaagaaaaaaaaattctgggcgtcatccannnnannnnnnnnnnnnnnnnnnnnnnnnnnnnnnnnnnnnnnnnnnnnnnnnnnnnnnnnnnnnnnnnnnnnnnnnnnnnnnnnnnnnnnnnnnnnnnnnnnnnnnnnnnnnnnnnnnnnnnnnnnnnnnnnnnnnnnnnnnnnnnnnnnnnnnnnnnnnnnnnnnnnnnnnnnnnnnnnnnnnnnnnnnnnnnnnnnnnnnnnnnnnnnnnnnnnnnnnnnnnnnnnnnnnnnnnnnnnnnnnnnnnnnnnnnnnnnnnnnnnnnnnnnnnnnnnnnnnnnnnnnnnnnnnnnnnnnnnnnnnnnnnnnnnnnnnnnnnnnnnnnnnnnnnnnnnnnnnnnnnnnnnnnnnnnnnnnnnncctcc

SEQ ID NO: 3847 - DNA, 418 bp, Zea mays
cggcccgaagacggtgcggattccaatagcggtccgaatgacagtttatgatttctatgcagatgttgcataaatatgttgaaatatacaggacgtatcgtttgggttattttcgtttctgaagggaataaagaagtgtttttagaaaatttcgagaatcgtctggtgcctctatatatattattatggatctttctgaagctgttgacttggcaatcggatcatcaatcatggactacctatagagttcattcacttgatcgaacaatgtggacagagctgattgtagtcctgatggcacacatgcagttttcggtgcgttgagcaagagcttaaatataggagataactaaaattccccatacactattttttgcaacttgtttctgtttgaactttgtcaagttggatgcattcg

SEQ ID NO: 3848 - DNA, 405 bp, Zea mays
tggttctgtgcaaacgagataacatctcttgattctcgcctgttacgatagtgatgcttgtatacctctgaggctattgtttcgttttgttagcattcttttgcttgtttatgggtatgtgatgcagagttatcttagttatatcctccaattttgcagggcgtgattgacaacatgtacaaaagtgctaagtgaactcactctacagtacacatcccgatgaagattcccaacgttgaatcttgtttgagcagccagaagttctgctttgtatatgctcgtagtttgtatgcgagaattctttcctgtatcagttttttcagaaacgatttgccttgggcatatatatatagcaaaaccggcaatgtggccagcagccaagtggagacaccgtttcaaattgat

SEQ ID NO: 3849 - DNA, 393 bp, Zea mays
ggtgatctgatgaagatttcacataggcataaccatgaggacatcgatattgaaataggatgtggggatgctaatgaggtggaatgctcagtttcagattccaaagttaaagacaatatggatgcacatatgtgatatgtagagttagaaataaggtaaatggagaacagtcgagttgggttccagcggtttaatgaatgtgtgtttgtttagttcataagtaggcaaaatgccgtctcctccggtggtttcagcattattctttttgtaaatggctagtgcaggatacttaggatgctaccctgcaggttctcttgtgcattccgaccagcgtgtgtgttgaattcttaccctcggatccttcagaagacgtttgtgtatagtgtcttggtt

SEQ ID NO: 3850 - DNA, 432 bp, Zea mays
cgattctcatacaaggacctgttccatgcgacgggtggatttgagaacaagaatcttcttggcattggaggatttgggagagtgtacaaaggggagctcccgagatcgagattgaagatagccgtgaagagggtgtcgcatgactccaagcaagggatgaaggagtttattgcggagatcgtcagcataggacgtcttcagaaccgcaatcttgtccagttgcttggctactgtcgtcgcaaaggtgagctcctactggtatatgagtacatgcccaatggaagcttggataaatacctgcataatgcaaaagagggcaactctgcgttgagttgggctcaaaggtttcggatcatcaagggaatcgcatccggcctactgtatctccatgaggagtgggagaaggtagttgttcacagagacatcaaggga

SEQ ID NO: 3851 - DNA, 492 bp, Zea mays
cgaccctgccagttgcacaacgacgcaactataagaatgctttccatgcactctaccgtatcagtggtgatgagggagtccttgcgctttggaagggtgcaggtccaactgtggtgagagctatggcactcaatatgggtatgcttgcttcctatgaccagagtgtcgagctatttagggacaaatttggcgcaggagaaatttctactgttgttggtaagattctagtgcctacaagcttttgaggatttctgctatgttgttgaaatcaaatgcttattttcttagcttctgcaactgacattgcccggatccttttgattctactcattgtgcttaattttgtcaatttctgtacgtagccatgttaggcctgctgatcagtttcctgatgcaatcgtccaatttgattgcaggagccagcgctgtttctggattctttgcctcagcatgcagtttgccctttgactatgtgaagacacagatcagaag

SEQ ID NO: 3852 - DNA, 366 bp, Zea mays
ctctctggctgatcagtctgaaatgctgctgcacactatgcttgaggccggcgtctccccggacactgtttcttatcgtcacattgtggatgcctttgccagtgccggcaacctctcccgtgcagccgagctattctccgaaatggcagccacggggcacacggcggatgcctctgcttatttgggactcatggaagcacacacgcgtgttggcgccactgctgatgcggtggctgtgctgcgacagatgcaggctgatggatgtgcgccaacagctgccacttaccgtgtcctgctcgatctttatggaaggcaggggcggtttgatggagtgcgccaactcttccgtgagatgagaactgctgt

SEQ ID NO: 3853 - DNA, 337 bp, Zea mays
taagttcttggtgaagaaaccaaacaagatcatgcgaaagctttggtggctgcttcacaattatattatttttgaagttagaaggtttgtaacactaactactgatgctgggaataggttagttagcagctctttgcgaaggtctggatggctgtcataggaagaggaagaatttcgttggaaaacgggtagatggggatcaattgttcactagacatgaggagagggtgttatttgacttctataatgtgctacttgggaccatcatgatcatcatcaacaaagccttttatcccaagcaaagtagggtagactatagttagaaacccaatagaat

SEQ ID NO: 3854 - DNA, 500 bp, Zea mays
ccgaagacaccggagtaacaggagagacaaagtttgtagacattggagccgactcactggacacggtaacagtactctgtttgtttgtctgatgatctcaaacaaacaaacaaacaaacaaagaatctggtgtgttgttactaggttgaaatcgtgatggggcttgaggaagcgttccaaatcagcgtggacgaatcgagcgctcaagagatccagacggtggaggacgctgctgctctcatcgacaagcttatcgcggagaaggacgcttgaaacgctgtccggaggagggatgacgatgggtggttttgatttgagaccatagtgctccttattgcaattattagtcagaaaaaaaaaattacccagtttcttttctttcttcttcttcttctatcataatatgaaatatgtatgcatatgcatgccttttggtggtttgggattattataataaataaaactgccgccgagagatgagagacggtacccaattctct

SEQ ID NO: 3855 - DNA, 430 bp, Zea mays
ctgaatgtcctgctggatctcagtttcgccgagtagactctcttttccatggctgatctcccgtttgcttctgtagaggagatactgcttcaccaatgtgtccgggcttccttctaacgacccgagttgcggcggcgatgacgctcgatcctgctggagctggcacaggatgtagtagaggatctcctggggccgcagcggctcgaaatccatgtgcacctgcggaatgtccaccaagacgctgcgatgcccctgggccaaggccctgcgtgcgagagcgatgacctcctggtctgcctccggcgccacgacggcggcggagtgcatgacgtcgcctctctccatcacttgctccgtccactcgactagcttcccctggaagtagtcgtccagagccctatgcttgaataggactgctcttcgatgactt

SEQ ID NO: 3856 - DNA, 571 bp, Zea mays
tcgctgctactaatgctcttgagctaggaattgatgttggacatattgatgcaacattgcatcttggatttcctggtagtattgccaggtcggtgaagaatgacatattcaatgaagctcaatgtttatcttgtcaccctgctaagatacaaattttttactgcagcttgtggcagcaagccggtaggtctggaagaagagctaaacaatcactagccatttatgttgcctttgagggtcctttagatcagtatttcatgaagttcccacataaactatttggcaggtcgattgagcattgccaagttgattcgcataatctaaaggtttatagatatgtgtttattttattaactaattggcaagtataaataccttgagaacctaacccttctcttttatctcaaaaattgaaatttattacaggttttagaacagcaccttccttgtgctgcttatgaacatcccttgtgcgtgcaatacgatgagtgctactttggctctagtctcgatagtgtaatgacaacccttaaagacaaaggttatatcatcaataatcgagctggacctt

SEQ ID NO: 3857 - DNA, 479 bp, Zea mays
ctgtgtgctaaaatgatttaattgcaaccatacataaggcgctgtcccctcctgttcctaaaaaagattggagtactataataagctaccatcaaggagtgaacatgttgcagtgttgcactcaccatccttttccaaacggcggaaaaggaacctcccagttgttccctctcagagcagcgcgtgtgaacctatagaacaagcacatccacagaccacattacacgtcaagacgtccatcagttgatccaattatgaaacagatgctagattgctagtgaagcaccaaaaacctgcctgaaattgactcgctggggcggctgcacctcgatgtcgccattgacgacgaacgcgcctgagggaggaaacgtgatgacattgttaagggcgccgccggcgacatcgatgacctggagcacgtcgccggcggcagtgcggaagaatggggcgttgcgcacaatgaagagctgctcctgctc

SEQ ID NO: 3858 - DNA, 353 bp, Zea mays
agattctcctgcttgatgaagccacaagtgcattggacacagagtcagagcgtgttgtgcaagaggcacttgacctggcttctgttggcaggacaaccattgtcattgcacatcggctctccacaatccggaatgctgacatgattgctgtgatgcaatacggtgaggtcaaggagctgggatcccacgatgacctcattgccaatgagaatgggctctacacatctcttgtccgccttcagcagaccagagattcaagggaggccaatcaggttggtggaactgtaagtacatctgctgtggggcaatctagcagccacagcatgagcaggaggttctctgcagctagcagg

SEQ ID NO: 3859 - DNA, 350 bp, Zea mays
cctacactccgacgccgccggtgtctcacacccccagcccgccgccaccatactactagaaagcgatgcctaccataccacactgctgtcagtctctggagcatttaggtacgtactaatactacgtacaacggtacaagaatggagcatgcaatatgcatgcacactacatacatttagtatgtgcttgtgtcaaatatatcgtcagtatcatactgatctcctggcatagtctggcactaaccataggctgtccttttcttttgtgttcggacaggtggtctcgatcgatggaagagttgtgtcctagccagccggcaaagatgacctgctgatggtaatgatgatga

SEQ ID NO: 3860 - DNA, 366 bp, Zea mays
acgtcctgctctcacgagcggtcccgcaacagcatctccagcacgggacgcggcaccggtaacagtagcggatctgaacggcaataatgctccagagtttcttgcggaggatgccagcttgtctagacgcaacaccacaccgtcgaggccaacgattaagatgctgtcatgcttgtttccttctcgcgtctgatgaatggtcgctggacgtcgggtgtccgaggcgcatgcgtggtagcccccggtcgatctgtccgcgaagcggtgtgcagtgcaggacggcggcagcatacctttccgaaaagaaaacggcatcagcattggcgttagtcatatacttgtccatattcacccgatttgcctata

SEQ ID NO: 3861 - DNA, 405 bp, Zea mays
ttgatgtcgtgaggaatgtgaaggccagtatgaggttgagggcagcctgtgagaaggccaagaaggttctgagcgcgaatgcagaggccgtggtgaacatcgagtgcctgatggaagagaaggatgtgaggggggtgatccgaagggaggactttgagaagctatgtgccagactgctggagagggttgttgaaccttgcaagagggcggtggaagattcagggattggattggagaggctgcattctgtggaactcgtcgggtcaggttctcgggttcctgccattaccaaggtgcttgcgggattctttagaagggaacctagtcgcacactcaatgctagtgagtgtgtggctcgggggtgcgcgttgcaatgtgcaatgcttagtcctacgttccgtgttc

SEQ ID NO: 3862 - DNA, 717 bp, Zea mays
gcaagcgcaatgcaatgcacaactaacgtcagcacgtactgcactggcactcgatcgcactgaatcaaagacatgaactgccagctgaatggcatcaccttgacttggagctgcaagaacctgacgtagtcgatgatctcgtccagcatcgacgccttgtccgtctgcaaaaccacaaacaacgacgatcgaccgccccacacaacgtcgccatttcagtgttgattgttgacgacgcgagcgagagagaagaggaaggagctagctagctagctagagggggatgccgaccttgttggcgttcgggaccagttcctgtagcgacttcatccgctccgcgatcctctccctccgaagctgcatgcgcgcgaaatggatttttttttaacaaaaaaagttgagaaaatctctgtgtcgtacaagtggtagggacccaacaaatttctatttggctaatgaaccatcaaccatgacatgcataactgtatgtaaatttataacatactaaaactcttctgacaaaaaaacaaattttgcatgccttgcaatgtgttttgtcacattgttgtgtcttaattgtgtgcttaatgaaaaaaatcagagaagttgtgacagttcagctttcagagaatgttgttgttttttgttaaaagagggaacagttcagcttgtagggaagaaaaatgaaaaggtggcatacatacacgttccgctatg

SEQ ID NO: 3863 - DNA, 481 bp, Zea mays
tgtcgtctggattgtagccgaacacacgttgagctaggagtcccacgatcggaggcgcgaaggacgccagcactgactcgaatgtcccgtccagggcatatatgctagttcttgatttctctgggacgatctccgccatgatagggctgtaagatttagcaagatcgagttgaaagtctcacatcatcattccgttaagaactcttggatgcgacgaatggcttacaagtttgtggcgggtccgttccaggagatgaggacgccagtgacgaacaggacgacgccgtaggcaactccggcagacgggtcctcggggagccccagcagcagcacggcggccaagggaactgccaagccggcgctgatctgagacaggacgatcctgccggcgtctgggtaccgtacggcgagggcgtcgcccatctttccgccgagcagtccgccgagggagcaggccacccagaagatggtcatgagcaca

SEQ ID NO: 3864 - DNA, 550 bp, Zea mays
gtgtgtccaatcagaacgaccccaatcaattttgctccaagaagaattggcgactacttagatgccaaaatggcaagatcactttttatttctccccttaattaggtcaataattcttcctcttaagattttttttgaagttgaagttgtcgctgttttgatattgccagggttgcgcatttttgaagaacttctggaagtagattaccctgtatgctccagtttctctagattttttttagtgatttgtatgatgtgtaaaacattatgtattttcttttatttgtactctattgtgttgtaggcacgaggctgcagcagagctatgagggctgttggtgtagttgaagccacatgtgaagccatttttggtcttataatgagcatggatgtaacaagatacgagtacgtatggttttataacattctattttccctaccactgatgttgatctctttatcttcattatgcattgtaggtgggactgtagcttccgtaacggtagtttagttgaagaggtcgatggtcacactgcaatactatatcata

SEQ ID NO: 3865 - DNA, 451 bp, Zea mays
tgaattgcaagctatgtgtgcttcttttggctcttttcctccggttgtggctttttgcttacatgaaactcttgagtagacaatctagcgctaattgatgcaggtgtagagccttcctcggatagctggctccttttggctttcatagaactgcaactgcaagtttatatcattgcatctcagtatgcggagtgaataagctgtatacacaaccataatgacttcaatatccaactgtttaatatgatatcagtattgatggaccccacacgcacatagaaacggccacttaagattggacattccctctgttttcacaactactctgtagatcaaaggttcttagcatgctgtatgcctgtatgtatagctcttgttctattttaataatgaaatgcatgtctagatcttttttgtagtagagattatgtaatgtgtggatgacctggaa

SEQ ID NO: 3866 - DNA, 527 bp, Zea mays
cttgcagtgatagacatgaacaagaagctggtaccggttatcatcttgacattgacgcccaggttgagcgccttcctgatggtttccgcactgtcgtgcctcggtgggtcgaaaaggggcagcagggcgacgaactgccatgggccgccggggctgtccttagacttctccggcacttcctgtaataatgcaagaagaagaatatgatggtatgtttatacattcagaagaaatttttcaaagaagaacatatatatatgtccaagaccaatgaacgagaaagaataacacctgtgtggcgacggcgagagaccttaggccgcgctcagcgtacttgtggatgatggcgtgcaccttgttcacgacatcctccttgcagttgcatagggtcatgatctgctcgggagcacccttgctgacacggtgccagctaccgtcggcgaggctgacgtaggtgagggccgtgcgcttgtcgacggggttgaaggggaggaaatgcacctccttgatgccttccctagcttcct

SEQ ID NO: 3867 - DNA, 353 bp, Zea mays
ctacgtgtttaaagaaaaaatgctctcccatctctaccacagaagtgtctttccctctggtaccccaattcatttttttacatctactaccactgttgtctgtttttgctaacttgggcattaactgtgacaggaaaagaccaatttaacccgtgtgctctagtttcctgctagatttgtttccctttgacgccacacactggcaaagcatcgctgctatttttctctgtagtacagtccaacatggttgaaagcaactgctacaaatcaagagtactagagattagcgctcctactttaccagaagctcacaatgtcataaagtttcttggaacaacattagcaggacaagc

SEQ ID NO: 3868 - DNA, 610 bp, Zea mays
agtaatttcactccactcttgaggtacaagaagcttgaagatatcgactaaatacaaagactagtcagttaaattggatagctgccaaggaaacaaggtttactggaaacaaatcacacctggtgttgcacaaacataagcatctccagttatctgagttccatcactaagtgcgaagtgttttacagttccatcaggattcagctctatctttttaatacgagaattcaggcggacctctccacccctagaccgaatgtgatcaacaataggcatgcatagcctttcaggcggattaccatccaagaatgccattttagaaccatgcttctcctgcacatttacataaagtaatcttttcaaaagatccacaaggcatcttaacgttgcaagtacatattagcattttctcaagtaaaaacaaagaatatagacaagaaaataaaaatcaatatttgtaagctatttcttcaaacaaaacaggcaactaatatattgcacaattaaatagaacagctatacctgaagaaatcggttcaaagcaatcaaaatgcactgcatagatagctcatcaggatttatgaaattgagtgccttggacattgcaata

SEQ ID NO: 3869 - DNA, 927 bp, Zea mays
tctattgtggtagatttccttacagaatgtacattgatcttaatttgtctatattttgaagatctatactttgatgaaattgcatttctatgtccattataattgaactgaaagttctgttctaaattgatggaatcatggaggtacaatctaaattccatacaatagaaatttgaaaaaatataaattgatatcattgtgctagaaacagtatgggaaattatggtgcttacataattgacaaattagtatccgagtacatgtgtttgatgccccacgccggccaagtccaagagtatccaccaaaacaaactgtgaaacacttgtgtgtccgagaaaagaaaaccaaactgtgatagttggtcacaggagcaccaacgttttgaccaccgtgctcaatattttgccaatcctttgactactgcatcactagacaaatattttcataatatgtttgagttcctgtcaaatatgtcagcaccaaattctagttgagctattgctgatgaaatcacgaagtttttcaatcttgtacactttgtaagcaatgttcacatatatataagggtgagatctttaacttaaatatatgacttcctatagctttatcttttatttctgttgcagatccgctcaccttcaggaacagcacgtacttacagatttgctacccagaatgtaactcttcctgctcaagaaggagaaagggttaccatttccttggcggccccagttaacgtttaccgtgacatgggacccctcaaggttgctgcgcgctcacaaggatttaaacctggagaacctatgtgtctcactaatcacatcaatgggcaagtctcgaagttgctaagagctccatcaaagaacaagggaacatttttccttagcccatatttattggtcggtgctcttgccttccttgcatct

SEQ ID NO: 3870 - DNA, 393 bp, Zea mays
gagacgattcatcttctgaagacacttctgatgagaaagtggcaaatgatttgtcttccgaaaatgcttcggagcagctaaagacagagaataaacaagacaagaatatgactgatgcagatttcttcaagagtaaagtcaagaaaaattggtcagattctgaatctgatgacgaaggttctgctcaccagtcaaataccaccactgatgatgaagactcgtcagatgaatcacaagattcagataaccagttggcagatactaagggcgatcctgacaagagaaacattgtggacaaggacactcttgtggagaatactgacttgcaagagccggaagatcttgacaacaaagagagtgaagatcttgatggcagacctagaggaactgaaa

SEQ ID NO: 3871 - DNA, 372 bp, Zea mays
aggagggcaatctgaatgcctactttgaattggcaacggcttgctgtaatccatcatcgtcattgagaccagatacaaagaaaatactaaaaaggcttgaagacatagcaagataacaatagatgcgcgcggcggtgaggctccagtctgtttagaaattagaaagtgtggtgtgttatagcagcggccagcaggaggatagctttgacgtcccttgtattatttgttacttcctgcatacagcagagattgtgttgggggcatttggaaaatgatcctaacataagctaggagccccaagcatgtatagaaaagtatatttcccacgtaccaacataggaactcatccgagaacataatgtgtgtgctttc

SEQ ID NO: 3872 - DNA, 849 bp, Zea mays
ttgacgtcctgcttgttgcattgctacttgtcagcattctattgccacatggaacacttggatgcaagcagaagtgagacactattgcatttgtttgtttttttgagtgcatcttctgtttatttcaaacttcagattagctgttatctgcaactagctaggaaggtactcgcgagaagaaaaaaaaataatgaagctaggaaggaagggtgtacgaataataccttccaggaaagggtacggtcaacttgaccagcaacgtaggaagcaaggccggaatcatttgtctgatacgtcaagagatgtttggttagaaaagtctgaagaaatagatgcatctttatgtatagcccaatgccaagctcggcttccagctaaccttgtccatcgtgccaagatccagcgcttggaagtttttcaacaccagatgtggaggtaaggcgaacctgcatggtttcatagtacatatgcagtgtgtataggactccttatagtgaaaaaaaaaagaaacgttcgtccgtgcagcattctgggttcagttcttagattagcacctgttcttaatgtcagcttccctgcggccaagtattggagtgtctacggtgagtgcaatagccttgaagccagccatctcagcccttttcacgagttgccgtacgatgttcctgtccttgtagacctgatggagacgacgatacatggtataaggtcagagtgtgatgaacagaagataagcaacgtttcttgtgagttcatgaaggaagataataatgcatacatagagctggaagaaacgtatgcccggcccaactgagttgacctcttcaacgctggaagtagaccatgagg

SEQ ID NO: 3873 - DNA, 296 bp, Zea mays
acctaattatctctttccccaagttaataatggtatttgccgttggataattccacgcttgaacacgactgtactgtcttgctcaactgcttcacttcaccggttgcagttggttcctggcccctacaacaaggaaaccttcaactttccaaaaccattttgccaagggacctttttttttaaaaaaaaatggtaccaacggacaaaaagaccaatatcattagctacctgtttgatttcatgtttctttggactgatgctagcatcatactctggtagctaaattagtactgcgg

SEQ ID NO: 3874 - DNA, 330 bp, Zea mays
gctgcgactaaggatgatgatgtttaccatttcatcagctatttaccttttgaaggtgtcctgtatgagctggatgagctgaaggaagggcctgtgaatcttgggcagtgcggtggtgctgatgaccttgattggctacggatggtaaatctatgcgcccataaaacaatggcacccccatgaaatttgctctagcttcgccactggacggtgggtgcagctagttattcaagaaaggatcgagcgatactcacagaatgagatcaggttcaatcttatgtccaccataaagaacaggaaagaggtgtactgtgctggagtaactgtaga

SEQ ID NO: 3875 - DNA, 355 bp, Zea mays
gtgatctgctcccctgctcgccgtggttgtggcactgaacaggaaggctggatcccatcctcacctaatgacatgtgctatggtggagatctgagacgaaccgcacttctgaggtcggttcaaatgaaggtgcagagcccccatccatgtgatgtgcatgaacgagaacaagggcgttctaatgtacatgctgacgagcttcaacaggatcagaaagaagctgtgggtgtacagctggaccaaaggcctctctcttgtccaaagtcaacccaggatgctaagtgccagagctctataaactgatgacgcggattttgttgaggatcagattacggtgtgaccagtcaaagtttgt

SEQ ID NO: 3876 - DNA, 564 bp, Zea mays
gcgcgtaggatcggcgaggcgacggcgctcgaggttcgcgccactggcatccactggacctttgcgccgtgcgtcgccgtgagtaaaattcaaaactcttctgattgatcgatgacgtttgtggggatctgcttgatggtgtgagtctggcctctcctgtatactaggtctgtcgggatcctaggtggggcagatgctacgaaagctacagcgaggacccagagatcgtgcgctcgttgaccaccatcgtcagcggtttgcaggggcagccgccagcagaccatcctcatggttaccccttcctcgcttcgcctaggtacttgagtggacatgtttagcgtgttcctcatatgcccacaacctgtttgtgaaaatgtgtccatgtggtttgtagggagaatgtacttgcttgtgctaaacatttcgtaggggatggtggcacggacaagggggtcaatgaggggaacgccatttgctcctatgaggatttggaagcaatccatatgacaccttacccggattgtatagctcaaggggtggcaacagtaatggcgtcctactcta

SEQ ID NO: 3877 - DNA, 387 bp, Zea mays
tctaataattagcaggtatatttggatccactagctagtactagttttagctgctaatttttggtgaagagtgaaaacggacccaaataggccctaagtgtagtatacatgttttgtgcctacaaacttcatttttttttcatattgtataaaatattatttggtgtacatgtgtatacacgtctttcactgggttcgtcacctggttgcagttatgttccaggcttcctgcaacaagccttgatctctggcccatttctacacatagaagtaggaaagagggcataggatgttggcatgctgcagcttatctgagaagtgagaaccatcgtgattagatactaaccgatgaacatcgagctgggaagcaagggacagttgctaaag

SEQ ID NO: 3878 - DNA, 394 bp, Zea mays
caggaaagccggaagcttatcgagcaccttgttgccgaggagagccgggcaagggctggccctgaggccaaagtctggcggtcgggcagacacgaacggcatccagcaggatctgttggctgcgtgggtgccctcgtacggggacgggttgcgcgcggtgaagagatcgtcgagcgctccggagttccaggattcggacagcgtcagcctcgcctcggcgtggctgaagagcaagtggaacctgaaaccggattatgccttcaccctggcgctgttcgacggcatctccaagcctctcctggacagcatccccaagcctctcctcgacaacatccccaactcgatcgttgcttggagaaacaaggcggccagagattagcagcttcgtttcgtc

SEQ ID NO: 3879 - DNA, 300 bp, Zea mays
ggtttcctgctcatagtaaaaaaatcgcgttttcaagctcaaaaagcgatttcttccgatgtttgctgttgagcgctattttggaaaccccattttctcaattgatttttagtttttaaagaaaaaatagttcattttttctcttgtgaaatggagtcccaaactaaccctaatattaaaaaaaaaatcgcgttttggagctcaaaacgctcgttgttatgaccaaccagctttataggtttaaaaaggttgaatcttgacaatgcttttaaaaaggttgaatcttgacaattcttttga

SEQ ID NO: 3880 - DNA, 209 bp, Zea mays
atgatgctctccgacggcgccggcgccggcgccgcagccacgggccaccaccaatgaacccatctccacctttcgtcagcctagcgcttcccaccacgtccgttgccgatggagtggcggatcactccattcgtctctgcttcctttttctttttcaccccctcaaaaaaaaagatcagcgtccgtctctctaatgtaacgtacgtaat

SEQ ID NO: 3881 - DNA, 947 bp, Zea mays
  misc_feature (886)..(886): n is a, c, g, or t
gaaagcagagcaagccaaagaagaaaacaaacctagcaattcagaaggtggcccacttgccagggtacgatggttcagagttgtgcttgatgaagctcaaacaataaaaaattaccggactcaagtgtctagagcttgttgtggactgagggcacaaaggagatggtgcttatcaggaacacctatacaaaacaaaattgatgatctgtatagctatttctgtttcttgaagtatgaaccttactcaaaatttagtaatttcaaatatatgatcaagcaccaaattactagagattcagttcgtggctataagaaacttcaagctatcttgaggataattctactgcggcgcacaaaaggtaagtagttccaccataaataaataaaaaaaactcgaccggcgaggaaaaaccgtcctcccggtattatattatatattaagaagagaccgaaacatggtcctagccaagaaaactcttgaactatgccccctcactaacgggacgagtcaactggctactctgcaatggtccagccgaagggtgacgtacaaaatatcgatccccgagagcaaacctgagacctggaggtgctactcggaagcgtttaaccactacgctagaggccctttcgcaattccatcataatcataaatacatatatgtgtgcatattgttctgagctacactatgaaacctgcactggtgcatgctttattgcgcttgccaacaaaacttactaatcccccactcaatttggtatgcattgcaacctcgaaaactttgttcgggatctggatcctgttagtgtttcagtatattttttagaagggttcattgtggttcttaaatcttcaagctttttcagtatatgccgctgttgtcgnttcgttggttgtgatattgtcattgatgtactgtttaaccgttatccatacagaaacacta

SEQ ID NO: 3882 - DNA, 355 bp, Zea mays
agttctttctatctgaggctaaatgcagcagatgctaaccacggtttacaagaaactcaatcataaataaattagctaacaaatcaaatgaggtgcaactggcaacaacaaccgatcaagcggacgaagggagctgcgcaggatttacaccgatggagggttcgactccttggatttttcatcagacgacgcgcggctctccgaggtggactggcggagcccctcaatcatcctgatcacctcctccatcgtcgggcgccggtctggcgacttggccgtgcacaccatggctatctgcagcatttgtaccagctcctcctcgatgttctggtgcttcatcagctccacgtcaaac

SEQ ID NO: 3883 - DNA, 406 bp, Zea mays
  misc_feature (392)..(401): n is a, c, g, or t
ggcgagctgcccgtcatcgatgcagtcgtcgcctagccactcgggtctgctcacctttggcggggctggcggcgtgggcttccccgacgtgccggccgttgccagcggcatcattggcgtcggtccggtgtcgttgtccacggcatcgtccatggaggagctccagagcgctatcgagggcgccattgcgcactgcaagaacacgatgggcggaaccgtgtcggtcaaggcggcggcggcggccgccgacgagatctgcacgttctgagcgcgaccacgctaggattccggggggagctaagtaaagcaggctgttttaatcggtagcagtacttatctgttattagcaaatttaatttcgtccgtctcctttttttttttgggaaaaaccnnnnnnnnnnggggg

SEQ ID NO: 3884 - DNA, 538 bp, Zea mays
agaacaccttttccgggaagctgcggctgcacgaggaggacgaggagatcctcggggtgctgtccctcgtcttctggagcctgacgctcataccgctgctcaaatacatcatccttgttcttggagcagatgacgatggagaaggtatagtacgcacacatactcatgtctgtgtccagttcttctagctcattgttgttccttcaaactgtcttgagttcactggcaatgtgttgtgttgtgttgtgttgtgtaatgcaggtggcacatttgcgttgtactcgttgatgtgcaggcgctcaaggatgggcctcctgatgaacagtataaacaacgggtgtttatcggtgtacagccaggaggaggaacctcgcgaggaggagctgaagagtagtctggcgataaagtctttcatcgagaggcattactcgctccgtgtcctgctgctgctcttcgtcctgatgggtactagcatggttattggggatggcgtcttcaccccaactatgtcaggtaaacaaccttgggttctcgtgtt

SEQ ID NO: 3885 - DNA, 903 bp, Zea mays
caatatgtaaaggttacaggggtatgtataatggcgacaaaattgtttgatctgttcttattttcttcaatctgttgtctttattcatcttgtatgtcagttttatttcactgtcataaattacactaccctgaaacatgattatttgactttccattttcacttgacatgtgttgcatgttgtctctgtcaaatagttaccttttgttctctttacaacactatgtcaccagactgttgcattttgatttatgtcaccagactgttgcattttgatttatttttccaggtcaaatgaacatggtatacgaaaagcttttaatagccacaattcaacaacattattctttctgatttaggagaatatattcacttacaaaagacactttctcctataatttagataccctcaaagcatgcttcacttccaagcaacactttctcctataatttagaattgcaatgataagtgtttgaattcacaggttgttacctgtggaaatttcccccttgaatcctcgttccaaagggtcccgagatgtgtatacacttctactagcttgtatgagtacagaggttgggattccaaagctgccaatacagagcatcggcgttttacctggggcttacgctcaatggaggtgagtattttcatgacatggaatagtgaatacctacttttaaccttcctgggaacccaaactgcagttgttgttgaactttagcagaccttgacatctgatgttccttctgcatctatggcagcgccatgcggttgatttctatatctcagattttcagtccgggcttcgagcattggtgaaaacaggatatggtgcacgtgtgaccccgtatgtcgatgaatctgttgtaattgacatcaatccagacaacaaggatatg

SEQ ID NO: 3886 - DNA, 375 bp, Zea mays
tccgctcgtccgccgcttcaagaacggctcttcgtccgtacaagccccagacccactccaccaggcgcgtcctgccctggtcttcctgctcgggcaccacgggcggccggccgcaggcgatctcgaggagcacgacgccgaagctgtacacgtccgactccgggcccgcgcggccggcgacgaggcactccgggtccatgtaacccatggtgcccgcgaggtttgtcgtgtgcgatccacggccgtggtcgacaagcctggcgaggccgaagtcgcctagctttgcggcgaaggacgcgtcgagcatgatgttgctcggcttcacgtccctgtgcaccacgcactgctcccactcctggtgaagggtagaggaga

SEQ ID NO: 3887 - DNA, 664 bp, Zea mays
  misc_feature (548)..(556): n is a, c, g, or t
  misc_feature (559)..(560): n is a, c, g, or t
  misc_feature (575)..(660): n is a, c, g, or t
ccgactgcgacgacaatgcacaggtcggtgccggagtgcagaggctgctgtctgcctgtcgatccgagtctgacgatctcgagatgcagctcaaaggtcagcttgtcccctgttctgctggaatttatttcactccatttcgacgtcttaggtgtttctcctactgttgatataggcttctctctggttgagacaagggaatttggacgagtaatttatttaggttgaattacatgaaagggcattagctgtgtaaatgaagcaagccatatcatcatttacccactgatgactgatgaaatcctttcatttgcataggtggttttcatgagtaaacaagttagaagctagaccctcaaccctgtccaaacctgcaaatgtaagtaaagattcagctccaggaatacctgtcacttgggaagctgacattagacataaagtgtaaaggtagaatgtcatacaagcattatcaagtttcttctcccataccggcactgacgcactgtggcatgctccttttccaatagccagctaacctcttctgaaannnnnnnnngcnnttgaaaatccaactnnnnnnnnnnnnnnnnnnnnnnnnnnnnnnnnnnnnnnnnnnnnnnnnnnnnnnnnnnnnnnnnnnnnnnnnnnnnnnnnnnnnnnaact

SEQ ID NO: 3888 - DNA, 385 bp, Zea mays
ttccgttaaaaagacgggaccccctcccacgggcatccatactatcttgacaaaaatgaaaactgctgcttggtgcaagatccgtgtggtgtcgaagaatcgcagttcggcatcttctctgcggggaccgcgacagaaacgaggtcatcagaagagagaaataagttacacctaattgcggcagggcagggcagtggtggctggcatatattaagtggtggacaatcaagaacatgctctgcatgcttagcttaattatatcatacgtatataataacgccgttgggactcgttttctttgtcgcccggaaacagcatctgtttggtccaagattcttggcacgccattgcgatccaaccctgtcgtgctcaaacatactctctc

SEQ ID NO: 3889 - DNA, 432 bp, Zea mays
ctaccagtaccagctggggctgcggcggtcacgctcgctagctcgcggtactaccctcctccaccgtcgtcggcggctccagtgcagatggagccggttgcggtgtacccgccgccgttgccagagacgtcgtcctgcaacgtgtacccatcggtattgccggccagcgcgatgtcgtaccccccggtagaccttgctccagtgagctgctatccgccggcttcaacatggaacgatcggtgtttgtacggctgaagtcatcgttcgtggttttggttttgtgtatgatagattgttagtttaattgatttaccgttcgttccttcatggctcgtgctgtccgcccgcccgcctcggcgttttaggggagccggcgcgcggcgtgtatagtttactgttcttaagcctggaggtttccatctatctttgcat

SEQ ID NO: 3890 - DNA, 658 bp, Zea mays
tcgccagctgctggtgtactgcctgttcggcgtcctggcaggactcgtgggcggcctgctaggcatgggcggtggcttcattatggggccactcttcctggagctcggaatccctccacaggtagctaggtttgtcgatctgcgttgggcatctttgccctgggattgattaattatcgagatcgatgcaggcgtcggttcggtcaccaacttattagcttggcagagcaatcctcgtgcgtgcaggtgtctagtgctacagccacgttcacgatgatgttctcgtcgtccatgtcggtcgtggagtactacctgctgcaccgcttcccagtgccttatggtactagtacctaccaccatatgcatccgctattaatttcttggttccctcgctctctcgatcgatcgcctgaccggcctcgtagccatcatacatactaacatacatccgtggccgtcttggttttgatgattctgcagctgcttacttcacgggcgtggcgttcgtggccgccatcacggggcagcactgcgtgaggaagctgatcgcgtggctgggccgcgcgtcgctcatcatcttcatcctggcgtccatgatcttcgtcagcgcgcttacgctcggtacgtacgcgtacgtacagcatcgatcgatcgatcg

SEQ ID NO: 3891 - DNA, 340 bp, Zea mays
gaaacctagtacacagcaacgcctacatccacaagagcaaggcagaagagtgataagagcttgagataggagaacaggtatttctctgcacaagaccagattttatatatatgaatatagatatcaaataatatccctttttacatttgcacagaggggctgtatcaccatcttcccttctccctatatggaaccttgctgtctattcgacgaatgtacggcggcgaggagggcagcgccggccccagacccatccactgtcaccttcagtgtcaccgtccgcgccacctcctcccccaagatctccaccagggcttcatctaggtactccctgaactcc

SEQ ID NO: 3892 - DNA, 341 bp, Zea mays
ggaggagaaggtacatccgcagatggaccaaatcgccaaaaaacttgaagagctgatcgaccagataaaagctatcggatatgttccaaactttgcagtggtcctacatgatattgatgatgaacgaaaagaggagcaccttatgtatcatagtgagaaattggctctagcctttggccttattcacacacctaagggagcaactatccatatcatgaaaaacctcaggatatgcgatgattgccatgttgctatcaaactcatatcagttgttactagcagaaaaatagttgtaagagatgctgttcgatttcattgtatagaaggtggcatttgctcat

SEQ ID NO: 3893 - DNA, 402 bp, Zea mays
cttcaatgactgggctcttcggttggcgactcttgccagcttggcctgcaccctagtcctcatgctcttggccgacacccgccggcacaacaagtaccccttgcttgtgttgttagtttgggcggcgtaccaggtgcagccacaggtcgggggctacgccctcacccacctcaccatcagcagcgcaacaacaacaacaaccacgacgacctcatcagcgcgcgagcagcagctagtggcgttctgggcgccactcctcctgctccatctggcaggaccggacaacatcgtcgccttcaccctggaggacggcaaactctcctggcgcaagctcctcgacgccatatggaaaataatacaggccctgtatgtcatgctcaagctcatatacctttgcgacag

SEQ ID NO: 3894 - DNA, 578 bp, Zea mays
ataattgggaactcatgttctactggtatttgtcattgaacagaagatgatgagctcataacaaacatgctggagacccttgtcaatttagcacctgtgctggacctgaggatcttcagctcatcgaagccttcgttcattaaaatgacgtaagatatgacgctagaatttcattattctctcccagttcattcctattttgaggtttactcattttctgctctttgccaagatagcgagaaaggtgcaattcatgccataatgggtatgctttcttcttccgtaaagccatggcactgtgctgctgctgaattgattggccgtctgataataaatccagacaacgagccatttcttcttcctatcattccacaagtaaatgtttttttttggaattcgatcactcgaataaaggtatctgtttctcagatcttttagtgtcatacttacgttggtttacttgatgcagatatacaaacgactcgttgacctattgagtgtaccagcatatgatgcacaggctgctgctgttagtgcactctacaatgtagccgaagtgaatatggattgcaggctca

SEQ ID NO: 3895 - DNA, 395 bp, Zea mays
tgatggattagtcagtctgttttcgcaatttggggatattgttatggctaaggtgatcaaggatcgaaacaccggacagagcaaaggatatggatttgtcaagtattcagacgtgtcagaggccaatgcagcgattgctgcaatgaacggtcaccatcttgaaggtagagttattgcagttagagttgctggaaagccaccacagccggcaccagcagtgtcagcacccccatcgtatcctcctacggatcctacttcaggtggatattcctcccaatcctacatgggggtaccaccaccacctcctccagggagttacgctccagttccttggggacagccaccaccgtatgcttcatatcctccgccaccaccaggctctagtgtctacaaaa

SEQ ID NO: 3896 - DNA, 588 bp, Zea mays
aatacaatgcagcaaatggacaaacacacccatggcaagggacgagacaagccgccgacctgcggcaagaaacaggtgaacatcgatgctgccaaatgctttcctactcgaattcaagtacgactgctcatgctgacctctgtgctttcaccatctatatgttcagaagaaacaaagcgcccagattgctgtaacggctcagcagctcggtgagcccaccaggccggccttcaacaacggcatccagcgcaaagctgtggaaccggagagagtttgtagtgctgcatcgtcaacacgaacaaccaaaccagcaaggtttgcaggacttctttgctgaactcctcacactggcggctaacactccgttgtaccgctggcagacctgacatacacatttctcttcactttccgtttgcgcagaggccttccggcaccaccaccaccttcccggactgggaaggagaggaaggccgccgtgaagctgtcgtcgaggttccaaacagcagccgcttgagctcgtgcagaactagggcgctccaactgttgttttgtcgtctgtctgctccaaccgcgagttctgtatttacg

SEQ ID NO: 3897 - DNA, 588 bp, Zea mays
  misc_feature (52)..(52): n is a, c, g, or t
  misc_feature (54)..(55): n is a, c, g, or t
  misc_feature (64)..(65): n is a, c, g, or t
  misc_feature (80)..(86): n is a, c, g, or t
  misc_feature (98)..(98): n is a, c, g, or t
  misc_feature (102)..(102): n is a, c, g, or t
  misc_feature (124)..(124): n is a, c, g, or t
  misc_feature (135)..(135): n is a, c, g, or t
  misc_feature (140)..(141): n is a, c, g, or t
  misc_feature (143)..(143): n is a, c, g, or t
  misc_feature (149)..(149): n is a, c, g, or t
  misc_feature (159)..(160): n is a, c, g, or t
  misc_feature (276)..(276): n is a, c, g, or t
  misc_feature (280)..(280): n is a, c, g, or t
  misc_feature (285)..(285): n is a, c, g, or t
  misc_feature (302)..(302): n is a, c, g, or t
  misc_feature (321)..(321): n is a, c, g, or t
  misc_feature (327)..(327): n is a, c, g, or t
  misc_feature (339)..(339): n is a, c, g, or t
  misc_feature (341)..(361): n is a, c, g, or t
  misc_feature (381)..(381): n is a, c, g, or t
  misc_feature (389)..(389): n is a, c, g, or t
  misc_feature (392)..(392): n is a, c, g, or t
  misc_feature (409)..(410): n is a, c, g, or t
  misc_feature (421)..(421): n is a, c, g, or t
  misc_feature (442)..(444): n is a, c, g, or t
  misc_feature (463)..(465): n is a, c, g, or t
  misc_feature (472)..(472): n is a, c, g, or t
  misc_feature (488)..(490): n is a, c, g, or t
  misc_feature (516)..(516): n is a, c, g, or t
  misc_feature (519)..(519): n is a, c, g, or t
  misc_feature (528)..(528): n is a, c, g, or t
  misc_feature (533)..(533): n is a, c, g, or t
  misc_feature (535)..(538): n is a, c, g, or t
  misc_feature (548)..(548): n is a, c, g, or t
aatacaatgcagcaaatggacaaacacacccatggcaagggacgagacaagncnncgacctgcnncaagaaacaggtgannnnnnntgctgccaaatncttncctactcgaattcaagtacgantgctcatgctnacctnngngctttnaccatctatnngttcagaagaaacaaagcgcccagattgctgtaacggctcagcagctcggtgagcccaccaggccggccttcaacaacggcatccagcgcaaagctgtggaaccggagagagtttntagngctgnatcgtcaacacgaacanccaaaccagcaaggtttgnaggacntctttgctgaantnnnnnnnnnnnnnnnnnnnnntccgttgtaccgctggcagncctgacanacncatttctcttcactttnngtttgcgcagnggccttccggcaccaccaccnnnttcccggactgggaaggannngaaggcngccgtgaagctgtcgnnnaggttccaaacagcagccgcttgagntcntgcagaacnagggngnnnnaactgttgtnttgtcgtctgtctgctccaaccgcgagttctgtatttacg

SEQ ID NO: 3898 - DNA, 404 bp, Zea mays
ttataggtggcgacacacttcgtccttcccgggccaccagccggctcagctcagatcagatcgagagagatcaaatatcttcgaccatggccgctgctctggccgaatcaaacgccggggatgatagtggctcctccggccgccggccggcgcgcgcggcgctgatataagcgagagctcgaagccgcacgcccgaattcgtccggctagctcagcccggagagcgagggagggctggggctcgatcgttatcagggggatggaataatggtgatgtggatcgacgaccggacggcgctggatcggtgctgcggtgtgagccctagaaagctgtagtgttagctggagaagggaagggaagatgagatgagagggagcaaagcaaagagaagaaaggaaaggga

SEQ ID NO: 3899 - DNA, 586 bp, Zea mays
ggtggtcgtactggacacttaagaatgacatgatccattgggacttcgagtggaatattaagaataagtacctattattcagtaagtacactggccatgctaaaccatgcctgtatttcgtctattacgtcattgatcttacaactcggaagccaaaagccatgactattgttaaattgtgttttctggtactaccctgtcataacaagtaactgatgattccatgtatgcataaaggagatattgtaaaataatcttttttttaattctgtggacatttttggacagatactgagcctgttttggatctcacaaattctcaccataatatgcatcttctgtctaggtggttcatccatgttgaagacaccaagcttcctgctggtgctagcgttaggatggggaattcacctgatcgtcatgccaagataacctggattctaggaactaagctgattggaagtgtggatgtacacatagactactcaaatccgaattatagttgaggcaaaattggtgcatatatctttcttatataaagtcatgtagttgctcttaggtttctccagtttttttatgaaaaaaa

SEQ ID NO: 3900 - DNA, 388 bp, Zea mays
ttgcttatatatatagcatgaactcgtgcatcccattcccagcaactaagcctaaccatctgctccaccacttctgttccttgtataccttagtcaacaatgcacacacttgccatagcagctctgcacctgttgcagcttctagcaacaataccaacactatcctcacaagacacagaggcaattctcggttgcacctccagatgccacaacataagcataccttaccccttcggtatcggcgatgagcgatgctacttacatgaggggttcaagctcgcgtgcaagacggaagaacagcctccggtgctgtacatgaacagcgctggatatcgagttgtgagcattaagctgaaccctagggtcgtgtacctcgacactcgtttcc

SEQ ID NO: 3901 - DNA, 399 bp, Zea mays
ggagtgaaggcaacgactactcctacgcctactacaccggctgcatgtgcttctgcaacaactctgcgagcgccgtggacggcgtctgctccggcgtcgggtgctgccatgtcgacttcccgtccggcctcaccaacaacaacatgaacttcagatcgtacacccataagaataggctggacttcagcccttgcgactacgccttcttcgtagacaagaactacacctttcacaccacagacctcaagatggatcgcaacaggacgatgccggtgtggctggactgggccatcagggacaaccagacccagacgtgcgaggaggccaagaaggggcaggggcacaactatgcctgcgtcagctccaacagtgactgttacaactctaccaatggacctg

SEQ ID NO: 3902 - DNA, 470 bp, Zea mays
ctgtaattctattaaacaaggttttccctctgtcttcaaattggatttgctaactgtttatttctgtacaatgaagatcgtgaggtgacgcaatcaacagtaaagaggaaggcaccaacaagtcaacctgcacgcttgtcaaatggatatggacctaagaacacaatgtcaactcaaaggcatgctgaaggtaaggtaaattccatgagaagggaggatttctcgaatacagaaagagttgtttcacgtgacaatgagaggatgtatgaaagggttgtttcacgtgataatgagaggatgcatagtattgcaagaaatggatccaaccaggcaagtactagcaaaaccacaatccaaaagcatccaagcaggggtcccattgttaataagcaaccttccaaggattcgaatgatgcaactctgaggaagagcagtgtagcctcaaagcaccatcccttagagattgacag

SEQ ID NO: 3903 - DNA, 352 bp, Zea mays
gaggcccagagggtcctctcggagatggtcgccgacggcatggccccctgcgccgtgacctaccacacgctcgtcgggggttactccagcctggagatgttcagcgaggccagggaggtcatcggctacatggtccagcacggcctcaagcctatggagctgacctacaggagagtcgtcgagagctactgcagagcgaagcggttcgaggaggctcgcggcttcctgtccgaggtctcggagaccgacctggattttgacaagaaggcgctcgaagcctatatagaggatgcgcagtttggaaggtagagagagggagagtggctgtgctaagaggtgggcttaggtacag

SEQ ID NO: 3904 - DNA, 800 bp, Zea mays
  misc_feature (65)..(65): n is a, c, g, or t
gaacaaaggaagttgtagaatgaacaaaaagaatcaggtgcccaatctcacgctggcggtgttgnagactgttgttttgcagtctgggagaatacttatggaccagggaggtagatcataatgcattccattgaatgataccctagcataagatactttatccttgttctcaaggaaggccacacaggcatcggtgcttgatctaaaaacagatgcctaaagaggaaattaccaagtcagtcatgtataaaacattattgtgttcaagagcagaagagtgaactttaatgctgtactaattaacaacctgctgagcattgccaagtgaagttacaattgggtctcctgcaaccaatgctggttcacaaagcttgatagctttatgcaactccttcaagtgaccccatttcggttctctcagcaaacctgaggaagtgaaggggaggaactcagtcaacttgatcaacataagggattatttaattatgaaaggattgaaatataaccagttcccattacgtaccaaatgccccaatgtattccgtcaaagtaatgaaattgtgctagatgcatttgcttttgattgcaaaaacatttttttttcatgaacatgccttggcatgtgtttcatttagaatagaattagcgcaggttacaaaccaccaaaacagtggtagacaacccaaagtaacctagaacactaagaaaaagttggggagggggtcatcaaccaagacgcccaaaaaatatgctaagcatgtgaaaaaaaaataaaaagacatgaagaatccaaccggaga

SEQ ID NO: 3905 - DNA, 991 bp, Zea mays
tcgtcatcgatcgtcgctcagctagtatatatgacgagcaggacgacaggcggcgcatggtcgatggaggcggtgacgctgccggcgagcatggtgctggtgcaggtcttcaccatggtcgccgtgctcctctccaagctggcgctgaacgtggggatggagcccttcgtcctcctcgcctaccgcaacctcatcggcgccatcatcgtcgctcccttggccttctactttgacaggtatatataatgcctccgctgatcaacccgtgcatggggattgtttaattggtttggaaaatcacgaatccattccacaaatttggtgaaatgaaattattactagttatatttagtttatgaggaatgaaatgctgatgaaagtcgatggatcgtggacgaccgacacaagcaaagcaaggggtcacgtagtgtttgcttgctttccagctgctgctgtcgtccttcctttgcctgcctgccttgtcttgacaagtcaagcatgcagagattgcaaaagaaatgcttgcttagaagaacacgcatgcatcatctatgcttgcttgcttgctagagactgctcgcgagtgccgtgtagctagcgtcatcgatcgatcagttagttagctaggcagctagtagttccttgctgggattagcacgacaagtgttagacagacatgagaggacatgtcttctttgctccaaataaatgcatgttgttaatatctcattattatatctcaggtgtcgtgttctgttacatgcagacaccaacactttcacctgcaatgcatgcttttgcttccaaactcctccctagctatgcatgtgtcttgtttatttgcatggtatatatataatatatggctctgttaattaatttcacatatacaacaaatggattaatgcatgcacgcatgcacatgcacgtacgtgcagggcgatggtgcgaaaggtgaccctcaaggcctttgggtggatgtccatcagcg

SEQ ID NO: 3906 - DNA, 410 bp, Zea mays
acaacccgcttcttcatgccttctgcaaacaaaagaagatacataaagcaatggaatttgtggaactaatggtgtccaggggttgttacccagacatcgtttcatacaacactctacttacagcactctgccgcaatggggaagttgatgttgctattgaattgcttcatcaactcaaggacaaaggctgtagcccggtcttgattagttataacacggtcattgatggccttactaaggctggcaaaacaaaggaagcgttagaactgttggatgagatgaccagtaaagggctccaaccagatatcattacttattcgacaatagcttctggtctttgtagagaagacaggattgaggaggcggttagaacattttgtaaagtgcaagatatgggtataaggcccact

SEQ ID NO: 3907 - DNA, 327 bp, Zea mays
  misc_feature (250)..(251): n is a, c, g, or t
  misc_feature (314)..(324): n is a, c, g, or t
tccatgcagtgaggcaggaacccggggagactctccgggctttcatctcccgcttcaccaaggtacgagggactatacctcgcgtctccgatgcttccatcatcactgctttccgacagggggtgcgtgatgagaagatgttggagaagttggccacgcatgacgtggaaactgtcaccacgctcttcgctctggccgacaaatgtgccagagctgccgagggccgtgcatggcactcggcaccatagannggagttacccagatgggtggctcaggtgccgtcacccagggcggcaacaacaacaacaagaannnnnnnnnnnact

SEQ ID NO: 3908 - DNA, 296 bp, Zea mays
agatgaatttcctaaaacgctagcgtttcatacccccgagggtgtctaacagaaacgctagcagattgaatgaaagtatacagtcaccacaacaatgacacgatggcaaggtctagccaccagtgtcacaaatattggtgactattatcaccaaacacaagctgaggactctctttcaatccctgctacatactgaaagacggatacaaaaagtgaaaaaaaaactaagagttggaatgaagctcaagagggattttcagccctactgcctggccaaccacggataaccatgccgg

SEQ ID NO: 3909 - DNA, 423 bp, Zea mays
  misc_feature (318)..(318): n is a, c, g, or t
  misc_feature (345)..(345): n is a, c, g, or t
  misc_feature (374)..(374): n is a, c, g, or t
  misc_feature (409)..(409): n is a, c, g, or t
ctactcgtgtccttggaaccttcggatatcatgctccagagtaattatttgacatacatatgcacttcgctcatactttgcataatgtatctaggattatgcccccacataattatcatttatttaattttatcctcatcacaatgaaacatgctaataatcttttcactattttgcacgagatgaatgttttggaattttatctttgttcctcatctgatcagtgacataagagatctattatacatttcaggtatgctatgactggccaactgactcaaaaaagtgatgtatatagttttggggttgtccttttanagcttcttactggaaggaaacctgtanatcatacaatgccaaggggccagcagagncttgttacttgggtatgatttaaaattttcatacnaccattctcaatga

SEQ ID NO: 3910 - DNA, 378 bp, Zea mays
gtgaagtttaacataacagatgtgaaactgttatttgaataatccaagacttgttcataattgctttccattgtcaacatgttcggaatcgggatttgaccctggattctgttggaactcaaatcaagaaattccaaatgactattagggagaatatatgaagtgagctgcaaatttgtgaatgcgttgtttgaaagattcaaattcctaaggctatggtcccatgtgtgccatatccaatttggaatagtcccaaatatcttgttgcaagaaaggtccaatatagtgatatgatcaaggtgtaccaagaaactaggaatttcagttaagccacatgatttcagatctaattcagtgagctttggtaataaccggaat

SEQ ID NO: 3911 - DNA, 379 bp, Zea mays
acgtcatccggcggtcggggaagaaggccctcatcatcgcggtggcggggatggcgctgccgttctgcatcggcaccgccacgtccttcatcttccggcaccaggtgtccaagaacgtgcaccaggcctccttcctcctcttcctgggcgtcgcgctctccgtgaccgcgttcccggtgctggcccgcatcctcgccgagatcaagctgctcaactccgacctcggccgcatcgccatgtccgccgccatcgtcaacgacatgtgcgcgtggatcctgctcgcgctcgccatcgccatctccgaggtcaacagctccgccttctcctccctgtgggtgctcctctccggggtcctcttcgtgctcgcctgcttctacgt

SEQ ID NO: 3912 - DNA, 359 bp, Zea mays
tgagcgacgcgtagaggctggcctctcgtgcggttgcttcagttccagcattgccacaaagcaggaggttcaaaactccggtatccggcaaggggcgtatggtgcggcgatagactctgtctacacgagggatgccttccatggcaaaacatttcttgactacatctcagcactaggaaagaagccactagccggtgctgatcttcttgacctagccaccgccaaagcacagttgagggcattcaatcgttcaaggggttcaagggaccttcctgagtttgtgatgtttgagggcattgcggagattacagagatgacacacacaaagggagaaaggatgcacaagagtgaggatgatg

SEQ ID NO: 3913 - DNA, 402 bp, Zea mays
gctccggcaggactcgctgtaccgcgacgcgacgaggccagcccacggcgcccaccaccacggagggcaggagagctgggtgcggacgctgcggctggcgttccagtgcgtggggatcatgtacgccgacctcggcacgtcgccgctctacgtgtacgccaacaccttcaagtacggcgtccaccacgaggacgacgtcctcggcgtcctgtccatcatcatctacagcttcgccctcttcaccatggtcaagatcgtcttcatcgcgctctacgccaacgacgagggtgacggtgcgcgcgacgacactgacctactagcaagctactagctactgcattcaccatgcatgcgtgatcttagcttgttgtcaagagactgacgacgacgcgggtattggtt

SEQ ID NO: 3914 - DNA, 389 bp, Zea mays
tcggatgcgtcttggcttggggaaagaggaaaggatgttggccacgggattcttgacggacgggcggattcgatgtggatgcgcgcgtccaccggcctgcattttttttgcattttgaccctttctcggaaaaaaatcacgtttagaccctaaaaaattttaatgtcatttttgtaccctttgctcggcgccataggctatggcgccgaggtaacacagctcggcgccataagctatgacgccgaggtacgtgctgcgctggcataactcggacgtcgtggcgccgacttggcaccaagctcggcgccatagattttggcgccgagctcaattataaccacaaaactcgtctagcttagttgatagatagtaagactcataacctgggg

SEQ ID NO: 3915 - DNA, 409 bp, Zea mays
tgtggaggcacagactcaggtgtccgacgaggtcaaggagttgtccgaggagctgatggcctacgagaactacatgaacttcctcggcatcccttacatggagggagggactacagctgcaagtgccaccacagctgccgcctccgccgccgccgccgccgccgtcgccgaagaatcgcaggtcccggctccggccgggctgtggagcttcgaagattactactacccgccgtctctgtcgctctttactgaatgatgaacgtgctttgaccgtgcctgttttggtaacacctttgtgaacagatttcctgctcgtcgtagtcggtgtgatgtgatggcatcaatcgagctcctgtcctgtaattttgttgaacccatccattgtttcgtgactactgtgtgtccctgt

SEQ ID NO: 3916 - DNA, 340 bp, Zea mays
gttcgatccggatgtttgtgcattgcgacgaacgcaaagccagcttacataaagtctttaccaaaatccaatatacacaggtaaaaaaaagcctgaaaagaaaaataagttctactgcttgcacacttcctcggccccacatggaagaaaagatttttcagcctttctctagtgccatcaatgctcgctcacggttcacacactcgtccaccagaccaccacgttgcgacttgcgagcctgtgcagctgcgtttgcgcatctggtttcttctgggtcatctatatacttctctcctagcaggaacaggaacagcaagccactcgctcctgccggcgagac

SEQ ID NO: 3917 - DNA, 340 bp, Zea mays
  misc_feature (90)..(90): n is a, c, g, or t
  misc_feature (97)..(97): n is a, c, g, or t
  misc_feature (143)..(143): n is a, c, g, or t
  misc_feature (152)..(152): n is a, c, g, or t
  misc_feature (214)..(221): n is a, c, g, or t
gttcgatccggatgtttgtgcattgcgacgaacgcaaagccagcttacataaagtctttaccaaaatccaatatacacaggtaaaaaaangcctganaagaaaaataagttctactgcttgcacacttcctcggccccacatngaagaaaanatttttcagcctttctctagtgccatcaatgctcgctcacggttcacacactcgtccaccannnnnnnncgttgcgacttgcgagcctgtgcagctgcgtttgcgcatctggtttcttctgggtcatctatatacttctctcctagcaggaacaggaacagcaagccactcgctcctgccggcgagac

SEQ ID NO: 3918 - DNA, 372 bp, Zea mays
tttgcgttttttggaacctcgtgtaacacgtttcacctttgatgtgttctccttgtcttcataatccaatggtgttgcaacatcaactatatccacatatttcacaggtgctgccatgtctgcacctagacacataggactatttccaacaatgtcatgtgaagaacaagaatccttgggggccataacaggcagctgatccaaattttcctcaataaccggagtagtacttgcttcaataatttctgttgtatcagttggtttattatcagcgtcaacagataatacttcctcttttcgtcgaacagatttcccaggaacctgttttggttttagaccaattttcctttttatggttgatgttggtgactt

SEQ ID NO: 3919 - DNA, 821 bp, Zea mays
ggttttatgtcatagacatgaactactttcctggtatgcaatctgacattcttgagcttgcacaagctatcttttgtttcggtaaagctgacccctacatgtacattttagaattattgatcaaagaatctcctgtttaatcctgttctactatagctaagtctttaaattaattcgcagtgcattgctgacactaatatgaaataccaaattggagagacactgcgaatagaggtagtttatctcccgtgtcatcatgactaatgatgatatcaggtatactgcttgatggatgtactgaacgaacgagatgcctgtgctgtgacacttgttccactctgtcggttttattgtttttaaaaacagtttgggagtccaaagagtggctagaacctggcacgccgaagttatcccagctcagcctgtattcttgtgggtagattctttgatttgacaatgctattagccataaacccataacttctcggcccccttttctacttatgctgccttttttcctgaccaaacttttgttggtcgcagggtacggcaaaatgcctggatacgagcacgtgttcaccgacttcctgctgagccttgccaagaaagagtacaagagacgacaaagctatagctcgctaagctcaggcgaatggtgataagcgaggagactactcggcggggcatgtatatgtctatcatccacgatgcgtgcgtacagatgtacttgtgcatgacgagagataatgggtcgtagaagcggagggctgttgtcaggctataactaactgttgctttacatgtgctaactgttgatgctt

SEQ ID NO: 3920 - DNA, 427 bp, Zea mays
  misc_feature (414)..(414): n is a, c, g, or t
ggacctcgccttcagggaggaaatgtttgaaaggcgggataagttgctggccgagcatgagctcgaggcggaggagaaggagaaaaagctggaagagcggatccggcagttccaggcggcgcaggctacaccgggcccccaggcggtggaggcgacgaagaaagcacttgaagatctccaggcggagcatcgcgccggggtccagcgcatcgctgcatgggccggcgaggcgagcacgacgctggtgccgctagggatgagtcccatcctggtgttagagctaccgacgtccatctccgacgtgctcccggtgttggactctaccgcggaccgcctccgacgcctagaccagattcttggtgcccgcctagaggctgaaggcggcaggctctgccaggcggtgatcgagtacancctgacgtgcttc

SEQ ID NO: 3921 - DNA, 364 bp, Zea mays
cctgctgctctagcactgactcggagcagaataatttcaaagccatcgtgttcgagttcatgccgaaccagagccttgacaagtggctacatgaccttgatcctgattcagatgcgtccggacgtgtaccaggcctgacgctactgcagagattgaacattgctgtcaatgtcgccgacgctatggactatttgcataacaactgcgagcccccaatagtccactgcgacctgaagccgggcaacgttcttcttaacgcggactttgttgcctgtgttggagacttcggcattgcaaagattctttcagattcagatggtgatcctgtgaccaattcgagtaccttcaccggaataagaggaac

SEQ ID NO: 3922 - DNA, 1171 bp, Zea mays
cagaatctcaggccttccacgatactgattctggaaatacagcgagaaaaaatgtcatataggcaaacaagtatttgtgagcccaatgaggaattatcaaatcaaaattcaaaataaatgttctttcagtagaaaagcatcagttatttggattatttggatgcccacaaacagaagcattgaacacaggaacattaacaattcacacaaaaccaagaacgaattcagaataaccttacacatgtttgatcaactccagtaaaaaaatgatattttgaacaaagttgacttgaaaactaaattgatacctcctttctttttatattgcttccatttatcacaaaaacctgcatgcactgactattctatcatatgtctccagtgtactggaattggggtagcttggtaattcttcttccctcattcacttgatttcataccattaactattgttcccgttcctactaatacaccctataattttaaccgagggagaaatattccagaacatcacttaaaattggctggatggagcatttgctattaataaatcagattaaatgaggaaggacagttggactatataaaaaggacagacccagtactggcagctcccatgagtggaatctggggaagaaataaccgaggtaaaccttacccccgcatttttttagagaggctgggtcaaacacaggaccttgggctcaccgggaaggcatctcaccaatacgccaggcagttgaactatataataaaataaattaactgaagagatacatacagtttcactttgattttgaaatgcagcagcagcttgaggtctccattgaaccccagaaacaactggaggagaaaatactcttccaccaagaatagggttttcatttgtgttagcagaatcagagccgattgcatcattagtcctgggaacctgctggggttgaactttactaccaagaggcataaccaactgctgagaaagaccaccactgttaatcttctcgtcagtgttcaatatatttattttggacaagtcatttattgcaggaagtgcactaaccgatacatttcctgagactggaccaatagttatgggagctgtacctaatgcctgactagttgttcctcgagttatgcccctgccaattccaatttcagtaatagcaggaga

SEQ ID NO: 3923 - DNA, 375 bp, Zea mays
gtttctcaacttcttccgagctctttcaggtggaatcttccattgagctgggtactgcagaagtgaaccctgtaccatctgaaaagttatctgctaactcacaagctgttagagatgatgctggagcagttgaaggtattgacatgaatggaaaacctgtccaaaaacctaagaggaaaaaacataggccaaaggtcattaaagaaggacaatcagcaaagttgcagaagcctaaaactccaaagcctcccaaagaaaatgggaatcagcctactggaaagagaaagtatgtcaggaagaagggactaagcacaccagccaaacaaattccatcagaaggtgctgatacacacactagagctaaaccaggaatag

SEQ ID NO: 3924 - DNA, 490 bp, Zea mays
ttcaattagcttctgagccttcgcaacatatctttccaaagtggttagtagttttttccaattcttgttcattacaaactcatcacaataacgtatcatagcttcattgtcctaaataagggaacaattggataaataagaatcaagacaattggagcgagggtggtctatgtcttagtgtagctaaaactcaagagtttcgaatgtgtggacttatcatgagctgaaatattagcatttcacgtttatctataagtaagcatatcattttttatttattagagaatcagccaagaagatatagcttcaaataaacagtaatcttggtcaaagaagtttagtgtaggatcacaatatgagaacaaagcagtagacacacctttgcagaaaaacttcgagaaaaaagatccttgaactccatataaagaggaaaacatatcgatcgagcatctgtaggcttaaatcccccaaggagatcagaaatgtcact

SEQ ID NO: 3925 - DNA, 424 bp, Zea mays
tgccgtgtcctgaactatcgttggcctctgccttatcacttccagcagcttgtagccggcaatcttccctttgctgaacgctccaaggttcgaaaacgactgccccaggctcctgcgatcaacgagttggtttacattggttcatgctgcgaaagcagaaaaggcagtttttttttgggtactgacaggccaccgacgattgctgagaaaatcgcagtgaaggccttcccaccgtctgtctggccgttccgtatgaacacgccggcgtaccagaacaccagcgcccatgacatacaggcgattccataggtgcagccgatgccaagccccttggccatcccggccttgtaacccagcttcagggtgttctgaatcgcctccgagtaggaattcagggccttggtctcacccacataggagtaga

SEQ ID NO: 3926 - DNA, 581 bp, Zea mays
atcctcgtgatgccattcgtgggggtcacttccacgacgctctcgacaccttgctgcgtcgggccttcgaccgacacacttggtctatcgagtaccgttgtgtagtctaccaacaccgtcgtgagttatacccggaccagtgtgaggctacttgcttggtgcgccgtttggacgatgatctccgaggtgcagaggccttctcaaagcactattctattattgagagggatactaccgaggcagccatgcaagttgcagcacgacggacactttctcagtattgctcgttgttcagcggggtagctgatggccttgacctgaagtactaccctcgtcgttcgaccgacaatggtggaggtgtgattgtcttgcctattggtgagggcaatcccaggctgaacaatatggtcaacctggtcaccgtgctcaacacagagttggaccacacccttgacgagttgggcaaggttcgggcggaggttgcggaattgcatgctgaatgcgcggcacaccactatcttgaaggtggttctcccgcccctatcgggattcagcacccttaccgttcaccgccccgtggt

SEQ ID NO: 3927 - DNA, 850 bp, Zea mays
aataacaaaagcaaatgaagagtccttaacgaggaaagatatcatggagagagtggataaatggctatcagcttgtgatgaagagacttggcttgaggaatataaccaagtaggattcttttctttgttaaaagattatatttcaaatatggtttcagccttttcctttattgccatgttagtattgagcattcatattgcctaacagcatataatgtgcttgtcggctataatttatattgttaatgacatattaaatgtttacttggatccttctgcaggatgataataggtatagtgctggcaggggtgcccacttgaatcttaagcgtgcagagaaggcaaggataactgtccaaaagattccaagtgagtcttcatttccccagacgctaacaatatcaacttcagttgagcatgctggtgctacttagtcagtgccaatgcgatccaaatctagcaaattgacgtataacattattggtgccaattagctgatgcacttctaactcaacctgcttgccttttgcgatataaacttttttttgcagctatgattgacagcttgatagccaaaacttttgcatgggaggatgaaagaaatgtgccatttttatatgatggggtaagtcgcagagcgaattggccatattaatcacaaatcaggctgaatatttctgttctatatataacgaggaatattgaatttgcatgtgaaggttcgtttggttgccattttggaagagcaaaaactcagaagggcacaaagggaggaagagaagagacgcagccgggtatagattaatacccatacttttttttgggtactgcagcctcaagaaaagagctc

SEQ ID NO: 3928 - DNA, 357 bp, Zea mays
  misc_feature (351)..(351): n is a, c, g, or t
gagcctgcggcagctgacatgcccgatgaccacagacgtagctggggagggagcctcggcaggtcatgaagggaagaaaaacaaggacaaggccgagtagaggagctggccatggcgcgactgccaggacaagcgcagaggaaactccgaccggccgccggaaagaagaggccgccggggcgaagctccatggtcaggagctgggggcgaactcgagcaggcaggggagagcgagcgcagcagcgagcgagtaccagggcacgcagagaagggaccagggagagggagagctcggctgggactagcatggaggcggggacgccatggagcccggggcacagacgaaatccnagcagg

SEQ ID NO: 3929 - DNA, 331 bp, Zea mays
  misc_feature (222)..(222): n is a, c, g, or t
gcattgcacacgtggatgcatatatggtagagccattggcagagaacaatgttttctctgaaacaaggtatgaaatggaggctccacaaaatggagctgaaactgctgttgttgatctttacagagatgcagaagagcaaccattgacagagaataatgattgctccgaagcagagaatgagatgaacaagagtgagtttgaaactggtgttggcaatcttnatagagatgaacaagagcaactattggcagagaataataatggctctgaagtaaggtatgacatggaggctccacaaagtgaggttgaaactggtgttggcagtcttaa

SEQ ID NO: 3930 - DNA, 350 bp, Zea mays
agtcgccaaaactgctgcagcataaataaaataaccaaaacatcatttaatctagtgtgatctctgttacgtaaagtacagcaattaaacagaccaacaagcaaaccatgcgatggcgcttctggtgctgctgatgacttccgtcattcacatcgcatgccataatgtgacatgatactcttctcactgtcaaattgctggacctttgcgaccagactataaatgctataagttaccacttgctaacatgtgtgtactttgggagtgtattcgtgaatctgtcgtactcctttggccctttcctccgtttgctgcttcccgcttcccgcttggatgatctatcctttctg

SEQ ID NO: 3931 - DNA, 238 bp, Zea mays
cacgacctcaagattgactaataaggtcttctggttaatttttttttggctgattcgttattaggttgttgtatacgaggtgttcttggatttgtgccctatgcagcattgcaccatctatcattagtcagacattcatcagagtacataagagagtagtcactggacggtggaactgtggtccaaaagttgtttacttcagaatgtttttttcccattgtgagatattctttcagtc

SEQ ID NO: 3932 - DNA, 362 bp, Zea mays
cagaaacctaaaatgattcaccagttaaaagacatggattgagaggaatgatataatataagagtagagttatgcattcacttatatcatgctgctctacaacaacctgtcacatcatttattcaagcgtagaacaccttatcaagcgtggctttatgaccagcagcatttatacaccatactactacaaatacactgatatggttggcatgcaaagtattatgtagaaactgataaaacattatcttatatcgtagaggcataagtgactactcgtatataccatagactcactagaacatattcttgaaatagaccatatcggtgggaagccttcaaggtgaatcccatgctgttacttg

SEQ ID NO: 3933 - DNA, 741 bp, Zea mays
  misc_feature (734)..(738): n is a, c, g, or t
cctgcatgatccgtaagaaagccaacaaccaacagaggctggctgctcttgcatgacatggcatggcatggcatggcattgcattgcattgcattgcattgcattgcattgcattgcatctgaatcaatgaatgcatatatatgcagcttgccctctgggtgcctactgtccacggtccagcctgaatacctccacaggcatctgtgacccgtaagtccactccactccgctccagccatatccgccggcccgcccaatgatatatgcatcgccattgcagctacaactaccagccgccgcccgggaaccctaaccacacctgcggagccgccgacatctgggccgatgtggtcacgacagatgacatcttctgccccgctggattctactgccccagcactatacagaagctcccttgtagtagtgggtaatcctgtctacctaatgtcgtttccctgcatatcttcttctttcttcttcttcttcttcacggtgatcgttcattcgtcttttggtttgcaggtattattgcaggaagggatcaacctcacagactagtaagcctgccctgcccagccttgttcattcacagtagtctctagctagtaaaaacctttctgaatactgcacgcgcaggatgctacaagaagagctcttgcccaccaaactctgctactcaggacatcacaatcttcggcgcgctgcttgtggtcgcgtcctgcttagtcctctnnnnnatc

SEQ ID NO: 3934 - DNA, 436 bp, Zea mays
attgctagctagtgaaatcctcactctagcatatcgtcgagtgaatcatatctgctattggtgagattaggctttgctcgtttcgcagctcgagagaaggccatggtaatcgatctagagttcataagagctattgtaactgcggacgaagtcctgctgctggaacctcttgctcaggaggttatccctttcatcgataaattgaggcggcattttccattgaagagcctggaggttgatgttggggccacacaagtgggtaatgtgaatggcaagcatgctaaaactgctgcagagtgtgagctccccctcccctttgagtttcaggtgttggagctcgccctagaagctgtatgcttgtcatttcattcaagcctatctgatctgaataggcacaccatctttgtgatggatgagttgactaagaatgtgagca

SEQ ID NO: 3935 - DNA, 392 bp, Zea mays
gcggcggcacggctggcctcgactacaccgcgtcatccaacctcctccacaacgctcagcaagaggtgctttacgcactctacaagaacaaacacgaagaagctgacatcgtacattccgacaacgaggtcgtccgccaccacggtggtggaggccacggccccaacaaggatgatcacggccggcaacagcatcaggtccttaactatttttattgcaacaacgcaaccgcaagcgacgatgtcaacctcgacaacatgcaacagttccattttaacgatagctgtgccgccgccgacaaagtggatctgactcctccggcgggggctgacgaaatgagacatcatcatcagcacctcgacgagaactgccagattgaccacaaggattat

SEQ ID NO: 3936 - DNA, 401 bp, Zea mays
ggagctgaggcagaggcaggcccagatggaggtggccgtgtctagcctcagcgtgcagttcagcaagggtctggccgtctactccaggctcagcaagggcaaggaggtggccgtcgtcgtcggagaagaggacagtgcccgcgtccgcagcgaccggtgggacgagagccgggccgaggagtgggtggcgagcctcgagtacctgccgagcctgtcggaggcgctggcaatcaagatggtcgaggatgacctgggccacgacagcaaggcgaagaagaagaagaagagcaagaacaaggcggccggtgccagcaggaccaagaaacacaagagcgggatctcactgcaattggtcgggggcatgttgtgcaccaagaaagccaagtccaggtgatggtctc

SEQ ID NO: 3937 - DNA, 507 bp, Zea mays
attcgtgtgtgtaagggagtgggtgacatcatgggcgcgatccctgtgttgccgatcaccattgagctatgcattcgacaaccggcgtcaacaattggtaccgaggctcagtgtatattctacgacagtttcgtgagcccacatcggacgtagtgacaagaaggatcctgtcgtcaaggtgatgtccaagggaacgccaagacggaaggtaagatgctgaaattatggtatctatggtcactagaagcaagaatgtaagtggcaacatgctgaaattatggtatctatggtcacatgcaggcggagctagaacatctggtgctcatgttgtccacaattaatgccatgcacatcgagacgaggtcgctcgacgtcatgacatccagggtgtgcatggctgatcaagttatgcatcttaatgagaagaagatgttccctactgatcacgacaaaggcaacaatgtatgggtccttgacacaggggctagcaatcacatgaaagggtgt

SEQ ID NO: 3938 - DNA, 393 bp, Zea mays
gatgcgcagctccaagaattgctacttggaattgaatctgaaagtggtagctttccatgtacggccaatggccctcagacagcagctatacagatggttgcaccgctccaggaatttgttgatctatcttctccatcaccacctatacgatcttgtaagattgccaggtccagaaagttgagtgattcagacacagtaacaatggatgggattcatctgcagcaccaaagtctgcagattggatcgatggagtcaaattcggcactgggtcttgagccaattgatctgtcatcaccctcgccttgtgctgctcataaaccccaggctgctccagaagcaccaccactgtgtatggaggcagaaagaagagccctttgggatataagcaatttg

SEQ ID NO: 3939 - DNA, 518 bp, Zea mays
atctacctgcagagcattagagtgattgactcaccaccatataatatattaaactaaatgaactctaggaaggaagcgcaaagagctgtgaacagccaaagaaaactaaatccttaccctttctagctgcagcttgttaggatgttccggaaatttttttgacatcgtgatgcaaattttggggaaatttggaaagacgccagctttccaaaatgcatccgagaatgtgtgcgtgtttggatctggatagtccaggatgctgttcagccggtacattttggccagcaagccttccgcaaccttggacagctgaaccaccggctccatctgaagatgtttgtggctaccagcagaagagccttgcggcgcatcagcgctcatgttcctccaggttgccattgcggaaggaattggctcttcaacacttaggtattcagaccaccgggacatgccgctgtccacatctttgcttttgaacgaaacatgggccatctcttccttgagtagagaacagctgc

SEQ ID NO: 3940 - DNA, 406 bp, Zea mays
aggggtgctcacctccgaccaggcgctctacagggacggccgcaccaggtggctcgtcgaccgctgcgcctccagccaggacgaattcttcaagcgcttcgtggaatccatgctcaagctcagcaggctcaggggggccgatccgggcccagtgcgcaacaactgcttcgtccgcgccagctttggcgctagtagcgctaccaaagacgaccttgtcattgacaccaccgccggagacggagacggagacggagacgaggaccttattcttgcagcagctgcatgatcgctgctgctacagtgtacttacatccgatccggccgctatcatatcgtcgtcgtcgtcgaataattaagcagatcaacatgtttgtttatttgcttattagtttctattccgcagtcc

SEQ ID NO: 3941 - DNA, 258 bp, Zea mays
ggttcctgccaggatgaacggcttggctcgagagatgtacaccggctcgctctcgcccgacaggctggactcgtcgatcaggagggagtatccgtggacgtagagcccgtcagcgggcacctggtctccgatcgacaggtgcacgacgtcaccgaccaccaggtcgtatattgacacctgctgccggcacccgtccctggtcacatgcacagacaccttcttcttctcgttgtccagctccttgaactggagcgactg

SEQ ID NO: 3942 - DNA, 300 bp, Zea mays
  misc_feature (254)..(254): n is a, c, g, or t
ctcgcacttgatggctttgctgggccatgtgcggggtgcctcgataccgctgcattggatttgaaaaatcaccttctctgtcctctgcggtggccccgaggaggcgcggtactggcgcaagcgacggttcgacttctctgcacccaggaaccggcacccaatgagggtgactcgtgggcccgggcccctatgttagagactgggttgttgctttcggcggaggtgaagaggcacactatcacaggcggtggcgngcttctcacgaggcggactggtctgctactttcagcggaggtgaag

SEQ ID NO: 3943 - DNA, 552 bp, Zea mays
agagtgaaatcagtgaacggtctgttatttctgtgcagtatgataggttgatagactctagcatcggacaaccctgcgcaatttgaataattccatcatcgctaaggcctccacacctgaaacagagaacataagttagttgactgacaaaagtcaactaaacaaagagaaccgcaaggcatgtctaataatgacctgtacaaatcaatctcgcggagttttgggcaagaccttccaatgtggctaagaccttcatcacttatcttcaagcaaatgccaatttttaggctcgaaagttcgctacatctggcaagagctttcaatcctgtacagaaaatattcagagtcagctttatgtccatctggcgaagaataatatagtagccagttcaatatgtaccttcatcatccaaatcactgtcagtaaggtccaactcttccaagtgagaacagtgcttcccaatcagttggagtgctccactggaaacatggctacaagactccatcctcagagagatgagggaagtgcatgaactagttatggccgctagt

SEQ ID NO: 3944 - DNA, 445 bp, Zea mays
tacctcgagtactggaaggagagcctggcgaggcctgagcgggtccttttcctcaggtacgaggagatggtggcggacccggtgcgtgccgtgaggacgctcgccggcttcttcgccgtcccgttcaccgacgaggaagaggggcgaggggtcccggaggagattgtgaggctgtgcagcttcgagatgctgagcggcttggaaagcaatcggaccggagatcttgattgcggagacaacacggtgatcggaaaatctaccttcttcaggaagggcaaggttggggactgggagaaccacttgacaaaagagatgggcaagaaggtcgacgccgttttcgaagacaagctccagggatctggtctcgtgttttgaattttgattactatccatgcatggcttttgtttgtgtgatgctgtttgtccagaataactaatcgtttgc

SEQ ID NO: 3945 - DNA, 374 bp, Zea mays
ggggcacgacatggacgttccggagatgatgttgtaatcggctctcctgccgtcttccgaatatcccgatacagttgcgtcgcccgaccaggccgcaagaatgttcactcccggcgcgacgacgtcgggcttgaggagctctagtgcgacaaggttggggccccgcgacgagaatcccgccaccaccggcgcccggttgttgcggccaatgaccgtctcacaggcgaagctgaaggacgccaccggatagggcaccgatgccatgtacgccctgagcttctcgccagcggtgtagctaagcgtgagacccggaagagtgaaggcataggccacggaaccatctcgagaccactcctgaggatccacatcaacta

SEQ ID NO: 3946 - DNA, 539 bp, Zea mays
  misc_feature (278)..(278): n is a, c, g, or t
  misc_feature (280)..(281): n is a, c, g, or t
  misc_feature (283)..(284): n is a, c, g, or t
  misc_feature (421)..(426): n is a, c, g, or t
  misc_feature (429)..(431): n is a, c, g, or t
  misc_feature (435)..(438): n is a, c, g, or t
  misc_feature (441)..(441): n is a, c, g, or t
  misc_feature (451)..(451): n is a, c, g, or t
  misc_feature (468)..(471): n is a, c, g, or t
  misc_feature (474)..(477): n is a, c, g, or t
  misc_feature (492)..(492): n is a, c, g, or t
  misc_feature (494)..(494): n is a, c, g, or t
caactcgttgctcccaccagcccagcagaaaccatcgctaccaacatctatccagcggctagctacaaccagctgcacttggcttccttccttgttgctgcattgtagtagcttgatcatcttgaaaagcctacgctatcaacctccaacctgcaagctaagctaccatggggcgaaggaccaagcagtcttcttcgttgtcgttgttccggtactcgcggagccgttcttcctccgcgcccaccacgccgaggccggaaccagcagcagagcctccnanntnntggagtcgtggtccgtgggagcgtgcaacctttggcctctgatggaggggtgttccgaccagggtctccgacttcgtgcgcaggacttgcagcagcttgctgcttggccgtctgcagtcaccgtctggaaggagagnnnnnngannnagtnnnntgngaacttttgnatatcatgcacctgatnnnnttnnnnaggactcttattcangntaattatcttctgccacattcattttcatttttttactcttgact

SEQ ID NO: 3947 - DNA, 464 bp, Zea mays
  misc_feature (395)..(395): n is a, c, g, or t
  misc_feature (400)..(402): n is a, c, g, or t
  misc_feature (408)..(410): n is a, c, g, or t
  misc_feature (417)..(448): n is a, c, g, or t
  misc_feature (452)..(458): n is a, c, g, or t
acactacagcgtacgctactgctaagtgcactacgagaggctgactgctgccctaattaacttgctgaccaatggcaagcctgatctgaaggtcaacacactatggctaacatttactgctaattacactgaaagactgacgcgttgccatcagacaaaattcctatgtgatcagggggactcagactcagacctgcacctgcacaaaatccagggaccataccagcacgcagaaggcatccttcaccaggcgccatggcctatgagtcgcttcctcctgaagctctccttgaagcacgcctgcctgagatccttggtcctctgatccagaatcgcatcgggcctctcctcgatcatcttctttgtcagctgcaggaattccaccacgctcctgntcagnnnctcgtnnncttgtannnnnnnnnnnnnnnnnnnnnnnnnnnnnnnncctnnnnnnnctctga

SEQ ID NO: 3948 - DNA, 396 bp, Zea mays
tgatgcatccagaaatagggtaactattttatgttagatacaagaaacttatttaacagatatgcagaagtgttaaaacatttttaaattcaaaattttcatcaggctttgatagccgttttaccactcaaaggttttctgagtggacatttttataattgcttttttatagccactttccccctcttgtgacaaaaatgcattttctggaccagtgtactttcaaaattggtccagcttgcaacagcatatggacatggaagtcaagagcaagaagagcgactaaccccgcaattgagaagcaacacttccatttggcatatatggataaacaagtaacctctcactctctgtagtgcagaatccaataagacgtaggagattccgatgaacaga

SEQ ID NO: 3949 - DNA, 352 bp, Zea mays
gcgttctacgaaagcgacgacaggctagcgctatcgcggggtctcgttgaaccaccaccagcagctgcaggcgaaggtccaagaacgcaggataacgacacgcatgcaggagaggtccgtgccatggatcacgaggaagaagaggagaccaacaagcttgcgatcgttctagccgacccccagccacagtcgcaaggcgacgtgtagtccgttctcctggcgctgcggcgggtgaaggagcagctgcgctacaccatgaaccaggaactcgccgcgccaaccaggagctctacgcccaccgagcgagcgtgccacactaggaaaccgtgtggctcacttctactacggtgtc

SEQ ID NO: 3950 - DNA, 373 bp, Zea mays
gtatgatggtagacaaatcggtggtgatcgaaacggttccaggagtatgatgactcgtgagtcgtgaagaggacgcaagctacgaggaacgtaatttcaagacgagatggggtcatagatcatcaggaggcgtggacacaaggcactgtcctaaacttggcagaccaagtgcagcaatatattgctggtcaccagtgctcacctattgatcttcttatactcgtaattgtatgtatgcccctgaaagcagaagaaagattgtcacaaagcagagggaactttcggttccctagcgaaatgtattgatattaaacattttttttgtattaatgctgagagtgttgccagctctctctataatgcgaaccctcca

SEQ ID NO: 3951 - DNA, 359 bp, Zea mays
tactatatacatacatacgttaacggtgtactatgtgtcttgttgtaaatgtcacccctgcgaggtgttgccgattttgtaagctacgcacgtactagtactactacgctcggcatgtcaccgtgtgcaagtgcaacacaagtttgtaaaaatgactagctagtagtagtagtagcaatgctgttgctgtacgagtaggcctccctctgctttgtacaggggtagtccaacaagtatatggtttgctggtgccatgtaaaaatgtatatagaatcctacgttcacgcccagcaaggatgcgtggttgagtgttctggactctggacaatactactatccaataacagccataccgtgtt

SEQ ID NO: 3952 - DNA, 400 bp, Zea mays
ttcagttcaagccctggttcgaccccaccaccggctaccacaattacaccatctcgtggagcccctgcatgatcgtgtaagagagctatagaaaagaactatagaacgaaacgaaatgaaatgaattgcctacccatattgacatatcccatttaggcatttactacgtcgtcggtgcatatatacaggtggtacgttgacagcgtccccatccgcgtgttccgcaactaccagcagagctacggcgtggcgtacccgacgagccgccccatgcacgcatactccagcatctgggcggcggaggactgggccacgcagggcggccgcgtcaagaccgactggtccaaggcgcccttcgtcgccaactaccggaacatccacctcgacatctgcgactgca

SEQ ID NO: 3953 - DNA, 325 bp, Zea mays
cgcgctggcctgattcggctttgccgacgagccggaaatagcattggggcccaagtgtttcgttgcctacccagtaccaacaagtccacaaccacaatgctcgggttactaaaaggtcgataaaataccaaaaaaaaacagtcaaagacagtgttcgtcgaaaaaaaactaaggaaaaacaattagtagtaaaactgaaaatacctttaatactacatggcgccttgaacggcatgttgttgtcctttatagatcacgatcactgtggtattggggctattcaattattcttccacgaaggtgtgtaagcgtagtgtgtctcttc

SEQ ID NO: 3954 - DNA, 461 bp, Zea mays
aggtcgctttccaggccaggccaccattcccaaacgacatcgccaccgacgacgatgaggatgaacacgggcgggctgggcgagcgtgtcttggatctgaatgcgaggggcagcctgcagcgggtcctagagagacaggaaatggagctcgtgggtggagcacacggtgacggacaaatgcctggtcgagtggacagtcccccgcaaggacgttggcagcggtgaggtggacacggttcttgaagccgagcagaaggtcaaggttgtggaggtcggcgtcgacagctaagaggccgaggcgcgcgagggagagggaggcggctaggctgctggttgtggtggtctttccgatggcacccttgtcggaggctcagttccttccgagcgatgtggcccctcgtcgaccgagttcgtcgggcgaaactggctggtgtgagcaagaggcagcaggtcgtcgaaga

SEQ ID NO: 3955 - DNA, 619 bp, Zea mays
cactgcagcttggggctcggaacgaacgagaagaaacaggcatggggaagggccgggcaccgtgctgcgccaaggtggggctcaacaagggctcctggacgccggaggaggacatgcgcctcatcgcctacattcagaagtacggccacgccaactggcgcgccctgcccaagcaagcaggtacgtacgggacgggacggcagccccggcggcgcgccgtcacggcatgcattattcgttctgaacatgtgtatgcatgtgacagggagttggttccagctctgacggttggttcttcgattccatccatccgtaggtctgctgcggtgcgggaagagctgccggctgcggtggatcaactacctgcgcccggacctcaagcgcggcaacttcaccgccgaggaggaggaggccatcatcaagctccacggcttgctcgggaacaagtacgtatacggtgcagcgtttccggcttggaggggttgagctgcacatgtcgatcgtccttttggataatccatgcatgacgccgccgagtctgatcgagttccgtttggcttttgtttctgctaccaggtggtccaagatcgcctcgtgcctgccgggccggacggacaac

SEQ ID NO: 3956 - DNA, 808 bp, Zea mays
ctctttttgatctttgactcgcatcgcgtctcctctcgcctccgctttggttggataagcccgtctggaagcctgaggcgctctcctactttcatttcgccggcccgcggagaacggctcggcgggttcccttccctggcagcgttcggagagctcttcctgctgctctgcgacggacggggacggagaggtacgccggcctacgtacctaccaactgcatgcggtccaagtgtttgtcgacatggctgtgtcctgtgtgtgtgtgattggccgttgttttgcttaggagttgggtggcggggacgcttacgcaccttgtcgttttgattggctcgtcacatcacgtcacgtcacctttgattccttagtctcatttgatccgggaattgaagttgctacttatttgatgcatgtatgctttgccctgatccacatttcggagcttctccttcactattttttcccttttgagggtgttacatcctgcaagggttagctatgatgcgattgggcaatgacaatgtttctctgctagcaatgggcataattgtcgttacacaatgttaacttacctcacagtttattaaaaataaaaatccatgtacgatctgtcggtggctacgttggcagtgtggatattatcccctgccctaccaatgtgttgatcttctcttgcgtcatatacacataaaagaatagtcggtggtctattatgcaggtaatttaaggagacagcatctcttatataacttacctcacagggctcttgatgtgttctttttttttgttcttttgttaggtcaaaaa

SEQ ID NO: 3957 - DNA, 399 bp, Zea mays
tccttgctgtttcagttgttgttaattctacggctataaactcgaggcaccctgacaaggttgtttttcacttagtgactgatgagttgaactatgctccgatgaaggcatggtttggcatgaatgactacagaggggtcaccgtggagatacaaaaggtggaggactttacctggctcaatgcatcgtatgttcccgttcttaaacagctacagaatgctgctacacagaagttctacttctctggcagtggtagtcgtggaacaccaattaaattcaggaacccaaagtacttatcaatgcttaaccacttgaggttttatattccagaaatatatcctgaattgcagaaggtggtatttcttgatgatgatatcgttgttcagagggacctatcag

SEQ ID NO: 3958 - DNA, 414 bp, Zea mays
agtccatgaaagatggtgctctgttccagctgaaggtgttgctggacaagttcgcaccggagaccacgccgaagttggtgccgcgcgcaccacgggttggctccggcatcagctgcctgtcgcaggcgcggcaccaagaggcaggagacagaatacccccggtgcaagaggaagggcagggcatcaacgtctgcggcggcggcgtctctcgcatatcgatccaggacatcgctgaggagtacggcgagctcgtgaatggcatcagagttcagctcctgtcgccgctccagcgcaagtacgtcgatctcgccgagcaaggcgggtacattgacatctgcggcgacgcctctcctgtcgtgttcccggccaagaccggcgatagcagcagcccaaacttgagcagcagcagtgact

SEQ ID NO: 3959 - DNA, 414 bp, Zea mays
  misc_feature (75)..(75): n is a, c, g, or t
  misc_feature (81)..(82): n is a, c, g, or t
  misc_feature (89)..(89): n is a, c, g, or t
  misc_feature (134)..(134): n is a, c, g, or t
  misc_feature (151)..(151): n is a, c, g, or t
agtccatgaaagatggtgctctgttccagctgaaggtgttgctggacaagttcgcaccggagaccacgccgaagntggtgnngcgcgcnccacgggttggctccggcatcagctgcctgtcgcaggcgcggcancaagaggcaggagacanaatacccccggtgcaagaggaagggcagggcatcaacgtctgcggcggcggcgtctctcgcatatcgatccaggacatcgctgaggagtacggcgagctcgtgaatggcatcagagttcagctcctgtcgccgctccagcgcaagtacgtcgatctcgccgagcaaggcgggtacattgacatctgcggcgacgcctctcctgtcgtgttcccggccaagaccggcgatagcagcagcccaaacttgagcagcagcagtgact

SEQ ID NO: 3960 - DNA, 663 bp, Zea mays
tcaactactcccctgtggagcatctggagtgccatatggaagttaacatggagctgaacgaaggagaacaaatgattgatcacacagaagctagccgatatgaattgtttagcaacggtgagatatacaaaggcggctgtagatgaaactgaattgttgttaactttttcattgctcactgaatagcaaatgtatatcttgtaatttacaaaaaatggttatggctttgcagatctgcagagccaatcaagaacttccaacttggacaatgaacattttccaagggatgcatcaaaccacgctaatgttgaagcaactggacctccatatgatctctcaaatggtatgtaccttcggaaaaaactatatactctggttggagacacaaatgaacactcgcatgctgttttcctcttcaggtgtatattttatgtgttagttccataaaggaaccattaattaattaataaatatatctggtatcctggtgcatatttctcaggtggtatatccacagagcactcagattggagtgaaattaaatgggggagtacagatgagatgcttggtaatactggtcaggatgatgaccatttcactccgatgggcatgttttgtcttaccaataacacagatattcttgatctttcttgcattgagtcc

SEQ ID NO: 3961 - DNA, 409 bp, Zea mays
cgaccttgacgagctccgcgagatgcactacgtgcacgcggccatcacggagtcgatgcggctgtacgcgccggtgccagtgaactcgctgcgggcggaggcggatgacttcctgcccgacggaacagccgtgcaggcagggtggttcgtgacgtacaattcatacgggatggggcgcatggagtcagtctggggcgacgacgcgcgggagtaccggccggagcggtggctcagccctattgacgggacgttccggccggacagcccgtaccggttcctggcgttccacgcggggcccaggctgtgcttggggaaggagatggcgtacatccagatgaagtccatcgtggcgtgcgtactggaggagctcgacgtggccgtggacggcgcgtaccggccccggcaggtc

SEQ ID NO: 3962 - DNA, 396 bp, Zea mays
aattatactggtcgcagagtaaaattgaaaatagaagataaacacaaaacacaattttatacagtaaactacgctgttaacatagtaaaatttaaaatagaagataaaaataaaatgagtaagcttgctagaggtagtctaaatagttgtgttccgttcgtttgtgggacaacagtttactgaataacattcgttcgttcttccggctgtccagtttcccgtgtctcttctcctctttgctgctatcggtgttaacaccagttgagcccaaaaatgatgtttcgctacatctatacatcgatgatggatgacgatcgtccagtctagagtacatatttataccaatcaattatcaatcactggagaagattcagatttcaggttgagagcagagca

SEQ ID NO: 3963 - DNA, 396 bp, Zea mays
  misc_feature (345)..(345): n is a, c, g, or t
aattatactggtcgcagagtaaaattgaaaatagaagataaacacaaaacacaattttatacagtaaactacgctgttaacatagtaaaatttaaaatagaagataaaaataaaatgagtaagcttgctagaggtagtctaaatagttgtgttccgttcgtttgtgggacaacagtttactgaataacattcgttcgttcttccggctgtccagtttcccgtgtctcttctcctctttgctgctatcggtgttaacaccagttgagcccaaaaatgatgtttcgctacatctatacatcgatgatggatgacgatcgtccagtctagagtacatatttataccantcaattatcaatcactggagaagattcagatttcaggttgagagcagagca

SEQ ID NO: 3964 - DNA, 372 bp, Zea mays
  misc_feature (334)..(335): n is a, c, g, or t
  misc_feature (343)..(343): n is a, c, g, or t
  misc_feature (345)..(345): n is a, c, g, or t
ctgcgcagcgtcgggctggcgctctacatcagcatctttggcatcggaagcttcgtcagcagcgcgctcgtgtcaggcatccaccgggtgacggcggcgaggggccagagctggttctcagataatatgaaccgcggccacctcgactacttctactggctgctcgcagggctcagcgccctccagttcttcgcctatgtcttctttgcgtggagatacaaatatataaacagaacgttggagccgagaacatgtgacacatagttttaggattttcttccctattttcgtcacgataccaccctttttttttacgaccccccccccccccccnntttttttnanaaaaaaaaaccatacgttccttacaaa

SEQ ID NO: 3965 - DNA, 283 bp, Zea mays
gctgctgctcggaccgtgaccaggacatggcggacctggagctggcgcttgaggcggttgttccggtgagcgtgcagcggcaggactcgctgtacagggacgcgacgagggcgggcggcggcgggcagcagcagcacgaagggtgggctcggactctgaggctggccttccagtgcgtgggcgtcctctacggcgacatcgggacgtcgccgctgtacgtctactcgagcaccttcgccggcggcatccgggacaccgacgacctcctgggcgtgctctccct

SEQ ID NO: 3966 - DNA, 831 bp, Zea mays
  misc_feature (817)..(826): n is a, c, g, or t
agaggcagtggtgtaccttttttcttcgttgttgtagtgtgaaaaccaagatacaaccacaccacttgtgtgctgtatttcacacacaaaaaaaacttgtattgtttaattttatgtaggaccgcataactttgctcctttgcgattaccgtcaactaccggcaggcgataagtttgacaggattataagctggtgagtactatactactgtgcccacatattgaagaggactgatcatatacaagatatatatagatgaattgttgatctgacaaataagtttttcttcgtgcatatggtcatttgttagtgaaatgattgaacatgttgggcatgagtacatggatgatttcttcgggtgctgcgagtatcatttggcagagcatggcctacttgtcctccaggtgcagcattattttattgtatgattacgattgtaacagtctgtcacaagaattaactatttcccatcatgttcgacacaaatttaattatatgcatgcatggacagtccatcgcgctcccagaggaattgtatgacaaaatgaggatgcggcccgagtttctcaagacatatatcttccccggtggctgcctgccttctctaggccggattgtgtctgccatgtctaatgcatcaaggctcaagtatgtgctttattttcaatatatatatcgatgatatgatgaacaaaagccatccatgcatgcatgcattcagcactttctgtattgatgtgagtactctcactcctgtgcagcattcagcaccttgagaatattggggaccactactacactaccctaatgaactgnnnnnnnnnnctttc

SEQ ID NO: 3967 - DNA, 213 bp, Zea mays
  misc_feature (101)..(104): n is a, c, g, or t
tactctgctttctttgaggggtctgtcaagttcagaccttggagattaatttggaagagttgggctcctctccgctgcaagttctttctttggcttgccannnntaaccgatgatggactgtggatcggcttgccaaacgaggccttcctcacccagattcctgccccttgtgtgaccaagccggtgagacccttcagcacattctaattggt

SEQ ID NO: 3968 - DNA, 566 bp, Zea mays
cgcccaccggaaatcaacgtcgaggggtccagggactcgggcctcgtgttcatgagcgccgtcgcgctcgtcgacgtcttcatggacacggtacttattaacgcattcctttctcctccttcgtcttccagcggcgtccatgacgatggttgatcgatgttgttgctggtgcagaataagtggatggaattcttccccggcatcgtgtccaaggcgcagaccgtcgatgttctcgtgaacggcttgtgtgggaggagcgagtccttgatcatggtaatgccgtcgagccttcgcattgcaaacagtgcttctcctcgtgccatgtgaccatcggagggaaagctaatggcgtcgtgcagatgtacgaggagctgcacatcatgacgccggtcgtcccgactcgcgagctgagcttcctgcgctactgcaagcagatcgaacaggggctgtgggccgtcgccgacgtctccctggacgggcagcgcgacgcccactacggggtgccgtcccgctcccgtcgcatgccgtcggggtgcctcatcgccgacatgtcgaatggctactcc

SEQ ID NO: 3969 - DNA, 500 bp, Zea mays
tcaggaagagcggtagaatttgcggacggtgagttggaggagttcgacgccattgtgcttgcgactggctacaagagcaatgtccccttctggttgaaggtactttagtttaactgtttgttttagaataacgtttaccatttatgtggtggaaacagattggtaagctacagttcttcttatgatgatgcatcctgatagctaaaatcgatcgtgttttgcttttgaatcgggtcaggaccgagtgttattttctgaaaaagatggattgccaagaaaagcatttccgaacgggtggaagggtgagaagggcctgtactcggttgggttcacccggcgtggactgatgggcacctcggtcgatgccaggagggttgcccacgacgtcgagcagcaatggcggaaggccaaagggacgcatcgggacggcgttcctctacctctggtcgctgttgtttaccatggtgatgggttgtgattgtgagttgccaaagggtgta

SEQ ID NO: 3970 - DNA, 1400 bp, Zea mays
  misc_feature (1198)..(1198): n is a, c, g, or t
ggcctccagtctcacacaggggcagtgaggtgtggcggcaggcttcccttcactgaccgcggaacagaatagatcagatcagtgttttcttgtggggaagagttggtaacagcgaacattgggtcccgtaccggttgctcttccccttttatatgcacggtgcgagcgggagccgcaaccaataggttgttacgccccctgatcacggcgcattatgataggataggatcgactcggtccataactgaatcgattgaaatcaacccaacaaagtttagtttatttgttgttaatgttattggcaattattagcgacatattatatgactgaaaagaataccattgacattatttctccacttgtaaatgcatcacgttattaccaccagtagctcgttgtagtgttaatttttcctcaactagctacggtgacatgcaaataacaaaaggatgaaacaatgtacaatgcacaatgtacttatggtgtaggtattgaacatatctgttctatattttggtaaaactgattaccatgtataagcttcatatcagtacaagataccactcaagatgcaagtgctgaccttgtttgttcctttgcagttattttacctctatctgccggaagctcaaaatcatgaggggctctgatgctgttggaataggtatgtacaatgtgtgacaatagatcttgacattctgcatgtattatgtgcatatgttacagccttgcaggacgaatttattatttcccaaacacttatatttgcagttaacttatactatgcagtagctatatttctctctctttttatttcctgcatgtattagctgcaactgtatcctggcaaccaacggattgtagcttgaatgcatagatcatttatcgtggctgataacagagcataaacttaagtgaacaataagatggttaaatattaatcggaagaaacggttgctgtttcggtgcctgaatgtgaaacttcagtttggaagatgccttttcttgtctgcaaccaagaccactggctctcgcatttggtccttcatttctgaatttaggtgcattgtttcattttgctacaatgtttcttgtatgattctgaactatgtccattgcatgcagctccacgaaccgtcgagcagacaggtcagaacaaataagctttggcctttgcctgcatccaaggaagacatntgagctagctgggagagtatgttgaaggctgaagcctgaaatagttgccgggaatcgtcaaaacccgtcaagtgtttagtgtagttttcacgtgtccttgagacatgtgcatttgtatgtttgtgacgtgatccgttagatcgtgcaatcgtaggttgctgttcttgtgccctttaaaggccagacagatcagggagctctc

SEQ ID NO: 3971 - DNA, 409 bp, Zea mays
gcctttttcggtgtcgagaagtttgtgctccctccagaaaacttcacggacatgccctttccatgtatcccatgctcgaaattcctcacgacctcaatgcccttgtctccaacaaggaaactgttgtccagcgcgccaagcgcaaggctcttgattccacttccttcctcgacgggctcctcaaactcccgcagatcctccagcacggccttcagtagcggtgtccgcgggggcatcgggctgcccttggtgcccggagagaagaagccgtcggtggcgtcctcccatatcgactcgtcgccgtcctccgggcgcgcccacgccgcgaagtccttcccgaataccttggcgcggccctcgtccgtggcggcgacgccgtagctgttctcaaacatacagctgtggtgca

SEQ ID NO: 3972 - DNA, 398 bp, Zea mays
acttgatctggaaatgcgggccggccctgtaggtgacgccctgcgtcgcgccgtacacgtacggcgtgtcgtcgtaccagtgccgggtgaggccggagtcgttggacggcgggatgtacgagccgccgacgttgagccggtacatggtctggagcgtggagctggcgatgtccacggtctggtccgcgaagccgaccatgatcgccgggtcgacgaagatgtcgggcatggatatcacctcgatgccgttgacgtaggcgtagctctcgttgcccatcggcgtcggtgtgaaggtgagggcgaggaaccccgcgggcgtcggcgggagggagaactcccggatgatgaacgcctgagtcagcgcctttgcgtaggtgtagactctgaagttgcggaac

SEQ ID NO: 3973 - DNA, 440 bp, Zea mays
acatcagtgggatatggaatgtgcatattagaattgttatagtttgttagttgcgtagttaatacatgtatgttttcagttatatatattagacctttataagaaacacaactctgtatatttgcaagtatggaacgtggccgacaatattattttacaccaggaggtgccttagcagcacaggtggcgccttagtctggttcctgttctagtaaggctgcatacaatgcattcttctttgtgtccatcaagtttgtgccttggaggagaatttggagatcctcggcaaccctggggtgtaaattttttttgtgtcttgctgtcaaaaagtggtctggatggctaatcaaaattgtacaaacaatattgtacaaacatagtttaacgcatcctgctgctagcttattgtgtgatcaagctgaagagaccatcctgcatat

SEQ ID NO: 3974 - DNA, 361 bp, Zea mays
tctcttcaatctgaaataaacacaagaacttctgaacatgaaggcacagacatcagaagtcgttaatgttaccactttaagggatcctgattgagtcagtaaacagcatattgatctgcatttctgcagtctgacaaatatcttaatccatgtcatgattacagatggtctcatttaacgcagtgaaccttagacacttgactagttgactctgaatgaatggtgcctgaaacaagtgttgcaggtaatggagttagtgacattcaggacaagacaaattataatggttaaacaaatgagttgcgacaataatgaaaaccacaaagataaaaaaaacctcaacttcatgcgacaggtatga

SEQ ID NO: 3975 - DNA, 613 bp, Zea mays
  misc_feature (357)..(610): n is a, c, g, or t
ttcacggttatgtgccctcctgtggttcggtggcacatgtcgctagctgaggtgggcaacgagctcgcgttgttgagctgcggccaccaggtcccgatgctcgagctctggattctgaaggattacgagaacaagagctgggtctgcacgcactggattcggctgccggagttgaagatgagcaccttcgcgttcgatgacttctcgcgaatgattttcgtgtcagaaaagggagttctgatagccaccccggagcagaagctgttgcgctatgacctgaatgggactctgctggaaagcttcccttgcaataatggcagccatctcaagattactccgtacaccttcaaggagagnnnnnnnnnnnnnnnnnnnnnnnnnnnnnnnnnnnnnnnnnnnnnnnnnnnnnnnnnnnnnnnnnnnnnnnnnnnnnnnnnnnnnnnnnnnnnnnnnnnnnnnnnnnnnnnnnnnnnnnnnnnnnnnnnnnnnnnnnnnnnnnnnnnnnnnnnnnnnnnnnnnnnnnnnnnnnnnnnnnnnnnnnnnnnnnnnnnnnnnnnnnnnnnnnnnnnnnnnnnnnnnnnnnnnnnnnnnnnnnnnnnnnnnnnnnnnnccc

SEQ ID NO: 3976 - DNA, 354 bp, Zea mays
gaccgtttgcataacccgaaggtaatcgagattgcgaacaagatgaaggaggagcgagacaggatgttgagggatagagcagcaggtcagcggtagtcgtagcagcaggtattgtttcgactggccgactgggtgttgtcgtttacgacatgggccaactggcgtcataaataatggttgttggagtttgatatggcaaatgtgaaactcgtgtttttgttattcgtatttctgggatttagatggcctctggaatgcaatgttaattgggatgtgtttttgccagcaagctggtaaattgagacatgttttgcttgctccagaaagttctgcttatagctggtacaaggctag

SEQ ID NO: 3977 - DNA, 369 bp, Zea mays
  misc_feature (362)..(366): n is a, c, g, or t
tacgggtcacttcggacaggggtctgggagaattattcaaaaacccgaaggcatccgccagaattgccaaatgggcagctgaactatccgggtaccacatcaccttcgagcccagaacagcgatcaaatcacaagtcctggcagacttcattgtcgactggacaggaccagcatggccacaagaaccctcgcgcatggtgccatgtggtggcaggcgccgcggcgattatcacatcacccgtaggcatcaagtacagatacgcagcgcgcctcagctttgccttagagtctgacaggtacactaacaacatcgcatagtacgaagctttcatcctgggacttcgcaaattatgagccctcgnnnnnact

SEQ ID NO: 3978 - DNA, 368 bp, Zea mays
atctgctgctggtggtaggtcaccatatatagctaggtacatatgtttagagctatagcttgttacataatagagatatatatagttgtatacatgcatacatacactacacaaataatgtaggcgaaagatatatgtacatgcatgccagtatattgacaagggttgtcagtatctgtatagacataatctaaaaaaaggagatagaaacgtaggtagggtttggatttcattattagcttggctagtagtagtagtggtcgagattgatatgtgaaaaggaacaagcatcatgtatttatctcagtttgtagtatttgcctgcttgcctccgccacccaatgcgtttattagcgttgtggtgcgaa

SEQ ID NO: 3979 - DNA, 395 bp, Zea mays
tcagtttggccctctgattcagttaggcggttttggcaggaagggagtgagtctaggaagaaacaaattagtctgctgatgtggtggttgttagcttgatgtcgtttaccctgttggtgttaggtattgcagtactgtgtgctatgtgatgcgtttggtagtagttagttgtaggctttgcagtaccagcagctgttcttgtgcttcggcttaagttgtgcaatggctagctgagtagaagtagtttgggtagtaggttgtgatgttttcggcaaactggtgatggtgagatcatgagtttcagtttaactagagaactgatttgatctttatgccctgtgctttatttaaaaactgtctgccggatgccggttgcccaaagtatcagtagcaaa

SEQ ID NO: 3980 - DNA, 494 bp, Zea mays
ttgctgggcagcagtgttagtgtttgaacgcgaagaccctttcattaagcttgcccttgatgttctcggggcctgcattgttgccgttaagttatcagttagtcaagccatcatgatggttatcattctctagcaggctcagaaatcgtgaatacctgaatgcataagccaagcaggggagatatctctttcttcagattatccctgatcattccatatatcttctccacgtacgctgtgagctgctgtttgaacagcaaagccgggtacttggcctcgacctgtctcagagtttcgaccccagtaaccatgcttccatttatgagagaaagatttacaccctgtggcgctcctcggaagctctggaataaaaaaaaaggcatattaaatatgaaggttaaataagaagaagaaaagaagacgagttcttaaaataagaacatgtacctgcgtcattcgtccgaagagtgtagcagaagacgaccgtcgacgct

SEQ ID NO: 3981 - DNA, 386 bp, Zea mays
  misc_feature (376)..(377): n is a, c, g, or t
gcgctcaagtgggtggtgccgagcgagatctaccccgtggagatcaggtcggcggcgcaggcgctgacggtgtccatcgcgctctgcctctcattcgcgcagacgcaggtgttcgtctccctgctctgcgccatgaagcacgccatcttcctgttctacgccggatgggtcctcgtcatgactgccttcatcgccgcgttcctgccggagaccaaaggcgtgccgctggaggccatgcgcgccgtctgggcggggcactggtactggaggaggttcgtcagggacgccaagcaggaggttcaggtgaactgcatgtagggaaaagtaaagagtggtaaaactcaagtgtttgctggtaaattatgatggttcagtnnggccgttag

SEQ ID NO: 3982 - DNA, 374 bp, Zea mays
ggtgggatagttgcattcaacacgactattgacgaggtattcagcctgctgcatcttactaaatcactagttactggcgtaacatcattgggcacttctatttatatatgccaatatatgtttaggatcttgcgaaggaaattcgtgagttcaggagtcctacagatggtgagacgcggatgttctatgagatagtggttgctcccggctatacggagaagggtcttgaggttctcagaggcaagtccaaggcactgaggatactcgaggcgaagagaagtggaaaagggatgctttcacttaggcaggtgagtggtgggtggttagctcaggagtctgatgatctaacccctgaagagatcacctttaccaca

SEQ ID NO: 3983 - DNA, 533 bp, Zea mays
ggatcctgttggtgtgttatctgtagaatttgatgatggagaaattttccaatggagtaaggtaaatatactttgctttattttcactgaactctttattatgcagtgtgttatctgtataatttttatttatttattaaaatctgtataccaggttacaacaacaattaataacgttatcattggtcaagtttattgtaatcactatggaacgatgagtataactgggaacaggggatattcatgcaagctgattttcaaacggcaatctttccttgagcgcaaccctcggcaggtaaaaagaaatgcagcatcccattttggaatcgatttgatggatgttactaagatgtagctgtatgtatgcaaggttgaaggattggttaaggacggtgatggttcgacggtggcaagcctaatgggaaagtgggatgagaggatgtactgcagcgcatcagggcagaatgtgattctgttgtgggagaaaaatgaagcttcgactaatcccactcgctataacctctcatcgttcg

SEQ ID NO: 3984 - DNA, 451 bp, Zea mays
  misc_feature (357)..(368): n is a, c, g, or t
  misc_feature (376)..(377): n is a, c, g, or t
  misc_feature (379)..(379): n is a, c, g, or t
  misc_feature (425)..(426): n is a, c, g, or t
  misc_feature (442)..(443): n is a, c, g, or t
atgttaccattcaagacaagtgcatgtcatttgatttaactttataacatgtctttcaattttcttgctatggtctcaaaactttacactgcaatcagcaaatggtacaattttcaagtccccgaaacctcagtatttgctctaaactgaagtataatatttggaagtatcgttcttttaggtagtctatataatatttcatttttttccataattgcatgatcatttctttaatcctatcaagaagcttaacaatatgtaagcctttaatgtctcgtctctgattattgaagatctttttctgtattcaatattgacctctaatgatattgaaccttagcaagaggtcttcaatannnnnnnnnnnnacattaanngnttacatattgttaagcttcttgataggattaaagaaatgatcatgnnttatggaaaaatgaannattatata

SEQ ID NO: 3985 - DNA, 446 bp, Zea mays
ttctgtttcgtctgacgaagcggcttcggattcttccgctcccattcgcgacgctcctcctcggtcatattcctgactttctcgatctcctccttctccttcaacctcgcatctctttcctccctgtccctcttaatccttgctatttctctgtttttccacgactcgtactcctctgcttcgttcaactcgtcgtctgtatcgacatcctcgatgttggcctcttcgttcagtgccttctcgatgtgctcctctttttctaatcttttcaaccacaatctgtctagtctcaatcttcctagcctccatcctcttcttgaccagctcctcaagctgccgttcctcctcctccagccgttcgcgctccgcgatggtgtctctctgtgactttggtatgaacacgggcttcaccatggccatgcccatctgctcatcctcagagtctg

SEQ ID NO: 3986 - DNA, 420 bp, Zea mays
caggtgctcacgcccgcagcggccatggagatgatggtcattcttgccaaggtcgcgtcggctatgctccagtgggcgccggcgattgcagcgcacattcaagtgcacttcgggggggatgctgcattcgtccaatgccatgctgctacactcgctactcactcctttgctccagttcccagatgcctttggaactgaggacgagcgcacaatggcacaccgcctggctttggctgcctgtgaggtgcaccgtccactcgcagtgcgattgctggctttgcattggctactcggctctggcaggttcagaaatctggtgcctggtctcacccattggttttaccctgccttgttcgatccccttgggctcaagggcaagaagctggattgtctaccttatgttgctactggtgttgatgg

SEQ ID NO: 3987 - DNA, 415 bp, Zea mays
tatgtttgtagtgagctgcatccggcgctgctactgctagtgctagagggctgaagggacgcagccaacaatgatttgcacagcagcagcagcaggctgtgggccggtcccggtcctccttcaatgacacctacactggtgggaccgggactcgtttgtttcttctaatcctgtgagatcttcacgctggaccagctggtctgtcacgtctgtctgcatccagtgtagtcccatgtgggtagcagcagcatcttcttgtgcatcacacacccctcctcccccctagtactgctgtgcatatcatggtcatggaggagcagctacctagatgggctggtaatagtaactactactaattagtgctaaatgcatcatgtaatgtaatgtaataggagagcaagcgctataatctgtt

SEQ ID NO: 3988 - DNA, 380 bp, Zea mays
gttgggtacaaggtccattcttactactggctggatgaattctcaggaaagaacagtttttcgcgttactggaggagtgagtggagtagtggcccaaacccatggtgccagggaatgcagattccagattccgatgtcgtcattgaaggcaattatgccagtgtggtcagccagaagaacaaggagaagtcccatgtcgtactgaatccaggttctgagtttgcgttgtgcgattgtagctggtcaatgaaggggaacctttgcaaacatgtaataaagtcggcaaaggtctgccgtgacaggggattggcactgccatcgttggccatgttccactattaccaggcattggcaaatcttgttcattgtccacccagtag

SEQ ID NO: 3989 - DNA, 270 bp, Zea mays
ccatgaacgccacctacgccgccgggctcaagacggtgtgcccgccgcctggcagcggcggcggcgacccggtcatcagcaacaaccgggtcacggaccccaacgcgctcagcaaccagttctacagcaacctgatgaccgggcaggtgctcttcgtctcggaccagcagctcatgaacaccacctacacggcggccaaggtggccaacaactccgccgattctgccgcctggatgacccagttccaaacggcgctgctcaagatgggca

SEQ ID NO: 3990 - DNA, 753 bp, Zea mays
  misc_feature (744)..(744): n is a, c, g, or t
tgcctcaatagtgcccatacatgccatgaaaatcggtttttaggactagcctggacagctttctgcagtagaaaattaaagttatacaccacacatttgaaaatttcagaggaatttcatatgtgacaaaccatcgcattcacatgttaatatagaacgtcaaaacaacagggcagaataacttgagcaaacgaatatcaagccttatattaataagggtagagactagacagatcttctatgaaaaatttagacaaacaaaaactgaacccacagtaatgccatgcacttcaactgacacatgaacatgaggagaccctcagatatattttggaatttacaaaatcattaatgccagcaataattatcctagaaagggaacacaatttattacctcaaagagctttcttgccatggtattgtttcctgcacgcatttctacctgagcccaagcctactagaaagttgtcgtacataaatgacagtttaatagaaaaggcaactctgcagtttctttttgtgcagataaaatgaataattatgaagcaaatacttactagccagcttgcacaactttttggattggattgactggcttgctcgaacaaagtccgtgcctgttcaaagcgctctgctttagcttcaagcaaagcaagagtttggtaaatatactcatttcctccacaatatttcagggctttcccaagtaggttccgtgccttttttatgtttccttgctttatntctaaaatg

SEQ ID NO: 3991 - DNA, 446 bp, Zea mays
ctgcatgatgtacagtttagacgggaggaggttcgaggtgccgctggcgtaccttggcacgctggtgtttgcggaactcctgtggatgtcctacgaggagtttggcttcgtgagccatgggcggatcacgctcccttgtgatgctgcagccgtagagtatgccatgtgtctcctcaggaaaggctcctcggcagatgtagagaaggcattcctgagcaccatggcagtctcatgccactatgcaagctgtattgctattgcaccatttgttggagttagccatcaagctgttatttgcagctcctggctgactgtaaagtagtttagtatatagtttgtaggaaaagaaaacttctccatggagccttttgatgcttcaagcaatcaaggaaaatgcaaactagcatgttaattagagctattattctcgttctttcgtggattga

SEQ ID NO: 3992 - DNA, 446 bp, Zea mays
  misc_feature (61)..(61): n is a, c, g, or t
  misc_feature (76)..(76): n is a, c, g, or t
  misc_feature (83)..(83): n is a, c, g, or t
  misc_feature (167)..(167): n is a, c, g, or t
  misc_feature (307)..(308): n is a, c, g, or t
  misc_feature (312)..(312): n is a, c, g, or t
  misc_feature (328)..(341): n is a, c, g, or t
  misc_feature (352)..(352): n is a, c, g, or t
ctgcatgatgtacagtttagacgggaggaggttcgaggtgccgctggcgtaccttggcacnctggtgtttgcgganctcctgnggatgtcctacgaggagtttggcttcgtgagccatgggcggatcacgctcccttgtgatgctgcagccgtagagtatgccatgngtctcctcaggaaaggctcctcggcagatgtagagaaggcattcctgagcaccatggcagtctcatgccactatgcaagctgtattgctattgcaccatttgttggagttagccatcaagctgttatttgcagctcctgnntgantgtaaagtagtttagnnnnnnnnnnnnnngaaaagaaaanttctccatggagccttttgatgcttcaagcaatcaaggaatatgcaaactagcatgttaattagagctattattctcgttctttcgtggattga

SEQ ID NO: 3993 - DNA, 1279 bp, Zea mays
  misc_feature (399)..(413): n is a, c, g, or t
  misc_feature (417)..(418): n is a, c, g, or t
  misc_feature (421)..(426): n is a, c, g, or t
  misc_feature (428)..(428): n is a, c, g, or t
  misc_feature (432)..(432): n is a, c, g, or t
  misc_feature (444)..(448): n is a, c, g, or t
  misc_feature (450)..(452): n is a, c, g, or t
  misc_feature (454)..(456): n is a, c, g, or t
  misc_feature (459)..(467): n is a, c, g, or t
  misc_feature (477)..(477): n is a, c, g, or t
  misc_feature (480)..(480): n is a, c, g, or t
  misc_feature (483)..(490): n is a, c, g, or t
  misc_feature (493)..(495): n is a, c, g, or t
  misc_feature (500)..(502): n is a, c, g, or t
  misc_feature (504)..(507): n is a, c, g, or t
  misc_feature (512)..(512): n is a, c, g, or t
  misc_feature (515)..(524): n is a, c, g, or t
  misc_feature (526)..(530): n is a, c, g, or t
  misc_feature (532)..(558): n is a, c, g, or t
  misc_feature (560)..(573): n is a, c, g, or t
  misc_feature (578)..(581): n is a, c, g, or t
  misc_feature (584)..(589): n is a, c, g, or t
  misc_feature (593)..(593): n is a, c, g, or t
  misc_feature (597)..(617): n is a, c, g, or t
  misc_feature (622)..(649): n is a, c, g, or t
  misc_feature (651)..(653): n is a, c, g, or t
  misc_feature (655)..(675): n is a, c, g, or t
  misc_feature (677)..(681): n is a, c, g, or t
  misc_feature (683)..(683): n is a, c, g, or t
  misc_feature (685)..(685): n is a, c, g, or t
  misc_feature (687)..(702): n is a, c, g, or t
  misc_feature (706)..(706): n is a, c, g, or t
  misc_feature (714)..(714): n is a, c, g, or t
  misc_feature (716)..(719): n is a, c, g, or t
  misc_feature (724)..(731): n is a, c, g, or t
  misc_feature (733)..(733): n is a, c, g, or t
  misc_feature (737)..(739): n is a, c, g, or t
  misc_feature (741)..(744): n is a, c, g, or t
  misc_feature (746)..(748): n is a, c, g, or t
  misc_feature (750)..(752): n is a, c, g, or t
  misc_feature (754)..(760): n is a, c, g, or t
  misc_feature (762)..(769): n is a, c, g, or t
  misc_feature (771)..(784): n is a, c, g, or t
  misc_feature (787)..(792): n is a, c, g, or t
  misc_feature (794)..(811): n is a, c, g, or t
  misc_feature (814)..(816): n is a, c, g, or t
  misc_feature (820)..(826): n is a, c, g, or t
  misc_feature (830)..(832): n is a, c, g, or t
  misc_feature (834)..(852): n is a, c, g, or t
  misc_feature (854)..(854): n is a, c, g, or t
  misc_feature (856)..(856): n is a, c, g, or t
  misc_feature (858)..(866): n is a, c, g, or t
  misc_feature (868)..(888): n is a, c, g, or t
  misc_feature (890)..(896): n is a, c, g, or t
  misc_feature (898)..(902): n is a, c, g, or t
  misc_feature (904)..(904): n is a, c, g, or t
  misc_feature (906)..(908): n is a, c, g, or t
  misc_feature (913)..(914): n is a, c, g, or t
  misc_feature (923)..(945): n is a, c, g, or t
  misc_feature (951)..(955): n is a, c, g, or t
  misc_feature (960)..(988): n is a, c, g, or t
  misc_feature (990)..(1003): n is a, c, g, or t
  misc_feature (1005)..(1005): n is a, c, g, or t
  misc_feature (1015)..(1020): n is a, c, g, or t
  misc_feature (1022)..(1027): n is a, c, g, or t
  misc_feature (1029)..(1047): n is a, c, g, or t
  misc_feature (1049)..(1055): n is a, c, g, or t
  misc_feature (1063)..(1071): n is a, c, g, or t
  misc_feature (1073)..(1079): n is a, c, g, or t
  misc_feature (1084)..(1084): n is a, c, g, or t
  misc_feature (1089)..(1094): n is a, c, g, or t
  misc_feature (1096)..(1097): n is a, c, g, or t
  misc_feature (1099)..(1117): n is a, c, g, or t
  misc_feature (1128)..(1133): n is a, c, g, or t
  misc_feature (1136)..(1150): n is a, c, g, or t
  misc_feature (1154)..(1154): n is a, c, g, or t
  misc_feature (1156)..(1157): n is a, c, g, or t
  misc_feature (1159)..(1166): n is a, c, g, or t
  misc_feature (1169)..(1173): n is a, c, g, or t
  misc_feature (1182)..(1183): n is a, c, g, or t
  misc_feature (1186)..(1199): n is a, c, g, or t
  misc_feature (1207)..(1209): n is a, c, g, or t
  misc_feature (1211)..(1225): n is a, c, g, or t
  misc_feature (1227)..(1251): n is a, c, g, or t
  misc_feature (1254)..(1274): n is a, c, g, or t
tggcggactgggggccggtgctgatcgggctggtgctcttcatcctgctctccccgggcctgctcttccagatccccggcaagggccggatcatcgagttcggcaacttccagaccagcggcctctccatcctcatccacgccgtcatctacttcgccctcctcgccatcttcctcctcgccgtcggcgtccacatttacctcggctagctagtcgcccgtcgtcgccggcgggcggccggctgagcgaggctagctgctggcgcgcggcggcccggcccggcccggctttatttgacatcatctgggtggctggattaggtactgcgtggtgcggaggcatatactactatatatatacatttacatgttcatctccatctgcttgctagctgtaacnnnnnnnnnnnnnnncgannatnnnnnnangcancaacaatggggnnnnntnnnannnacnnnnnnnnntctcaggggncangannnnnnnntannnaccgnnncnnnnagacncannnnnnnnnngnnnnncnnnnnnnnnnnnnnnnnnnnnnnnnnntnnnnnnnnnnnnnntcatnnnngannnnnngtanaatnnnnnnnnnnnnnnnnnnnnngcaannnnnnnnnnnnnnnnnnnnnnnnnnnnannntnnnnnnnnnnnnnnnnnnnnncnnnnntntntnnnnnnnnnnnnnnnncccnaccaaacnannnncctcnnnnnnnncntaannngnnnntnnntnnngnnnnnnncnnnnnnnnannnnnnnnnnnnnnctnnnnnnannnnnnnnnnnnnnnnnncannnagannnnnnnctcnnncnnnnnnnnnnnnnnnnnnncntncnnnnnnnnnannnnnnnnnnnnnnnnnnnnnannnnnnnannnnntncnnntcgannctaccaccnnnnnnnnnnnnnnnnnnnnnnncacaannnnnctccnnnnnnnnnnnnnnnnnnnnnnnnnnnnntnnnnnnnnnnnnnncntaccttaatnnnnnnannnnnntnnnnnnnnnnnnnnnnnnntnnnnnnncttctttnnnnnnnnnannnnnnngcagnttcannnnnnanntnnnnnnnnnnnnnnnnnnntcatgctagannnnnntgnnnnnnnnnnnnnnnctantnncnnnnnnnnccnnnnngccaccctnnccnnnnnnnnnnnnnnccccctgnnntnnnnnnnnnnnnnnncnnnnnnnnnnnnnnnnnnnnnnnnncgnnnnnnnnnnnnnnnnnnnnntcttc

SEQ ID NO: 3994 - DNA, 747 bp, Zea mays
gtgcatgctgttgtcgtcgccgctctgctcaatgccacgctagtagtcccacggttcctctacagcagcgtgtggaaggacacaaggtactgaaaacgcactggacctttttcgtctcttcttttttttctttttctttcctatgtagccatgttgtctcaaagagaacgttcaaagttttctcacagtcctaaatgacaaaaagaaagaaagaatgttgaaactttttttttgctagcaataaacagtccccagcatgacgtggtagcttttgtttgctgtgcttgacatgccttgcctttcaacccaaccagtcagtttggcgacatctaccaggaagactacttcgtgaagtacatgaagaacgatgtccgaatcgtgaaagaactgccagcccgccttcggtcgctggacctcgaagcaatcggcagccaggttggtgcctccccctgctgcctctgtttgttcaacacctcatgtttcacggactcagggttccctttgcctgcctcagatcactgacatggagatctcgaaagaggccgatccatctgagttcgtcaaatcgatcctcccaatccttgagcaaaacggcgtcgttcacttcctcgggttcggaaaccggctgggcttcgactcggtacctgttcatctgcaggtaagggcaccagcttaaaaaaccgaataaaatgccatttcacgtgggcatttgcacgcgctgtttccaactgttgccatcgcgcagag

SEQ ID NO: 3995 - DNA, 719 bp, Zea mays
acggcgacttcaacctcaccaaccagtcccccgactccgccacgcgcctgcactccaccaaggtgctcggcacgttcggctaccacgcgcccgagtaagcgtccacgcgcgcacaccacgtaccactagctccgatcgactccgatccgcgctcaacgtgcgtgatctgcattatatattatattattgtcgaccggtgtcaggtacgcgatgacggggcagctgacgcacaagagcgacgtgtacagcttcggcgtcgtgctgcttgagctcttgacggggaggaagcccgtggaccacaccatgcccaaggggcagcagagcctggtcacctgggtacgtaggatccccccctctccatatattcttcatcggttttcctccatggccggcggccgtacgtcgtctgaagctctgcatgaattcagtcgcctaattaattacgcaacaaaatcctggctgctcgtacgtccacaggccactccgaggctgagcgaggacaaagtgaagcagtgcgtggaccccaagctcaaggacgactacccgcccaaggccgtggccaaggtacgccgttgaagcttgtttggacacgggacacccttgacttgaccatcatcctgttgttcgtgttgggctgatgggctcgatctctgtttctgttctgagttgttgcagctcgcggcggtggcggcgctgtgcgtccagtacgaggccgattt

SEQ ID NO: 3996 - DNA, 367 bp, Zea mays
catgagcttgccgatggctgcgatggcgagacgggtgttgtccatggacaccccgatgggcgtgccctggaagttgccaccgtgaagagccttgcttcgggcgacatcgatgagcgggttgtcgttgacggagttgatctcgcgctcaatggacttggtggcggcgcggataacctcaatctgcgggccaagccactgcggcgacgtgcggagcgcgtaccggtcctgcttgggcttcatcaaggggtcgagctcgccgagcttcttggcaagcttcatgtaggagctgccctccaagatgtgctccatgatggcagcagcctcgatctgtcccgggtggtgcttgagcttgtgggtcaggtggtcg

SEQ ID NO: 3997 - DNA, 353 bp, Zea mays
  misc_feature (344)..(345): n is a, c, g, or t
tttgacaaattgatactaaagtctgagtttgaaccaggcccattttgacacaagatgagagcaacctgctttttacctattttttcctatttcaggttcttgattagttggaatgagggaagactgaactgaggttcttgatcacttggtatagttattgcacatcagcaccaagcctaatcttttacttgttccagctatagctgacatggtctctgaggttgctagccagggggctgacttgatatagttatttttttggtccacttgctctattccatctatcctagatgctacttaagaacaatgatgtatccctgagttctatgggtttccctgtttannaacagata

SEQ ID NO: 3998 - DNA, 462 bp, Zea mays
ctcggacacaaaagatcttggtggtaatggcactagcagtaccggtgcttcatcagacagagggtcaaagaagaaaagggggaaagggacagggtctaccaaaggtggatcacttgaaaaggatgatgacaatgaagaaagcattcctgttaagggcaagaaatctcacaggaaaaacaaggatgctggtgcatctggtgacataaaacatggtggtaaaaaaacgtcagagaaaatgatagaggagaatgcaaatatctttcctgatgaattgatagaagaaaaggttttggctgttgctccagagttagaagagttgggaggtcaggaattagatcaatatttcgacaactgtttctttttgagttgaagtgattctagaagttcactaattctttaaatgaatattaggctctgatgactcaaatgccccccttaaattgttgtcttctcacctgaggc

SEQ ID NO: 3999 - DNA, 486 bp, Zea mays
  misc_feature (284)..(287): n is a, c, g, or t
  misc_feature (318)..(318): n is a, c, g, or t
  misc_feature (322)..(327): n is a, c, g, or t
  misc_feature (332)..(338): n is a, c, g, or t
  misc_feature (343)..(344): n is a, c, g, or t
  misc_feature (352)..(353): n is a, c, g, or t
  misc_feature (362)..(371): n is a, c, g, or t
  misc_feature (373)..(373): n is a, c, g, or t
  misc_feature (381)..(386): n is a, c, g, or t
  misc_feature (388)..(389): n is a, c, g, or t
  misc_feature (391)..(392): n is a, c, g, or t
  misc_feature (394)..(394): n is a, c, g, or t
  misc_feature (396)..(401): n is a, c, g, or t
  misc_feature (408)..(408): n is a, c, g, or t
  misc_feature (410)..(411): n is a, c, g, or t
  misc_feature (417)..(418): n is a, c, g, or t
  misc_feature (434)..(435): n is a, c, g, or t
  misc_feature (437)..(442): n is a, c, g, or t
  misc_feature (462)..(466): n is a, c, g, or t
  misc_feature (468)..(477): n is a, c, g, or t
  misc_feature (479)..(482): n is a, c, g, or t
gccccacgacacgccgaacccggcagtgtacacgcacaccagcgccaccaccgcgaccgcgtacccacgcggcatggacttgccgccatcggtgcccagctgcgcgccaaagatccacgccatggccacctgggagaggatcagaacggcgcttcccagcatgaggagggagcggcggccgtagcggtcgacggccagaccggccaccgcgatggacgccaggctgaccacgtcggtgatgatggaccacacaagccacggtgcacgtcggtgatgatggaccnnnncggaatactttaattggcgaacctaggcganggtnnnnnnctacnnnnnnnatccnntggactannttacaaatnnnnnnnnnnangatggatnnnnnntnngnncncnnnnnnttcagtntnnaaaatnngtatttgccgaccggnngnnnnnnttcaaagttggcgctttttnnnnncnnnnnnnnnnannnnctta

SEQ ID NO: 4000 - DNA, 415 bp, Zea mays
  misc_feature (57)..(57): n is a, c, g, or t
  misc_feature (112)..(112): n is a, c, g, or t
  misc_feature (171)..(204): n is a, c, g, or t
  misc_feature (208)..(217): n is a, c, g, or t
  misc_feature (219)..(333): n is a, c, g, or t
  misc_feature (343)..(345): n is a, c, g, or t
  misc_feature (353)..(358): n is a, c, g, or t
  misc_feature (362)..(380): n is a, c, g, or t
  misc_feature (386)..(403): n is a, c, g, or t
acaccttgaaagtacgagttgttttacatttatgaatttctctgcatggcccttttngctagtatgtcggtttttacttttgtggaccgttgcaggaaagatgcatcgtgcntgccattggatctgcggtggactatcgtcaactgggttctgtatgttaccatctgctgnnnnnnnnnnnnnnnnnnnnnnnnnnnnnnnnnnttcnnnnnnnnnntnnnnnnnnnnnnnnnnnnnnnnnnnnnnnnnnnnnnnnnnnnnnnnnnnnnnnnnnnnnnnnnnnnnnnnnnnnnnnnnnnnnnnnnnnnnnnnnnnnnnnnnnnnnnnnnnnnnactgttgaannnattatggnnnnnnaatnnnnnnnnnnnnnnnnnnnctaaannnnnnnnnnnnnnnnnnacattattttta

SEQ ID NO: 4001 - DNA, 316 bp, Zea mays
ctagaggcgacaccttccttgttctggccgccctcctgatgtgggccgtcggcgtcgccaagtacggggagaaggtggcggcgatcaggggcggcaacaagagcagcatccgtagctctctcacgaaggaaccgcccgccgccaggcaccaccacatccaccactgggaccacggcctgccgagcaaggacgccgccgtcgacgaggaagaagcttacctgcgccaggcacatcacatgttccacatctccaagcgcgccgccgtggattcctggctggagaaagaccccgagcacaacaccctggagatgctcag

SEQ ID NO: 4002 - DNA, 1024 bp, Zea mays
ctctaggtctgttttcttttggcttcttgtacgcagttctatcacctaagttttattttcctatgttactggacatattttctttattttatgtcttattactaatctttacctttggttctccagcctagcagttatttttggtgctggacttgtaactagtttatctccttgtacactaagtgttctaccactaactctaggatatataggtaactatattgttttgtttgagatgattgttggcaaaaatgcccagaattgatcatcattaattactctgattcagtgctttcttcataaacatttaggtgcatttggctcagggaaaggccgatccgaggtaatttaagatgagtgaaaaattgtacttctttatgccatggaaaaacttgaagatattgctatttatctgttaggatatgtattaccacaaagttatcttcactgaaggatttacttgactaattaaggctatgaataatgttgaaacctgattattctagctgggggcttcccttgatacatgcattgacttggcttttctatcaattataggttgttgggaattcaattgcattttcactaggactagcaacaaccttagccattcttggtgttgctgcttcttttgctggaaaggcttatggtcaggtaggacaagggctcccagtggctgcttccggtttggccattatcatgggattgaaccttctggaggtaaatcacatgaaacagaaactacatatatagactgaagcatgccaatcagaatttcctcctaccttgtttccttaagttacaagatgattcaatccctgtatttcttggtttctcattataaatactactgtagaagtacaaaccaattttgtgatagtttgttactttgttcttatgattttcgtattcctgcttgctcctgtaaagtacatgtaactacgttatcaaatgttctgccctaagctgtttattatctgtccttaacaggtacttgaattgcaacttccctcattttcagcga

SEQ ID NO: 4003 - DNA, 369 bp, Zea mays
  misc_feature (354)..(354): n is a, c, g, or t
tcgctagtgccgactaggtataatgtataaatcactgttttagatttggcacagggcctcaaatttctcaggcccggccctggacatgctgcatagtttaagtttttttgtgcaaaaggatgcagatgcctagggcatatatcatgacgaggctaatattcatctggaaaaaagagagatagaaaaagagctgtagaagcacgtatgtgtattgcaaaaagtaactgtactagaattataagaggaatatatcagttgcaaaaaagtaagggaggcttacctgctcatccccatgctcatgtcccgctgtggcattccagcaggctgcatgattacgatggtgatggagaagcnaaaacgaaacgaaac

SEQ ID NO: 4004 - DNA, 361 bp, Zea mays
tcctggttgtggaaatccactgcagcaagcaatggggaattgttaacagtttttcatcttgtgtgcagtgtcagaatagcatatatatagctgagcacataacctcataatcaaatcaatgcacccaggaattcgtttctgcatgcctaggagctatataaacttataaatctatatagaataaaattctttcatatggttcggtgctttgtgtcgtttgtatcaaccgctgctgctagttcaacgctacagtgacatgtgaggaggcagatagccatagcagcagctagaactgcctgccgaattgggcccacgtgtgttcatgtagactaagattctggacttgtgccatttatgcaat

SEQ ID NO: 4005 - DNA, 398 bp, Zea mays
tccgcgcgcaggtgcagctcatgcagagcctcgtcgacctcttctctccgcccaacccaaccagtaattaatcaataccgcatggtcaattgattcttccctcttgcaccgccgtcgtcgccgcggtttgtgtctaaatcatcatcgcatatctcttgttcatgccacacatgcatgagatggatcgatgcatgattaagataggagattatatattgttgaggagagagatcgattattattattgctgctagtgcatatgtttagtgggtgtataggttgggaacacacattcatggaggatggaaccacacaccgatcaattggagggagggagaagagattgttcgggtaattaattgtaatatatatagagagagacaattgagccacataca

SEQ ID NO: 4006 - DNA, 375 bp, Zea mays
gcagtagagcatgaattgcctgctggggctgctccacaaccagttctcgatgtgccattggcagggaagggagagcttaaacatcatcagcccgttgaagaagctgccgaggtacacgaggatgtgcagtgcaagcaggaagctgagtgtgaggcccatacagttgatcaacaacaagaactggttcctgaagtggagtcggtcacaggaaaaaatgatgatgtgaatgttatccatgaatgtagcttcagtgataaagtggttaccgaattgcctgtgggggaagtgacatcgcaagggctgccgaaggatgaccctgaggcagacatggagtttgaggagtgggaagggatcgagaggagtgaagtggagaag

SEQ ID NO: 4007 - DNA, 416 bp, Zea mays
gaaacgttcttatctcaccaatggagattcaggcgtacaagttagacttacagccaccatcatcgcaggaagagtagtttgtggaatcagtacatgcatattgaacagttctacaagacagtgaagatggatcttcccgaaatactttaatagtggcagctagtaccggaacagcagtgttgcatgtatatatgtcattttcttggcatacagttagtgattggacctatggaagttgctggaagttgtcgttgaggcatttggttgcagccttgttatccacgaaggtgcatgcccttgttcttggtatcatgctcaacagattggaaagatctggagcacattgaagcagagctaatttgatttgggtagacctatgtgttcacacgaccagtgttgattcgtccaatgctaac

SEQ ID NO: 4008 - DNA, 212 bp, Zea mays
tccagtccagccatggtcggccccgagatgctcgtcgccgcgacggtgaaccaggtcgttcggaagatcaacgagatcatcggcgtcgcgcagggcgaggcgaagctgtgctgcagcttcagcgacgacctcgagggcatcaaggacaccctggtataccttgaaggcctcctcaagaacgcggagagcaactcctttgggagcgataggag

SEQ ID NO: 4009 - DNA, 416 bp, Zea mays
ctgccggtgccaggctgccgggtgccacagtgccctgccacccagcatcgctcaatcactcgttcgatccatgctgactcacccgaatggtgtggtccggccgtcgaccaaggagccgctcttctccttcggcgtcatcgccgacgtacagtacgccgacatcccggacggccggtccttccttggcgtgccgcgctactaccgtcacagtatcgccgtcctccggcgtgcggtcgagaggtggaacggcgagaggagcgtcaggttctgcatcaacttcggcgacatcgtcgacggcttctgccccaaggacaggtcgctggccgccgtgcaggccgtggtgcgcgagttcgacggcttccgcggcgggccgacgtaccacatgctcggcaaccactgcctttacaacctacaaa

SEQ ID NO: 4010 - DNA, 402 bp, Zea mays
agaaaagaagcaagaagtagaagagaaggggacgacgagtaactaacctgccgctgctgcagtgctgcctgcgtgcctgccggtggaactgacgaactctactctagactgaccgaggaagatgagaccagagtggcagatacgccttcgcccttgcctggcctgaactcgaaacgttccggtctcgttccgtcggcggcggcgtcaagtcgatgcaagcagaagcaggagcaggactacgggaggtgaaacaggaaagcagggccgcaggggacagtggccagtggtggtgctgtgaagactgaagacaaggcgacatggcattgggaaccacgaaagcaaaagcttgggtttctccctctgtcaagtttatgtatatgtatgtaaaggaggaacgaaggt

SEQ ID NO: 4011 - DNA, 468 bp, Zea mays
actattacatcacatcttaatggcgctagtgttaaggttgtcagctgtattatccaaagggatgaagggcgtccaccaatgcgacactccttccaatggtctgttgacaaactttattatgaggaggatccaatgcttcgccatgtggaacccccgttgtctacattccttgagctggtatgcagctatattcatacttttcatattcttttaatatcctctttgactataactgcacctctttaacattttctgtaaatacaggaaaaagtaaacttagaaggttacaatgaagtaaaatacactccatcacgtgatcgtcagtggcatatttatacgcttatcaagaacaagaaagatcagagattaaatgaccagaggatgttccttcgtaccatagtcagacaaccaagtgcaacaaatagtttcctgacaggtaatattgacaatgaagtagggcacacacaa

SEQ ID NO: 4012 - DNA, 1511 bp, Zea mays
  misc_feature (426)..(427): n is a, c, g, or t
  misc_feature (433)..(434): n is a, c, g, or t
  misc_feature (439)..(444): n is a, c, g, or t
  misc_feature (447)..(447): n is a, c, g, or t
  misc_feature (449)..(457): n is a, c, g, or t
  misc_feature (459)..(459): n is a, c, g, or t
  misc_feature (464)..(476): n is a, c, g, or t
  misc_feature (478)..(487): n is a, c, g, or t
  misc_feature (489)..(501): n is a, c, g, or t
  misc_feature (503)..(509): n is a, c, g, or t
  misc_feature (512)..(542): n is a, c, g, or t
  misc_feature (546)..(562): n is a, c, g, or t
  misc_feature (564)..(564): n is a, c, g, or t
  misc_feature (573)..(581): n is a, c, g, or t
  misc_feature (584)..(606): n is a, c, g, or t
  misc_feature (609)..(620): n is a, c, g, or t
  misc_feature (625)..(630): n is a, c, g, or t
  misc_feature (634)..(634): n is a, c, g, or t
  misc_feature (636)..(646): n is a, c, g, or t
  misc_feature (653)..(656): n is a, c, g, or t
  misc_feature (658)..(661): n is a, c, g, or t
  misc_feature (664)..(675): n is a, c, g, or t
  misc_feature (684)..(687): n is a, c, g, or t
  misc_feature (689)..(690): n is a, c, g, or t
  misc_feature (693)..(693): n is a, c, g, or t
  misc_feature (696)..(706): n is a, c, g, or t
  misc_feature (710)..(714): n is a, c, g, or t
  misc_feature (717)..(721): n is a, c, g, or t
  misc_feature (723)..(725): n is a, c, g, or t
  misc_feature (727)..(731): n is a, c, g, or t
  misc_feature (736)..(742): n is a, c, g, or t
  misc_feature (746)..(748): n is a, c, g, or t
  misc_feature (767)..(769): n is a, c, g, or t
  misc_feature (777)..(786): n is a, c, g, or t
  misc_feature (792)..(792): n is a, c, g, or t
  misc_feature (794)..(798): n is a, c, g, or t
  misc_feature (800)..(800): n is a, c, g, or t
  misc_feature (808)..(809): n is a, c, g, or t
  misc_feature (811)..(814): n is a, c, g, or t
  misc_feature (816)..(821): n is a, c, g, or t
  misc_feature (825)..(833): n is a, c, g, or t
  misc_feature (837)..(862): n is a, c, g, or t
  misc_feature (864)..(866): n is a, c, g, or t
  misc_feature (872)..(886): n is a, c, g, or t
  misc_feature (889)..(889): n is a, c, g, or t
  misc_feature (893)..(904): n is a, c, g, or t
  misc_feature (906)..(924): n is a, c, g, or t
  misc_feature (926)..(926): n is a, c, g, or t
  misc_feature (930)..(936): n is a, c, g, or t
  misc_feature (938)..(944): n is a, c, g, or t
  misc_feature (951)..(956): n is a, c, g, or t
  misc_feature (958)..(963): n is a, c, g, or t
  misc_feature (974)..(975): n is a, c, g, or t
  misc_feature (979)..(980): n is a, c, g, or t
  misc_feature (989)..(990): n is a, c, g, or t
  misc_feature (992)..(1000): n is a, c, g, or t
  misc_feature (1002)..(1009): n is a, c, g, or t
  misc_feature (1011)..(1019): n is a, c, g, or t
  misc_feature (1023)..(1029): n is a, c, g, or t
  misc_feature (1031)..(1052): n is a, c, g, or t
  misc_feature (1057)..(1076): n is a, c, g, or t
  misc_feature (1080)..(1082): n is a, c, g, or t
  misc_feature (1085)..(1092): n is a, c, g, or t
  misc_feature (1096)..(1104): n is a, c, g, or t
  misc_feature (1106)..(1107): n is a, c, g, or t
  misc_feature (1112)..(1113): n is a, c, g, or t
  misc_feature (1115)..(1117): n is a, c, g, or t
  misc_feature (1119)..(1133): n is a, c, g, or t
  misc_feature (1135)..(1139): n is a, c, g, or t
  misc_feature (1153)..(1160): n is a, c, g, or t
  misc_feature (1165)..(1179): n is a, c, g, or t
  misc_feature (1182)..(1195): n is a, c, g, or t
  misc_feature (1197)..(1200): n is a, c, g, or t
  misc_feature (1203)..(1204): n is a, c, g, or t
  misc_feature (1206)..(1206): n is a, c, g, or t
  misc_feature (1210)..(1216): n is a, c, g, or t
  misc_feature (1220)..(1220): n is a, c, g, or t
  misc_feature (1222)..(1230): n is a, c, g, or t
  misc_feature (1233)..(1233): n is a, c, g, or t
  misc_feature (1235)..(1247): n is a, c, g, or t
  misc_feature (1249)..(1251): n is a, c, g, or t
  misc_feature (1253)..(1258): n is a, c, g, or t
  misc_feature (1261)..(1271): n is a, c, g, or t
  misc_feature (1273)..(1282): n is a, c, g, or t
  misc_feature (1284)..(1287): n is a, c, g, or t
  misc_feature (1290)..(1294): n is a, c, g, or t
  misc_feature (1296)..(1298): n is a, c, g, or t
  misc_feature (1303)..(1305): n is a, c, g, or t
  misc_feature (1308)..(1326): n is a, c, g, or t
  misc_feature (1330)..(1332): n is a, c, g, or t
  misc_feature (1335)..(1355): n is a, c, g, or t
  misc_feature (1362)..(1363): n is a, c, g, or t
  misc_feature (1373)..(1375): n is a, c, g, or t
  misc_feature (1377)..(1407): n is a, c, g, or t
  misc_feature (1409)..(1412): n is a, c, g, or t
  misc_feature (1415)..(1426): n is a, c, g, or t
  misc_feature (1428)..(1430): n is a, c, g, or t
  misc_feature (1432)..(1438): n is a, c, g, or t
  misc_feature (1440)..(1453): n is a, c, g, or t
  misc_feature (1455)..(1461): n is a, c, g, or t
  misc_feature (1465)..(1487): n is a, c, g, or t
  misc_feature (1489)..(1502): n is a, c, g, or t
  misc_feature (1504)..(1508): n is a, c, g, or t
cagcttccatccgctccaaggagaatgctcgtctgcgtcaccgccggagcccataatggatcaagttgcggtcaccgtgcaccgtgcgccgcctcagcttctccctcaccgtcaccgcccgaggccctgcccgtacgcgccggtgatggcaacggtatcagcagcggaagctgcgccgcaattggcacacgcggcgactgcccacgcctccacgtattcgctcttcaacatggccgctgccgccgccgcgcctatggccgccagctcaaggtcgaccattgacgagctgacaacgctggttgttgctcccacccaggcctacgccaacctctcggccgcgacgacgggcggccatctcctcccatatctgacgccagaaaaaatatctgatctgaataggcacaccatctttgtgatggatgaccnnactaannatgtnnnnnnggnannnnnnnnncnctttnnnnnnnnnnnnnannnnnnnnnntnnnnnnnnnnnnncnnnnnnnagnnnnnnnnnnnnnnnnnnnnnnnnnnnnnnngtannnnnnnnnnnnnnnnngnaagaactannnnnnnnnccnnnnnnnnnnnnnnnnnnnnnnntcnnnnnnnnnnnncctcnnnnnnactncnnnnnnnnnnncataacnnnntnnnntcnnnnnnnnnnnngcgacttcnnnnannctnttnnnnnnnnnnncccnnnnntannnnncnnnannnnnctatnnnnnnnttcnnnttatttctattttcttccnnncttactannnnnnnnnncccccngnnnnntnggaccaanncnnnncnnnnnnctcnnnnnnnnnacannnnnnnnnnnnnnnnnnnnnnnnnncnnncactannnnnnnnnnnnnnnctnattnnnnnnnnnnnntnnnnnnnnnnnnnnnnnnnanaccnnnnnnnannnnnnnccccacnnnnnnannnnnncatccccttcnntccnncaccatacnnannnnnnnnncnnnnnnnncnnnnnnnnnacannnnnnncnnnnnnnnnnnnnnnnnnnnnnccctnnnnnnnnnnnnnnnnnnnntccnnnccnnnnnnnncccnnnnnnnnnanncttcnncnnncnnnnnnnnnnnnnnncnnnnnccttccatcctccnnnnnnnntcccnnnnnnnnnnnnnnnctnnnnnnnnnnnnnncnnnnctnntntctnnnnnnncccntnnnnnnnnntcntnnnnnnnnnnnnncnnntnnnnnntcnnnnnnnnnnntnnnnnnnnnnannnntcnnnnncnnntctcnnnttnnnnnnnnnnnnnnnnnnncccnnnttnnnnnnnnnnnnnnnnnnnnntcctctnncaccccttannncnnnnnnnnnnnnnnnnnnnnnnnnnnnnnnncnnnntcnnnnnnnnnnnncnnnannnnnnncnnnnnnnnnnnnnntnnnnnnncacnnnnnnnnnnnnnnnnnnnnnnntnnnnnnnnnnnnnntnnnnnttt

SEQ ID NO: 4013 - DNA, 552 bp, Zea mays
acgctctctggtgtatcttaccatgtttgctggcacaagcacaacagatcgatatgaactcttcatctctcgagcagtttgtatctctattgcttggcaggttcacacacattaaagatgatcttgaaagccacagagttgacaaaaaagaggagttgacagctgaggacgcttacttgaagcatggggtatccgcatctgtatccttcctttcccattgaaataacttgctttgttttttcgtgaaaaaaccataacggcttcatggagatgtggaagtatttattcactttctcaaatttaacacgtcaaacatggcgaaccattttggagcagcaccacattgcatttcctatcctaaaaataatcaacagctcagggcgatctgctgtgtcatggagaggtggatcgtggagaagtcctccctgggcgaagacgaagacgacgccccaccgactgaaagcaccgttgaagatgctagacatcttctgaactactgccagaattatgacctgtagcttgcttactgcaactttagtggacatagctgac

SEQ ID NO: 4014 - DNA, 364 bp, Zea mays
tcttgcttgatgatgaagaagatgggaagaaacttgacaagagccgctggtctgtcaatttggacccactttgctggatgattgttgatcgtgtgtacatgggctgctttccaaccccactcagggtactacaaacactagaattcttaatgtcaatgttacagcttgctagtaaagatggccgtgttgaagatgccgtgcctccagggaaaggtattttgtccattgctcgaggaagcaggcaacttgatccatacatccacgcgatattgaagaacacaaaccgaatgataatgtactgtttcctcccaatattccttaaaagtatgggggaagatgatctacttgcaaatcttgcattcct

SEQ ID NO: 4015 - DNA, 337 bp, Zea mays
tggaatataacaagaaggtggatcaagaagataccattaacagacaagggacagctaaggaagacagtggtgtggagccacaagaggagaacgttgtggatccagatcaaggtttggatgacttttctgtactagatgagggtaatgtggtggcacagtgcaccagtgatcaattgagaacaaccatggaagataatgctgcagagatgcaagaggtggtggagcaagaaggtgccatttttgaaaagggtgtgacctcagatggcattactgttgaagatcaagacaaggaaatggaacaatctgcaggcgatgaatcaagagtgaccaagggtga

SEQ ID NO: 4016 - DNA, 387 bp, Zea mays
  misc_feature (21)..(23): n is a, c, g, or t
  misc_feature (218)..(220): n is a, c, g, or t
  misc_feature (321)..(323): n is a, c, g, or t
  misc_feature (346)..(349): n is a, c, g, or t
  misc_feature (355)..(357): n is a, c, g, or t
cccgaagcagtttttgatgannnacgaagcaacagtatcttcgtatggtggcaatgctgcagtcatggcaaaatcttttgttatggctgtcaggagtgttgctcaaacctggtattcctcccttcgaccaggaacgatcacttcatggcagaagctgaaggatatgttgttaaccagctttcaaggatttcagacgaagccggtcactgctcaagctnnnttccagtgcacccaggatcacgaagaataccttcaggcgtatgtccgaaggttcttgcgtttgagggcacaggcaccaacggtgcccaatgaaattgtcannnaagccatgatcaaggggcttcgnnnnggaccnnnagctcaatactttgctaggaagcctcctca

SEQ ID NO: 4017 - DNA, 921 bp, Zea mays
gcatctattcttatagtttcagactttgggagatacacaaaggaactggcttccctgaggaaagatgttgtggcaccatatgtgcatgttgtgggttccttccttgatgacgatccacctgatccatttgaggctcgccatacactgcttttctttcgaggccgtactgtcaggaaagatgtatggaactgatttatgattgtaataactccctcttccccttctctatgatctatcttaatttgttagtctagttcactcttttttctaaagggcaggcttgatgcagtggtgagagagctatctcactgaatcatcgggtcacgagttggaggcagcctttctacatttgtggaagaaagacttgcctcaatttattcttttcctagaccctactcatgtggggtttgccctttttagttcactcttttttctccttggcggaatttgactaggcattaaacaactttaaggttaaatttatttatagcgttcatttaatttttttcaggaagggaaaatccggtcaaaacttgagaagatattaaaaggcaaggaaggggtgcgctttgaggatagcattgccacgggcgacggcattaacatagtaagtcatttttcccatttatactctttttcttagtgatattaacatttttctgttaagttttttttatagaagggtagacccgatgcagtggtgagaattatctcatggagtcattaggccatggtttgaagcagccagacctcactcatgtgggagcctccggcattgggtctgcccttttattaaggcttctttacaatagagcatgaaatttacaaatctggttgatcctaacagtctacagaaggtatgcggtcatcaaagttttgtctccaccctgctggggacactccttcctcatgccgcctgtt

SEQ ID NO: 4018 - DNA, 360 bp, Zea mays
ctcctcagcctctcaccgtctcacgcacaagcacaaaaggccctcaagtaccggagagggagcgtctggttcgtcgcagccctcagccacggtcacgggccgtctgtgcgtactgccaacctagcgcaacacgtcgctccctatgtcccaacccgtgacccccccggcccccgtagtctgtcccactctgctgctgcttcccgtgatcacgtccacgtgtcgctgcgacgaccgatcactgaccaccggccgccgcaacctagtactactgggatgagagggatcggggcatcgggccgtcggggcacgaacaaaagcagcgggaaagtgacgacgggcagggcgggaggagaagctgtg

SEQ ID NO: 4019 - DNA, 595 bp, Zea mays
  misc_feature (561)..(563): n is a, c, g, or t
gcgtgcgcatgttttagttatgtatatagacaactagcagctagatcgaccattcggctcttaatcaagagctagctgtccactacaacgtgtagcacgacgctatcagggcatgtacaacctagatacagctgcacggtactccaagtataagacacaactaaaacacaacataatacagtggtcatgtctaaaacatgtgtcttaccatattcattgtaccaatcagagcattcaataaattaaagtgaccaatcagatagtctcctgtctcgaatatagagctaagacactgtgtcttcgtcaagatacatgtcttgagattttttatattcacccccctagacacactctaagacacaacttaagatacccactgtacatgccctcacactgctaacactatacattaattactagctagcgacgacgaaggcgatagctgttgtcgtcttagcaagaacgaaatccagaacaatacaatactgctggtacacagtattactagctaacgactgacctggcagggcgatgaaagcgtcggcatgtttcgccatttcnnncttgcgctgatgcatgtccctgaccactttca

SEQ ID NO: 4020 - DNA, 1011 bp, Zea mays
  misc_feature (1001)..(1005): n is a, c, g, or t
gcatttgatgctggagaagatggacttggaaaaaatgctcattctcttaagaaggttattttattcagttcttgatgtgtatactttgacgttcaaaatttttctttgatttgactatgctctttaacctttttgtgcagggatgcgattgcttgggctacataaaatattttgatgcacatttcacaaacttcactggtggtgtggagacaattgagaactgtgtttgtttgcatgaggaggatcatgggatcctttggaaacatcaagactggagaactggtttagcagaagtaaggcggtcaaggaggctcactgtttcatttatctgtacagttgcaaactatgagtatggtttttactggcacttctatcaggtaatatttcatttcctcttataatgttagaaagtaagtaccatttacctacaatacccaatatatatattatctatataagttgattaccgctcactgatgggttttagtgattaaatgttcttaaaaatttctgaagctttttccgcgatcatgtctaagcacatttttcttaaaaatgttacttcatttcaaaggaattgaaatttactcaatagagtaggttatttggtttggaatttgacattccaccactttcccaacttatagatataagcctataacacactcataggatgatgtgtagaaattgattttatgtatatatttctattttctactctgcaacttataacacgctattcggctcactactctatagtagaaatttaacatataaatatcttccacatatggccaacatcaatatacgattaaattatgtataccatattagcttaattgttctatgcctaaattaagattattagaatggaattcaattctaaggatccaaacggggactaagaggaaataattttctgaagcttcaaagttttgtaattatttgttgatcctcttggttgcaggatgggaaaatagaggcagaagtaaagcttactnnnnnctcagt

SEQ ID NO: 4021 - DNA, 401 bp, Zea mays
aaactcgctgtccaaactttgctgcatgcacctgctgtaaccctgaagttggcagaacctaaaagcgttgaaaaatcttatgccttctgcagcacgatctcggcggcgtcgtatgcaggcctgatctacctcggtctacgcttcctgcgcaagtccatactgagcaggtaaaaaacgctgctaatctaatctcctcggaggaccaagcaaaaccatttcttgtgtcattgataaccatggtaaggtaaaaaaaaacgcaggggtgaaagtgtggagtgcgacgatgatggaggcgtcggcggcgataggtgctgctacctggtcggggaggaggatgccgtgtggctgctgaggctggtgctgccgtacgtcaacgaggtgctgctaaacctgaggtctct

SEQ ID NO: 4022 - DNA, 390 bp, Zea mays
taggtagtccggccggccgtacgtatttcctggtgcggctggtgccgtggacgacgaggttggtcatgttgccgatgaggtaggcggtgaggccgaggttgaagagcatgtagaacgtggtgaacaccatctcgcccgtgttcacggcgtgcatgtcgccgtacccgacggtggtgagcgtggtgatggaccagtacatggacgcggcgtaccgcttccacacgctctgctgcttgaagcccggcatggaggagctcagccacgtgtgcgccgggtccgggtacctgtccgccagcaggtagtagaagcaccccgcgcagtgcaccgcgaacagcgtcacctgcgcgcgcagacagaaagacagttccattatttgctgatcagtctgct

SEQ ID NO: 4023 - DNA, 341 bp, Zea mays
cagctacttcaatgccacatctttcgttggcaacccaggcctgtgtggaccataccgcggtccatgcagtgcaggcattgctggggcagaccatactgcccatggccatggtgagctgaccaattcggtcaagctgctcattgtgctcggcttgttgatttgctccattgcatttgctgctgcggcaattctgaaggctcggtcattgaagaaagctagtgaagcgcgagtatggaaactcactgcattccagcgcctggacttcaccagtgatgatgtgctggactgcttgaaagaggagaacattattggcaaaggtggtgctgggatagtgtataagg

SEQ ID NO: 4024 - DNA, 488 bp, Zea mays
tgcaccaatggctggaatgatatctgcaggcacagaaaaacttaaccagtctgatgtgaataaaatgaatgtattcagtttaacatatgaattatactggaaacaaggctgaatagcgtaagaacaaatggaaacaggaaacatacatcagcatggggaagccattcttttggaggagcttccgcagaaagaagacaattctcaatggcaaataagacacgattctttcctggtgtgggtaatgtcacatgtgacaccatatgagatattatgtcccacaaaggcttgctgaaacccgataacacaaaattaaatggtgaggtagttgaaacttgaaacaagcacacacaaagtacatgaatactaaatttacctgcaccctgaaggagaaaaacaaagaacaaatatttcctcaagggcatcacgaaggacttggaaactaggagaatgggacacaaggcagatgcatttatcagcaaaggagttcg

SEQ ID NO: 4025 - DNA, 384 bp, Zea mays
  misc_feature (372)..(378): n is a, c, g, or t
cgcatagtacgcaagggtggcgttcttcagcctgcacagcatcagcaggaagtaccgcatctgggcgaagcagacgcccaggttcagagccacggccagaacgtgtccggccgagtgaaccttcctgccaggtaaggtccagaagaacgagccccacgaccagctgaggccgcaggacacgacgcacgtcagggcgaacgtcgcggccgtgtaacccaccggcatgcgcgttcctccgccaaccccgatctggacttccatgatcagtggaatcgcgaccttgcagacaaaatttcgaccatgaacagtatcagttgcttgtttttcaagaacacgtttgagtgtcttagtttttttttttacaaaaaaatnnnnnnntttcgg

SEQ ID NO: 4026 - DNA, 532 bp, Zea mays
tttgccggttgtttatgtgttgtttgtcccgtcggttgcaggcacaggggaggtggtgacatgctcgcccacccagagcccggagcttttcttcgccgtacttggtgggcttggccagttcggtatcataacccgcgcaaggattccgctgcaagttgctccgcccaaggtacacagacacaattgcgcacgccctcgatctgcttcctctctagctggtagcagaaatagaaagaaaatcaggaaagctggtaactaaaagcagctttaatttggccgataattttctatgattattaggtgagatgggtgagggccttctacgacagcttcgagacgttcaccaaggaccaggagctgctggtctcaatgccagagctggtggactacgtggaggggttcatggtcctgaacgagcagtccctccgcagctcctccgtggccttccccgcccaggtcaacttcagaccggacttcggctccgacgacggcaccaacaagaaggtctgctactactactgcatcgagttcg

SEQ ID NO: 4027 - DNA, 338 bp, Zea mays
  misc_feature (9)..(11): n is a, c, g, or t
  misc_feature (157)..(158): n is a, c, g, or t
  misc_feature (255)..(258): n is a, c, g, or t
aatggcccnnnggcgcggagtaagtgccgatactccacacgtgtcctcctgtcgtcgatgatgatgtctgtcccggggaggggagtggttgtcgtggtgcctcgaccgtccccgggtggtgccaccagttgaagccgtggccgactcggtcctggtnncctgactccgagctgggatgccatgatcccggtcgtactcttcccggcgacggatctcgttctcatgtcgtcgttcacgcgaagcattgatggagcnnnncgcgtcccggcgactgttgatggcgtgtcgtagatcgttcggcgggtgagcgaggggtaggagatgattggctgcttgag

SEQ ID NO: 4028 - DNA, 373 bp, Zea mays
tacacggtaaccattctgcgcctttcctaaaagtcacacgccagtaaagtaatgatcactctgcttcattttccttggacttaatgcctctgctctttccccagccggtgcaatgcttcatttggactggacggattttggacttaacgagactgatgcatgaatcatgatggcatgagaccttcgtttagcacactgccagctataattctctagcttttgtgtagtagaatttggaaacatgcgttgctgttggattaggcgtctgtttgtaaataggtgtccctcgcattcaaatgttgcagcttaggccctaggatccattagctactaatagttagctagctaatagtctaaagggtgtttgaacgac

SEQ ID NO: 4029 - DNA, 387 bp, Zea mays
tccttgcagagcgcggcatatatggtcatccgtgggctcaaaacgatggcactccgcgtcgaggcacataacagcacggcgctgcgcatggcacgcatgctagagcgccacccgaagatcgagcgggtgcactatcctgggctggagagcagcccctggcatgagcttgcaaggactcggatgtccggctacggaggcgttgtcagcttcgagttgaaggcggacttgcgtggtaccatgcgttttgtcgatgcgctggaaatccccttcatcgcgacctcgctaggcggctgcgagagcctggtgcagcaaccggcggtcatgtcgttctggggccacagtgaggaggataaggccaagaacgggatcaaggacaaccttgtaagg

SEQ ID NO: 4030 - DNA, 228 bp, Zea mays
  misc_feature (182)..(184): n is a, c, g, or t
  misc_feature (194)..(197): n is a, c, g, or t
  misc_feature (216)..(220): n is a, c, g, or t
gtcccgaaacagcagcgatggtttagtgcctctgcctcttaatgcagatggtgctgttggttcaggaacaagaacaagggaccttgaaaattcactgcagaaggcacaagaaaactttattaagagccagattgaggtaagaaagaatcttgatcccgaaagtactctttttttttgaacgnnngattccaaannnnctcaacttacatccttccnnnnngctttatg

SEQ ID NO: 4031 - DNA, 378 bp, Zea mays
cgacggcggcggcgagctgatacgcaccggtagggcatccaagctcacagacgtgttcgccttcggtgctttccttcttgagatcacctgtgggcgaaggccagtcagcattgacgacgacgccgctcaagaaatgctagtggactgggtcctcgaccacttgcgcgaagaagggtcgctcgctcagaccgtcgacgtgaggttacggggtcaatatgatgtcgatgaggtgttcctagtgctgaagctaggtctgctgtgctcgcatccatacacaaacataaggccagatatgcagcaagtcatgcaatatctcgacggaagcacaccacttccagatttgcagcccacagatatgaccttcagtgcaatggctct

SEQ ID NO: 4032 - DNA, 366 bp, Zea mays
taaaaagaagtaaaaatcggacgatccatcaacaaaactagaacaaagccatgttgcagcgtagctatcatgtatacaagccgaagcaaatctatccccttcctattatttacatcggatgaccaaaaggaggcctgctcagtatctgttggtaagctggcggaggtgcaattgacgttgggaagtgtggtcgcgagaaaggctctacctttggctctcctggcatcataagccctgggtacccctgcatagctgatggatttccaatcatttttgtaggggcaagtgatcctagagagggcattgggatcgtcgcgcctggcggaaccatgccgaagcggaaattaccagttgttggtcccaact

SEQ ID NO: 4033 - DNA, 386 bp, Zea mays
tgtctgcggaacagatcgtctctcttcggtaacgacagcctagcgtaggccctgcatgcatgacatccaaagaggagggcaaagccagtgcgcctgtagcatcgttgtgccctctttctttctctccatcatttgaagagacggaggcatccagcttggttttggaacgtgcgctgcttaatcgacttgtttatctttttctgtcacctgcttggattcccctctctctcgttgtcgttgtatagaggagatgatggaaccaaagcagttgttgctcctttgactgagatatactatatacacgtagctgggcgtaaatcgtaatgcaagccccgttatcgtcgccttgtgatgtatctcttctgtcagtcgtcatgcatactctg

SEQ ID NO: 4034 - DNA, 376 bp, Zea mays
cgaggacggccttcatgaactcgaagaggctgagattgatgagtatgttgccgaaattgaagcagagaaagccgctgccgaggctgcaaagaagggtgcaccaaaggggaactgattccgcacaagcttagattgcgcctcttgttccagagcatgtcttatgattcacctcttagatgattgcccggatgtttggatacaggaatatttataaaaaaaaattaagatgaagccgcttggatgaaaacatgctatgtgatgcatagtattgcaataccatggtggtttgtggcttgtgtgacttgtcgcagtggtctcttgatctgtcagtattattttctggaacctgtcagtattattttctggaacctggatg

SEQ ID NO: 4035 - DNA, 364 bp, Zea mays
acagtcggcggcggtcggccccggcgtcgaggagaccctggtggcagcgctagagaggaccggcggtgcactcccctttctccaggcggccatcgatgtcgctcaccgcaggtctggcctgttccgcgacccttcggcggtgagcaaggttaccgcgatggcggcggccgtcagggcgcaggtggagaccgaggagagggcagccagagaggtcaagaggaaggcggaggaggccgagaggaaggctgcggtcgaggcgcagaagcctgacatggaggcggcgacggcgacggcggaggagaagctggagaaggaccgtatggatgcggataaggcggaggaaggcaacgttagacaaccaaat

SEQ ID NO: 4036 - DNA, 367 bp, Zea mays
cgtcttctgcgccaccgtccatactcccatgtagaccaaggccttgcccatggccactccaacggcgccgacattggcaaccaaaacaaacgctgtgggaaccagcatcggcgtccacctcatctcgtacaaatcggcgaacttgtcgtcggtgcccgcggtggtttgcttggaggtgaccctgaagtgtatgcccttcctggtgaggagtttctttgccatgtgccatagcgctatcgggtacgcgctcgtggatccgatcatgaagaactgctcattgcgccagtggtccagccatgccacccctgaccacttcatctcgagccatccaatcatgtggatcatcaggatggttatgagcaggtac

SEQ ID NO: 4037 - DNA, 363 bp, Zea mays
gacgtcattgatgatttcagtgacgcaatagggcccaaagaatctgggctgcagctttcccttctgtgccagggacatggacgccaccggccgattgcggagacgcaacaggacccagtcccccacgttgtaggccaccgcccggtgtttgttgtcgtagaaccgtttctgtacagcctgagcctgctccaggcgatgtcgtacatcctccaggaatgcttcccgctctgccattgtcttggccactgctgccacccgggtatcccccgcctcataggaccggatggatgggggatgtcgaccatacaccacatggaagggtgtgtcgcggagcgaagactggtacgccgtgttgtacgtgta

SEQ ID NO: 4038 - DNA, 389 bp, Zea mays
gtgtgtgtgtgtgtatggagggcatggcggttaaggaaggaagggagcgatttgcagcgcacctgcatgcatgattgctctttgctcctacgacagcctagctaacggcggcccgtgcgtgaggggagagggaccttgctatgctagcaccgagatctgagatctcggcgttactagctaggtgtggtgtaggtgatccatcgatgggtcgggggtcgctgtcgccgtcgtacgtcgttcgttcatcgcacgtacacgcgcacacagtgcaggattcctgctgcaactgttggttttccgtcaacgcgcgtgcactggatgtggtcgttcccccatcatcatccagatcgcatcacttgttttccacggcccgttctgattctgaccac

SEQ ID NO: 4039 - DNA, 964 bp, Zea mays
agcttttatagcctctgttatttgcagtgttccttttggtgtatatgctgctgtggtggtttatcaggtattgacgaatctttttggactggtaacagaaaaatatcatttgtagtataaagctagtattatgatgaaatattacctgatttagcatgatagatgtggaggcgtgaagcttataattgcaatcttgtttatgtggcaggaatcctcacttttcttgggactgtcttatgcaatatcatcagtatccatctttgatgaatatacaaatgacgtacttgacatggcaccaggatcttgctttcctaggtacaaatggtttattctgtaccagaatattgtccttgaattgtacaccaaataatacaagttactcaaaatttcactttccatgagtaggtttaaatataggacaaatgaagcttcctcacatggtggctctctctcgagacccgcttcattcaaggacaagcatgatggaaagaaagcccctcagcgtgtaacatcatttaaaagtagctttgatgagttcaatccattcaaggtgatctttttctggaaaattggcaaaagaaatttcactgtgttcccactacataaacattctctatactgacactggtccatgctccatttagattagtttcattgtattctatttcctccattctaaattataagacattttgacttttctagatatatagcttttgttaggcacttagatatacaccatgtctaaatacataacaaaagcaatgtatctaggaaaaggcaaaacgtcttataatatagaaccgagggagtattatggtggagctatactttttgtagagtttagagattatactatgaggttttataatcccatttaaaattcaaaaccatgatatgattctttggtgtttggaaatttgtgcagtataactgatttaaatgtgttgtttagttgctagat

SEQ ID NO: 4040 - DNA, 478 bp, Zea mays
agggggttgaacagggtaaaaggaacaaaaaaaagggcaacagtaatctacaatttacaagaaaataatgaacaaaacaatagtaagtcctgtgttaccctatttcgcgtgataaacctcctacatgatgcccgcctacatgacgacctgtgtggacctgatttggagatcatgaatgatgctcttcctcgtgagaagttgtgtttccatgtggtgcatgagttgggtggctgtatttcttgaagacccgctcttggttttccctccaccattcttcagcctgattctctgcgaatctcctcttgctgtccgaacaaacaaatttcagtcttcagtgaaggttaaggtaaaacaatagtaatttcaggttcagaatttatacttcaatgaagggggaaagggtacctgaatcggacccgcttgaatactttggtaccgtcctttagttggataagtgtcacatatacgccaggttcaa

SEQ ID NO: 4041 - DNA, 355 bp, Zea mays
ctgctgcaggtaaccatctcttgtaatggccggccgatcgatcgatcgagagctcaacaattcaagtgtcctgctatagctagctactacgacgtcgtgctacgatcgtatcggtttcggttcgttcctacaaatatagcctagagatagagtgtctctgtctgtgtgatcgatggtattgttatgatcatatagaaaagaccagtgtagcatgcatatgcacttgttgcaatgtttgctttcaagaagaaactctggagggaggagagaggctcggtttggatgctgatcatgcacaaatattactagtgtctacagctgctacttcattaaagctgctagcatggtcacttgt

SEQ ID NO: 4042 - DNA, 287 bp, Zea mays
  misc_feature (56)..(61): n is a, c, g, or t
  misc_feature (222)..(224): n is a, c, g, or t
  misc_feature (264)..(267): n is a, c, g, or t
gcctcggtcattccggcgtcaacatgaggcgtcggcgtcagtgcgctcaccctcgnnnnnngccgcaccgactgaggacctgcgggcggagctcaaccgcaggcgtgcgggagaggatgctccaatctctctggagaggcctgatgacctgcgggcagaactcaaccgcaggcgtgcgggcgaggacgcacgagtctctctggagagggcgcgtgagcgccnnntaaacttcgagggtcgcaacctcgaccaggacttcgctcnnnntgcgccacaaactccaaggg

SEQ ID NO: 4043 - DNA, 405 bp, Zea mays
taatttctgctcgctcctatttcacgcctagggcttggggggagcctccacgtgagggagtgttggaatacaattggattgctcatgtcttttcatcaacttaatcttttgtattgaactggtcggtgcatgcaactcaatgcatataaatatcttttaagtgtttcatcagggcgagaaagcatgtctgttagcatataagcatgaaaatgtgttctgtttacatgttgaggttgcttctaatgtttacctttgaaatacttgtttggcatcttatttgtataaactgtgtgctttgtgatgataaatgcttttgagtagtgtttgactaaccatttatgtggcttgcagaaattttttcttgatgctggtgaaggagatgaagatgaagatgctgcagaaaaa

SEQ ID NO: 4044 - DNA, 372 bp, Zea mays
aggcaaacagcaaactttccaggataagtctctgactttgttatactttcctgtgtgcaggaggtcttgaagatctggaactgcaggtgcagaatgctattgcagcagcagcagctgcagctccacccaaggaaagcaatagtgtcagcagcaacgatcctggcagctcgtcctctgtgatttttccgtctggtccagctgatcaagtccctgttcctgctacctctccagaaattgagccccgttttgcaaaccaaatccctgctgcttcttcgaaggttaaggcaccatgcctggcaggtctgttgtttgtaagcgacaggaacgagaggaactttaggttgcctagcccttctgataattgtccatgga

SEQ ID NO: 4045 - DNA, 374 bp, Zea mays
gctctgcttggccgtcgttttgttggtcaccgtcgtcgttctcgtggcactgcattgccatcgcaggaggaacagagagagccagcggccgttcagctcgagcgtgagggcgttcagctgcaaggagctctaccaggccgccaacggcttcgagaaactgctgggcaaagggagcttcggcgaggtgtacagagggacgatgaggtcgccgcacccgcatctcatcgcggtgaagaagctcatcagtcatcacctcgaacgagtacagcgagcaggagttcaccaacgaggtgcagtccatcgggcagatccaccaccggaacttggtccgcatgatcggctactgcaaggaaggcaagcaccggatgctcgtg

SEQ ID NO: 4046 - DNA, 878 bp, Zea mays
  misc_feature (466)..(468): n is a, c, g, or t
  misc_feature (475)..(478): n is a, c, g, or t
  misc_feature (600)..(600): n is a, c, g, or t
  misc_feature (739)..(741): n is a, c, g, or t
  misc_feature (748)..(752): n is a, c, g, or t
  misc_feature (764)..(766): n is a, c, g, or t
  misc_feature (844)..(844): n is a, c, g, or t
ctccttgttctgttatactcctagcgttctcccaatttcatacggcagggaagtgattaaggcgagtccagatctgtccgtgttctcaatcctgacacatccctgcggatccgtccctttttactaatctgtttgtatctggaactcgagatttcgccgcggatttcttctggaccacagcgagcggttctgcaccctgttgctggttggtcctgggccataatcacccagcctaatcaactgctctgctcaagcgcgtgttccccactgcagatgcagagagatctttgagtttttccatctgacacgcaccaacttatcctgcagcaaggaagcacatcattattaactgaaaaggcctgtgatacgcaactcaagctgttcccccctccgcgtttactttcctcctcctggaaccaagttgcattgttttgcatctgattccacccccgcaagaaattcacannnaacccannnnaaaggagcatcttttttttaaaaaaaaatcttttgaaacgcaaacacatcatcataggcgaaaagtttttccatcgggcaaggctttttgctggaaagctcctttccatgattccgatccanctcagacagcagagatgctgttggtgaagcggaaggcttgtgcggtcatggtggagtggagtttccttctttccagccctgccccagctgccttcctgcaacctgttccccgatacctgcatagtgcctgcacaccccnnnccccacnnnnnatgccactagtnnntgtgagtgtatgcactgtataaacagacaaacagaacgcaacaaagatgattaggaacggtctacgtgcaaatagatnctatagcgttgtccaactgctagcggtttgttta

SEQ ID NO: 4047 - DNA, 428 bp, Zea mays
actgtaggagcggaccgtgagacagctccacttgattggaattcacgtatgaagatagccctcggggcagcacgagcacttgcatatctacatgaagattctagtccttgtgtgattcatcgcgattttaaggcaagcaacattcttctggagcatgattacacaccaaaagtgtcagactttggacttgccaggactgcaaggggagaggggaaccatcacatctctacgcgtgtcatgggaacattcgggtatgaaatctcttgttaaatttcattctatagacaaaaccttgatcaccttcctttatctaaaaaaaacttgctttcttatcagctatgttgcgccagagtacgccatgacgggtcatcttcttgtaaagagtgatgtgtacagttacggagttgtattgcttgagctcctcactg

SEQ ID NO: 4048 - DNA, 626 bp, Zea mays
ccgccttgtcgactccgtcggcgcgctcgagccggcgcttcggaggctctctgaggaacaggtggcgtgcaggactagcactgcactccccatctcagctagtggttcatacattcagcttgtttgctaatggttctactttgtttggtgtggctgatgtggacaatgtgcgcgtttgcgtgcagttgaaggcgaagacggccgagttccgcagccgcctaacgcgcggggagacgctcgccgacgtccaggccggtacatctgctgctctaactagttactgccattgctgagctgcaccgtttctttcgggagttctggttgttggttgtctgatgtactgatgcgtttctgtgtccactccagatgcgtttgctgtggtacgtgaggcggctaggaggacgcttgggatgcggcatttcgacgtccaggtacccacagctttggctgcacggttgagatgtaaggcacgagtcggttctcgagactgagttttgggtgcagataattggcggtgctgtgctccatgacggctgcattgcagagatgaagacaggcgaggggaagacgcttgtttccacacttgcggcttatctaaatgcccttacagggaaaggggttcatgg

SEQ ID NO: 4049 - DNA, 775 bp, Zea mays
  misc_feature (566)..(566): n is a, c, g, or t
  misc_feature (568)..(568): n is a, c, g, or t
  misc_feature (570)..(572): n is a, c, g, or t
  misc_feature (597)..(599): n is a, c, g, or t
  misc_feature (746)..(748): n is a, c, g, or t
agggtttgatatatgatggtaaaactggagaaaaaataggagagctttccactgaaggcggacacacagggagcatatatgctgttagctggaatcctgacagtaaacaggtaattcgatattaagtattctctgtttttagttctcattcacagttctaaatgtcgtgtttatagtgtacctatattttctcagatttgatgtggaattatttgttaggcatgattgaggaacaacgcgcagattcagaaaatatgcttgataaaacctaacattgttgaacagataacatgatccacttataaggctactggacagtaaacaaagtatttgtttttcaacctagatcccataatgatctagcctgtatctaggatatgcgtgatatcattttttttatgaacatcttatctttttccttcaaatgtgttacttttttttgtagcattgcactcatgcattttagtttctttcaatggatgtttggtgctcatgacctatgtatgactatctaatcaatatcgtataatttcaagtgtttatccacttctaatggttttctcttntntnnncggtgcattcaggttctaacagttnnngctgataaatctgcgaaagtatgggatatctttgaagatgcaagtgggaaattgaatcgaactttggtttgccctggtataggaggtgtggatgatatgcttgttggttgtctctggcagaatgatcatctcgtgacagtctctctnnntgggacatttaatgtgttctctgcaag

SEQ ID NO: 4050 - DNA, 775 bp, Zea mays
  misc_feature (69)..(69): n is a, c, g, or t
  misc_feature (135)..(135): n is a, c, g, or t
  misc_feature (240)..(240): n is a, c, g, or t
  misc_feature (277)..(277): n is a, c, g, or t
  misc_feature (455)..(455): n is a, c, g, or t
  misc_feature (566)..(566): n is a, c, g, or t
  misc_feature (568)..(568): n is a, c, g, or t
  misc_feature (570)..(572): n is a, c, g, or t
  misc_feature (597)..(599): n is a, c, g, or t
  misc_feature (678)..(678): n is a, c, g, or t
  misc_feature (746)..(748): n is a, c, g, or t
agggtttgatatatgatggtaaaactggagaaaaaataggagagctttccactgaaggcggacacacanggagcatatatgctgttagctggaatcctgacagtaaacaggtaattcgatattaagtattctctntttttagttctcattcacagttctaaatgtcgtgtttatagtgtacctatattttctcagatttgatgtggaattatttgttaggcatgattgaggaacaacgcncagattcagaaaatatgcttgataaaacctaacattnttgaacagataacatgatccacttataaggctactggacagtaaacaaagtatttgtttttcaacctagatcccataatgatctagcctgtatctaggatatgcgtgatatcattttttttatgaacatcttatctttttccttcaaatgtgttacttttttttgtagcattgcactnatgcattttagtttctttcaatggatgtttggtgctcatgacctatgtatgactatctaatcaatatcgtataatttcaagtgtttatccacttctaatggttttctcttntntnnncggtgcattcaggttctaacagttnnngctgataaatctgcgaaagtatgggatatctttgaagatgcaagtgggaaattgaatcgaactttggtttgccctggtntaggaggtgtggatgatatgcttgttggttgtctctggcagaatgatcatctcgtgacagtctctctnnntgggacatttaatgtgttctctgcaag

SEQ ID NO: 4051 - DNA, 293 bp, Zea mays
gccgtcgccaactccaccaggctcatgcgcctcaacctcagccggaacgcgctctccgacgccgtacccgtcgaggtcgtcgcctccgcctcgctcatgttcctcgacctctcctacaacaacctctcgggccccatccccgacgccttcgccggctcctacagctcgccttcgaagctgcgcctcaacagggacgccatcaccgggagctaccagctcgtcttcctcagcctcgcgcacaactccctcgacgggcccatcccggagtccctcaccaagctcaccaagctaaa

SEQ ID NO: 4052 - DNA, 351 bp, Zea mays
ctcgcgtgcgcacctccgcgccatcagctggatgggcatgtcgctgtacaaggccgacttcgggtggggcgcgccggcgttcatggggccggcgatcatgtactacagtggcttcgtgtacgtcatgaacgcggcggggaaggagggtgccctcgcgctcgtgctgtcgctggagccggagagcatgccggagttcaggaaggtgttcgccgaggagctcgccagcctggacgtgatctagtgcatacatatagctcgaagtatgtaccggccggctaagccgccaggcgccagtggacagttgcatgcgtggaacgtactacgtgttaggctatccacactcatatcacc

SEQ ID NO: 4053 - DNA, 401 bp, Zea mays
tcgcaaacccctcagatagaatctgagaataaaactcagaataaaaataattacggtgatccaacaatcgatcttggttaggataattaaccgaattaattaaaaaattctgctgatacattcgaataattaaacgtttcacaagtagtgaactaaatttcttgttattacaaccaaaaatttccacgggttcggaaccatttaatccataatcatgagcaaatgcataaatatattcctgaaagagaagtgggtagacgaagtagtgttgacgagatttctgtttttctgaatacccttcgaatttttccatttgtatttctacttgaaatagagaaaaaaagcatttctcggtttatcaaatgatgatacatagtgcaatatggtcagaacaaggtgtt

SEQ ID NO: 4054 - DNA, 441 bp, Zea mays
cactcaagttccaagctcaatgtctaatttgcagtgcttggagacactcgagttgggggaggtcaatggcagggcggcagttctggtgcctatccaagtcttggaactgccatgcataaaacacctaatcggaaaatttgagcttattgacaacttcaacggactaccagtaccaataagggcttatccagatgcactagtaccaaaggcaatcaaggaaagcaacctggagacggtgtcggggttcttcacccacagaggccaaggatttccgccactcatgcgtcacatgaggcagctcaggaaggtgaagatatggttctacagggatgcagaacccaaatacctagcaagctatctcccgaaagcgattacaaaattcctcaggaatgacaacgttcctcgctccctgtcacttgacttccaggatggcccaagaca

SEQ ID NO: 4055 - DNA, 456 bp, Zea mays
actgctggattgaatgcaacaatgataggcgactatttgggtgagagggatgactttcccctcaaagtaatgcatgcttatgtggacgctttaaacttcgaaggcatggactttggtcaggcaattaggttcttcttgcaaggtttcaggttaccaggagaagctcaaaaaattgaccggatcatggaaaagtttgctcaaggctactgtaaatgcaatccaaatgcttttattagtgcagatacagcatatgttcttgcgtattctgtgatcttgctaaacactgatgctcataatccaatggtgaagaacaaggtatacttatgattttattatcatacgggaatgtctataaagaaatttagttttttaactctatcaaaggtaatctaagttttcttgtgcagatgtctaaggcagattttatgcgcaacaatcgaggaatagatgatggga

SEQ ID NO: 4056 - DNA, 378 bp, Zea mays
ttagattgaagttgtatgcacatatgtttgatttgaaaattttgtgggtgaattgatcgttttaacccgcaatatgatgatacattttaattttacaattgtagacacatcaatgtattttattttctatttaatgaattactgaacaaagtatatgtttgtgaagcatctttgagttcccaggcgccggtggaccctgtcctggtggcaagaccagtccaatatttgtttcttcacctagactaaatattagctctctcgacctttttctccaagtaagtcttctgtcgatacacactgaaatttttgcaactagttgaatttgttttttatatttgacattgtgtgaactgtactcccttctgaattaatgccaac

SEQ ID NO: 4057 - DNA, 376 bp, Zea mays
tttagatatccatgataccgctacccctagatcgacatttggccgttcaacaagcatcgttgtttctgaaggtgacttgttgcagcctgaaaagattgaaaatggtattttgtttaatgttgtaaggagggatactctgctggggtctagtagcggagttgagtctcaaggatctcctcaggaaccagatgttgaaacagtgcagacagagtgccttgatggcatttcagcttccgatgacgacgacaaggaactaaatgtcattgttgatgaagcaaccgatcccatgagcagcaataatctacaagatcaggggtcctcactggaagaaaattcatatagtcattttcccttaaattctgcagacgagacaagc

SEQ ID NO: 4058 - DNA, 516 bp, Zea mays
ctggatgctcgtctgtcctctctacccaccgaattgccgcctcctttcaaaatgcagaaggttggtgttccttttcttatgttccagtaacttctccacgataacaaatcatttctatcttcagccaaaggtttttgaggcgcctgtaccaccaacagagtttcaacagattcctggagacgtacgcctcttgacatgcgggtagtatatatggtttgttccatgagctggatccttttccccccattttgtctctttctttatgcatccgtttattgtgccattcttttttactgaagcgttagctttgtcgtttttcttttactaggtactcgatttgttggaataaatccggtttgcatgaagttgtcttaggtacaactggtaggaaacaaggaacctcatcaaaggcagcgcacttaccctccaccgagtcactgctctgcaagtaagcgggtcttttccttgtgtgaatttcttccatcgcgattctgacgcaaaactgttgagaggacc

SEQ ID NO: 4059 - DNA, 383 bp, Zea mays
aagcatcgaacacctcaggcgcgtgcgcggtaacgagacatccaagtccacagacccaaaatctccccgcttgaacattgaaaatccataggggaatggtctggtgggagaaaaactaggaaagagaacggaccacgaacccacctaggtcaggagatttgaagggacgggacgaacgttgttccggctcgtggaaatcccagatcaactgctgctggtggcaactttgtgccatcagttgttttttgcccgggacgagtcccatctcaggtgaactggagattgtcctccatgggtgcgcggaagaaggcgagccttgcctcacaaatcgcatcgaggagagcccaaggcgtgtcgtggcctgtcagtattccgtcgttacc

SEQ ID NO: 4060 - DNA, 480 bp, Zea mays
  misc_feature (310)..(312): n is a, c, g, or t
  misc_feature (346)..(476): n is a, c, g, or t
tagaagatattgttgatcgccttcctgatgaaggggcgatgcaccatgaacttgccgtatatcctgtgaaggatcgtcttcaggtactccctctccctaggatcctccgagtcaaagagatcaagaagcctgataatgaatccgtggtcaatgtatctcttggccagcttcgcgtctgtctcgggagactgaatgaacctcaagaacagctcatacacgatctgcaagtgcgaccacgcggggtccatgacgggctcctcctcctccatgtcgaacgacacgagcgccttgttctctctcggggcagggnnnggcaccctgaacagattcacagacaccatcctgnnnnnnnnnnnnnnnnnnnnnnnnnnnnnnnnnnnnnnnnnnnnnnnnnnnnnnnnnnnnnnnnnnnnnnnnnnnnnnnnnnnnnnnnnnnnnnnnnnnnnnnnnnnnnnnnnnnnnnnnnnnnnnnnnnnccct

SEQ ID NO: 4061 - DNA, 452 bp, Zea mays
  misc_feature (445)..(448): n is a, c, g, or t
aatgcaacggtccccgtgtgggccccggttttttacaagcttaggcccgtaacacaaaggcggccacgcggggcccgttgcaatgggccagatcacacgtgggcctcagagcaggacgaggccgtgctacggggagacgtcaccgcaggccttcgtctggtgctgaatgaagcgaagggtgtccctgcccgttttgtctttgtcaaaccagcgactgcagcgagagacgacgagcgaagggtggcgtctttgccttcgccccaacaaacggctcagagccgcaaggcatcccgtgaccctctgtacgcctttcaagtccttgatgggccccatgctggtgatggccacgatcttctccgggttggcctcgatgccccgctcggagacgatgaaccccaagagcatgcctcgggggaccccgaagacacacttctttgggattgannnnatgt

SEQ ID NO: 4062 - DNA, 396 bp, Zea mays
gcggaacggcgagttcccgaccacggcggcggtgcaagcgctggcatcgcagcacacggtgttgaagagcgtcgtgctgcgcgaaccgggccaactgaagtccgtgtcgccatcccctaccgcttccacgggaaagcgccgcgacggctatgacgacgacaatggcggcggcggcggcggcgagaacgacgggcaggtgatcctgtacgcgagacggctggacctgtcggtggagaaccagaacctgcggtcgctccttgacgggatgcactggcgggtggtggagctggagaaggtgtgcagccggatgaagacgcggatgagcaagatgaagcaggccaggagaggcggcggcggccgcaccgccaggtcgctccctaggatgtgttcttgatc

SEQ ID NO: 4063 - DNA, 625 bp, Zea mays
atgacaccatggtatccatcaagcaagcaatcctcggcggcaaactcgcctccacgaggacgttcaaacccaggtttgtgaagtcagtgtttgccatctgtggaagtacaatgttatatacttatatggatagaataaataaaatacggctgatgatgctgggggttttcaggtcgcactcctcgaatcgatggaaaggagttctttcgtcaggccaggtctgtacctatctggacgtctctcctgaaccatcagcgaatgagaggtggatgataccataattaacaaaaaaaaatccgttaccgtttacaggagtcgtctatcctacgagcaatttggagcattcttagccaacatcaaagagctcaatgcccataagcagtcacgtgaggttggtcatttcggctcatctgtttttgttttgttttatttttgaattgaaaggcctttctgagtcgtaacacaagtcaagtatataactgctcatttttccattttaaaccaggaaactctcaagaaagctgaagagatctttggtccagacaataaagatctgtacctgtctttccaaggcctgctgaaccgtagcatggtggcataaggcttcacaggtcgcttcgcaagt

SEQ ID NO: 4064 - DNA, 670 bp, Zea mays
gatggatggtggcgaccatctgagacaaggtaacttaaaacttctatgcacacaatttgatctcttcttcattatgtccctcatactggttatatatcattatattttttgctctgttcgcacaaactacttttgttattcatcaaagcctcaattatgttaggtgcaatgtttttattctttatactgtacttagtaactatgttaggtctccacaaaaacagctcattcactggttgcaggatcggttgatcttcctaaaactccagggcagagagatgagggctggggtccaccgccaaggcaacgtcactgcacctctggtccctttgatctgtccaccgggtctcctgcccatgccgtggctcctccggctgatatcaggcccagacagcagacacggtcagtcttcggagctacactgaacaatccatcaagcaccctgcgaaacctcataatctcacctgtcaagcgtccccagacgtcccgtaatcgccaacacatattcacgtaatgatctcccttttgctcatgcatacagcaagtagtatttgtttactgacgacggatcaaaccttggaactggcgtttcaggttgtagagagttggaatagctgacgctgacggggtgctccgcattggaaatcaaatggagatatggttggttata

SEQ ID NO: 4065 - DNA, 341 bp, Zea mays
gagcctgctcttgagcttacagagccgacttctgagtcaaagcctcagcttgagcctgcggcggcccctcctcagaccgatgcttatcctgcggtggcatcacataaagaggagcagaaagagcatggatctgtaccggtgcatactaagcctgaagctcaggagattcctgccaatgctggtgatactgccacagtgacagagggtgggtccccagggtcagagaaaggcatccataccgccgtcaagcaagtgcagtggaacgactttggtgccagcactggtggggcggatctatttggtgacctcctgcccgatggagctgaagatgacttctttga

SEQ ID NO: 4066 - DNA, 470 bp, Zea mays
gctcagctttgggctctgttgcagcagcagcaactagagcaaccgcatccgtatatagtaccggccgtcgcagaggtctatgccgccgatgaagctgacgacgtggcgttcgtcggtgcccggcgtggctgcgtcgagcgtgacggtcttctggtggtgcgtgaactcggcgctggtctcgacgtgctgcaccatggtcagcgacgcgtcggcgttgcgcgggcagaggaagcaccttacgttggtgccctcgaagaacctccgggtctcctcgtcgtgcgtcttcatcaggccggcgttgccgaggaacgacactgacgtgttgtcctgccacggcatcaccagcacggccaccccttcgtcggccttgcgcttcagcagctcgcccagagtgtcgccctcggcgccgggaaccgcccgacggcccgcgtcgcggaccagcgtgatctccgtgttcaccgaccacacaa

SEQ ID NO: 4067 - DNA, 657 bp, Zea mays
  misc_feature (645)..(649): n is a, c, g, or t
aagccaaagtcgacaagataattgaagcaggtaagtaattgtttgcttctgtttcagagcacactaccgcatttctatttgtatgaaaataaaatttgcgcgtaaatcataatgttcataaacatctggcagcttccaagttggttccactcggatttactagtgctagccaacttcatgcacagagacttgagatcatccagcttacaactggatctagagagcttgatcaaattttggacggtaatgtattggtgcctcttgtgtatctttaattttcttaatgccataattgtggtattgaaataatagcaaaacagtgtaacttgtgttttcaatcttaacagggggaatagaaacaggatctatcacagagatgtatggtgaatttcgctccgggaagactcagttgtgccacactctctgtgtcacatgtcaggtattggacttggactgaaagacaaattctaagatatggcaccacattgccatgaactgtgccaacaggatttctagaatgtcatacttaaataaatattttttgcatgtttgaactgtttacatatttccatctgtttggcaaatggaaaatatctttccagttcttatgtgattattttaaagcttacaaaatgtggtggtgtnnnnngtagctcc

SEQ ID NO: 4068 - DNA, 333 bp, Zea mays
ctctcggcccctgccagtgttgcgtcgtgtgggccggccgggtgcatgcacagcaccaggccatgcccgctgctatgtaagtgctcgagccagtagcatcgtaagggactgttcggttgttccggattggagccccggattaattcctaaccggattacttctctaatttatatagattttgatgagctggaatgaatcctggctcattccggtacaaccgaacaggccctaactcggtttgttaccgctagagctcgagccagttcgagagtagccattttaaaatgaagtctgcgcttgtgtgttatggatttaaatcgactcaataacgc

SEQ ID NO: 4069 - DNA, 354 bp, Zea mays
gaaatagctcacgatgtgcccgaccatactgtcacgcaattttcagcctcacaagacactgaaaccgccgccggcgatgctgccacccacgactccgctcagcctaaagcggagtcggcccattgtgcggttggcgagccggagcaaaccacgacagaggcagacggtcagccacatgtcgcaaccatgccacaggaagttgccgcattgccgtcgccagctgagacaccggtgcaagagagtgcggcgcagcccacactgccgccgcagaagcaagaaagccctgttccagaactagcctcctcagtccacgaggaggagaaggacgcgtcaaaggcaaggggggacgaagga

SEQ ID NO: 4070 - DNA, 361 bp, Zea mays
cggacgcatgcacagctcgcggacgcgtatcagcagcttggtgcgcggatcgctccctttgaagcgtccggtaaggaggcgagcctccgcttcctcggatggctgcaggaggagttggaggtgctcccaacgattgtgacgggccttatgtccttcgcctcgctcatcacttgtgaaggggctgtgaatgccttgtcccgcgagggatgtagacacttcaaagtctttgaccaatcagacgaagacttcgaacgtggaatcttccaggttgaggacctggtgctgaagcgatcggcccgggcactttatgataggatgtggggccctcacggccgtgatactgttcaagagagaaccgacc

SEQ ID NO: 4071 - DNA, 367 bp, Zea mays
tttgtttgattgtcttttcatttaagataacatttttatattattttattgttaactatggtttatagccaaattttatccactgtataaaatgaataactagctgcgctttttgcaggtaccattcagagtcaggttggcatacattggtagaagttattctcgagcattacggttttgaagctgatgaagcggcggtcacattttttgtttgtctggttccagttgctttggatgtgtacataaaattttgggtatgcctttttcatctaattaaacaatagcttctaaaagttaagtaacataacatagcttttttaaaaggaacctcttttttccccctgtcctacggtcctacctcaccatt

SEQ ID NO: 4072 - DNA, 359 bp, Zea mays
tgctggacccgagcccccagaacacggccaagaagtacgccatctcctgcctgctggcgctttcgacgagcaagcggtgcaagaagctgatgatctcccacggcgctatcgggtacctgaagaagctctcggagtcggagaaggacgtggccggcgcgaagaagctgctcgagaagctggaccgaggaaggctacgcagcctgttcggcaggaagtagccaccaggcgatcgatcgttcttcatgtacaaagatcccgtccgtcctgtttgtgtcatagcctctatgactatgatgaagtgaagtgcggcaggcagctgttcgttcatgtgaagtccctaacaatggccaaacgaattt

SEQ ID NO: 4073 - DNA, 344 bp, Zea mays
gtattctcaaaacccaatgctttgctgttttggtattgagttaacaacatcactccagtctatatttgtacctataacttttgttaggtcactttcatgagaacaagtattacctttttaatactaagcaccagaaaagtggcctcccgtacaagttttaccccctcattccggaccgagcccgagccgtgaggggctgtgcttacaagaacaaaactcttacagcaaatagaaatggtgagaccagaccaggaaatgccacctaaccgctcagggagcccaggcctaaactctgcagtccttgcactccggcgagacaccagagatgctgttcatcttcgaga

SEQ ID NO: 4074 - DNA, 344 bp, Zea mays; identical to SEQ ID NO: 4073

SEQ ID NO: 4075 - DNA, 344 bp, Zea mays
agacaacgtagagccacctagaaattaagagatcaattcgaggcatagatcttgagtgaagtagacaaagtagatcttgccccttagggggtaagatcctaggatcgtcttgaggccggcaggccatacaagacaaatctagacgacgtagagttgaataggggtggaggtggatatgtggaatgctacaactaaagctacgttacatctactcctacgacaggaaaggtaaataaaatagattagttcgattgaaacgtgtttgggggttctcaatcgatcgtaccccttcatatatataggggaaggtctggacccgttcttaggcaatagccaacagatct

SEQ ID NO: 4076 - DNA, 275 bp, Zea mays
tggcgagagcgctcaagtcgtctttgccaccggagagcacgagtgccgactggtggggcggagggggcgccggcagcgcgggcaacgccggtgagtggaccgagggcgggtcaacaacgacgaggtggtgatggtgggacccggggtctgctgtcgtgtacgcggggggcatggagttgcgcttgcgattgcggaattggtggtggtgttgatggcggcggcgaggcgaggagggcgcaattgaggagatggggacaggcgacgaagcgaagtta

SEQ ID NO: 4077 - DNA, 391 bp, Zea mays
ttgtcttttgggtacttgagctacccttcctgtacccccttaaagaaaaaggcataatatatggctaattccacatctatttgataatgaaatgaaacactattactgtcttttacctgatctcttttcctgctgctaatttgttattatgctattgatgcccttgtcagcatgtgtcggttgtcttatgttacaggttggcgttagtgaaagcacgtggcaggagctggaggaagaattgatcccatcatcatcaattgtcagaactaattggctggatactcagccaatgagaaaatacaaggattcctgtatttgtgtggctggaggtaatttgttttaaataaaaattcatagctatactcatcaatggtcaaaccactatctggaa

SEQ ID NO: 4078 - DNA, 356 bp, Zea mays
aggtcttccgttccctggaccggaagaacgtctccgcgtggaacgcgctcattgctgggctggcagcgaacggcgacgctcggcggtgcatcgatgtgttcgagcagatgaaggtgtcggacgagaagccggatagcgtaacgttcgtcagcgtgctggcagcctgtgcccgcgcggggctggttgatgagggtcggcggtgctttcggagcatgtcgtctggttttggtgtgcagccggagctcaagcactatggctgcatggttgacttgcttggccgagcagggctggttgatgaggcggaggagctggttcggggcatgcccatggccccagatgacaaggttctggctacg

SEQ ID NO: 4079 - DNA, 485 bp, Zea mays
agaacctgcaaagaacagttcgatgtacaaattcatggccagtctaatgatactgaggtcgcttgtgactcatcagttacaacttgtgaagctgttccagatcatgctacaacagaactggatgtgaaaagtgattctttagataattctcagtctctaccttcaagcattcaggaatgtgaaccaatataccaaggtgaagagcacatacttggcaccacaaatatggtgtatgaaaatcaagagccagtgtatgagggggaggtggttcttgctgagcaggctgacaagattggggaaagcagttcttctggggatgacaaggccacagaacatcaatgtgagaatttcgttttttcacagttattgacttaaatacatgtgtgaatgtctttgtacaatgtgacacttaaacaaattgatttattttcaggggaactgattgataattttctgctgaccactgctaaccagctgactgtcta

SEQ ID NO: 4080 - DNA, 329 bp, Zea mays
tcggggcgttgaggcccaagtctgcagtgagatcaccagctggaagagcatgggagactggacggaggatgagcttgtcgacaaggacatgagcagcgggctgggcacatgggtcgacttcctggtggaggagttcgaggctggtgtggaggtggagaaccacgtactgggctcgctgcttgacgaggtcgtcgccgacatggtcgtgggacgccacggcaggagtgtaaatttgtagtttgagatgaatcgtgtggttgttggtctgtaattttgctgttacatatcccctatttattctgtcaccccagacatgttgttcagaacaa

SEQ ID NO: 4081 - DNA, 557 bp, Zea mays
gacaagatggtcgtcaccgtgtctcagtgcctgctcagcacggcgcagtcgttcgtcgtcgcagtggtcgcagagcgggacttctccaaatggaagctccgcttcgacatcagcctgctcgccgtcctatactcggtagtttccactattcattcattcatttatttggtgaccattagagtagacgacggccggttttacatgcatgcatctgcatgcttcagggtgttatggtgacgggggtgtcctactacctgcaaacttggtgcctagagatgagaggccccatgttcttcgccacctggacgccactgtgcttcgtgttcacgatattctgctcgtcgttctttctcggagagattgttcacctcggcaggtaaatcatgcatacacatacactcactatcagctgctgatcactgttctaaaagcacgctgaaatgaactttccctggcagcatcttgggtgggattttgctggtcgcaagtctttataccatgctgtggggtaaaagcaaagaggacaagactgacgatgccaccgatgatattgagaa

SEQ ID NO: 4082 - DNA, 382 bp, Zea mays
tgcgcgcctctcgccgtcccgtcttgaccggccggcgatgcaggcaggctgcatttgcgggacgcagaggagctactgccgactgcatcatcagtggaaacgtcaaatgtgcatagacagaagaggcagacagattgtttgctgatgcttgccgacggcattgctggattttaatttgttttttattatggttctgcacatggcactagctggtgtaatgtaacatgttggtttattgtggaaagaaaggaggaacattcttttgctgtaaaaaataatgggggttggtttcggggtgttttggctcatgatcctttgcactctgtctcaagagcattattcacatgtacgtatcataagcattctgtctgaaaggaggaac

SEQ ID NO: 4083 - DNA, 388 bp, Zea mays
cgcgctcccgtggccctcgcctctgacgatctccggcgcgaggtactcgtgcgttccgacgaacgacgtggaccgcgcgtccgtcggctccgcgttgaactcgagctggagcgacccgtccttgatgctggagtccgacctgctggtcttgcggctcttcttggggagtactatgcgcgggaagaacgctgacggtgactgtatgcagccctggccctgctggctggcaccgtcggcatggaccacgccgttgttggcggcggcatggaccgatgaggatctgactagcatcgggctgaccgagcaccgcagcgacagatcgaagtcggagagcatgatgtgacctccatctctgaccaggacgttctctggtttcaggtccctgtag

SEQ ID NO: 4084 - DNA, 388 bp, Zea mays
tcatcgaagcgcttcgtacctgatggagtacgtcaagatctgtgctttgagatggagcggcgatgggagggggaactagatttgagagcagcatcgattgactgaatcaaggacgtcggatgtggcgatgaagaacacctgcggcagtgagggttgttattgcggtgcctgctcggagtacatcgacgggaatgcttcctgcgccgcaacgtcctgctgttgggcctggtcggcggcgagatcgagcggatccgagtcggccttcctccgcgctcgggtccaaacccaccgcaaaggagcgggaggtttctttgccaaggcgcgctcgctgccatcctccagaaggaaaggatgggggatgaatagtgctccgcttgatctagagtga

SEQ ID NO: 4085 - DNA, 521 bp, Zea mays
tttgaatttatatttactgattttataacctaatatatgactgttcagatctttgtcctgatatagaatgttggagtgcattatgagacgtggaacgctggtgttggtggtcctgttgtgcttcataggctggatgaaggttcacgagaccttacttggcagacttggtcctatcaggtatgtttaacaccacatgccttggtcaatgagttattgtaaaaaagagacaggctaaacttgcttttctccatgctaggtcgcccgagtgctacttgtgctaccgagtgctgctgtgcagcctatgctacctggtgtgtgactgcgtggtgactgcttggtgcttggctgcttgctgccgagtgtaagacgccaggaccaggaggcaggaccgccggagcagcgagtaggagccaggagcccaacctaggtccatgtggcgagcacagatgtgcagagaagataggcagacaacaaaatctaccgtgtagttcaagtatacccttacccaaacccaatacttt

SEQ ID NO: 4086 - DNA, 481 bp, Zea mays
tgcccgttcaattcctcaaaagaaaccagttgtggagacagatgccaaaactaaatccacgctttcaaaagacattttggctggcgtaagtttcacccctcatggaaatgcctcttaacttcttgtgtccaccagttattaacaaaccatggtattctaggttttcgggggttcatcatgaccacctcctaactttcggcatggattggtgcatgccaaactgaatggagtgctccaagatcatcgagttcatattctacttcgaatttttgtagatgaagtcagttttttttttcttgggggtaagtaggaacatttagaaacattttgttctgctgacattgccccggaagattttctgggacctgaccattttgatgtgaaaggcctgtgttgattgccagcgctgtttgaacaggaatctttgtaaaactgaaacacatgttctcttctagttgaacaaatatcacgaggaactgcc

SEQ ID NO: 4087 - DNA, 403 bp, Zea mays
gcgggaagctgcatggaagaacagaagagagccgcaggagctggaattcctggacattactattcagttccctctgtaaagcagcaacgctgttttgcaagcctcccatgctaatttcgcgctgccaaatattagcgtgatcgcgaagctagccagtcctggcgcgtctagtttgccgggttgtctgacaacaaaagttagtatgaatatgaaagggccttccttaatgttttttcccacttggtgctgtataaaggttcagtgtatattccattcaggagaatgagaaaaagttcaacactccagtgtgggtggattcaaaacaggcagacttttaattttgaaagtttcagtagatttgttagtttatagtttatattttgaaagtttcagtagtgtccaa

SEQ ID NO: 4088 - DNA, 438 bp, Zea mays
agtcgttggcttgcggaggagagggagggcgtggataaagcatgcgccgaggccagccattccctcaagcgcgccaccgacgcggagtcggggctgaagagcttgcgtggctacgttgacaagacgaaggcctccacccgcgtcggggtcgaccgagcgcatgcgttgcttgttgacgtgtgccgtcagctcggcgtgcgaactgccccttttgacaaattcggtgaagaggtgggcctccgcttcctcgggtggctgcaggaggagctggagacgctcccgtccatcgcaaccggtctcatgtcctacgcctcgctcgttacctgcgagggggctgcgaatgccttgtcccgtgagggatgtaggcatttcgaagtctttgatcgggtaaccgaggacttcgatcatgggatcttccaggtcagagacgagatgcta

SEQ ID NO: 4089 - DNA, 756 bp, Zea mays
gtcgtcgctaaccgtggtgacccacccctatcagctggggctcatcaattaaagacgtcatcgctgtaggtgttcgtgatctcggcataatagttatataaataaacatataaataggtgcttgaagctaacaactcttggcatcagtagcaggagcacaaagtgcagaagcagagccagtcctaactgcttagccaggaaaggtacgtgtactcatcgttttgtagagacctttgggtagacatggttaaaaaaatatatggccactatatatacaagttaagtctaactttaatttcgtgaaaataatctgtgtagcagaagcagagcgtgcttagccatgtactcatccagctgccatgtgatgtccgagaagccaaacggttccaaggcggtgacgctgctgctcaggctgtccacgctggttctgtcgctcatctcggcggtcgtcatggccaccgccaccagcgactgcaccatctacggtcacggcggcgccgccaaggtcactatcatgttcaagaactaccggcccttcgtgtaagtatattttcttttaatttcttcgtaagcagagcatgattagataactagatagatatgatcttacgtacgtcatcgtcgttgcatcatcaattattcaattctaacttctgatagtatatgctctactctacacacgtcgtcgtcgctgcagtttcctggtagttttgaacatcgcggcggcggtgctggaggcagcagccatctacctac

SEQ ID NO: 4090 - DNA, 391 bp, Zea mays
gcctcaccaaatcaatatgtccatattaattaatcaagctaaaccaactactacttcgccttcccaacaacacaaaccaaccaaagcacagctgcgacacccctactacaagcgtgagccaacacccaacctaactacgcgcctaatatctatctctcccacaaacagcaagcacaggcagagatgcccacccacacaagccagtaaatgctgcctagtataagcactctagactccactaataaggccatgcacatgcacctcttgggccaacaaaaccaactggggacgaagacgagcccagaggcaccagaaacgcaaaaaggccagtcgaactattagccgccactgtgcagtgcaggcgtcacaaccgcaaatggtcagcttagcc

SEQ ID NO: 4091 - DNA, 1059 bp, Zea mays
  misc_feature (1055)..(1055): n is a, c, g, or t
ggagcagcaaattcaggattgaagctgcttgttacgaaaggggctcatgtgcagaaggcggtcgggatatggctctttggttgtgctgcctgggtgttcagcttggtcatactgggaggtattactcggctcacacgttctgggctgtcaatgactgactggaagttcacaggggaaatacctccaatgacagacgaagcatggcagctggaatttgagaaatacaagcagtcacctgagtacaaaaggcaaggctgcaaccgctgacatttattcatacgttaccttacgtttgtctgctattttttatggtcaccagtgtaactaggtaatggccttatgttagtaaactttagctcccatgtgcaccaaaccagaaatccccatagttctcacatgtgtaaccttgacacacattatcagtacttttttttgaaagtttagaacattgtaataaacaacagtatgcaagatcaaaggaaaaaaaaggaagaatactgttttgtgctaccttatgttccaaattatagttcacgttagctttgtcctaagtcaaacttctctaattgttgaccaatttagtagaaaaatacaccaacatcaaactagtttcttttatattttccatgaaatgtgttttgacatagcatttaattgaatctgtagatgttatataattttttctaaaaaacccgttcaaagttagagaagtatgccttaggacaaaactaaagttaactatacttttgggggtggggggtagcaattgatatgaatttgatagcaacatagaatatgtagttcacatggactctcaacaactttgagtactttcctttaaacagataaatgtttatcccctggtgtttctctgtgtttgttcttataagttcccatccttaagagatactgctttgaatgccatatttctgctaatgcaattgcagcattctacaaacatatctagggtgaacaaaggaatgagccttgaagatttcaaatttatatactggatggagtatgcacacagaatgtggggaagagctttgggcttngtat

SEQ ID NO: 4092 - DNA, 373 bp, Zea mays
ctgcttccggtcgagtcttggcccgtcgctcggcagggcgaggcggtcgttggcctccacgctagcgatcacccagtcgccgcgccagttctcccaccttgcgccgccaagggaggggatgtaggcgccggctgaatccggccttgtctggaagtagtaggcgccaaggtggtccttcgccttccccgacttcaccagcacaaagaaatggcggaagagggaggtgcagggcgccacccccatgaacatctcgcacaggtgggcgaagatggccgcctggaggatggagtggggggtgaggtgctgaagctggaggccgaactcctccaacaacagcaggaagaaaggcgagatcggcaacgccaacccgtag

SEQ ID NO: 4093 - DNA, 348 bp, Zea mays
ccgtgccaagagtaaccaggacccctcttttttccaagaaccagtacaaaccgcctcttcggcctcttaggagtagttcagtagtaaggcgatcgttgcagcaggagcaagaggagagggtgggcccggcgtcctctgtctccgtggcctccggcgagcgacaggaggaggcgacggcgtcgcatcatattggaggggtggatgaggccaaggcgtcgggccatgttggagaggcagataaaggatgccaaggagaaggcgaaggagaaggcgacggcgaggagaagaggagcacagacgagcagcaggaggtggactggaagtcagacgaggagttcaagaagttca

SEQ ID NO: 4094 - DNA, 958 bp, Zea mays
  misc_feature (665)..(673): n is a, c, g, or t
  misc_feature (686)..(688): n is a, c, g, or t
  misc_feature (692)..(696): n is a, c, g, or t
  misc_feature (702)..(749): n is a, c, g, or t
  misc_feature (763)..(771): n is a, c, g, or t
  misc_feature (794)..(800): n is a, c, g, or t
  misc_feature (806)..(830): n is a, c, g, or t
  misc_feature (844)..(856): n is a, c, g, or t
  misc_feature (860)..(862): n is a, c, g, or t
  misc_feature (867)..(871): n is a, c, g, or t
  misc_feature (879)..(892): n is a, c, g, or t
  misc_feature (897)..(901): n is a, c, g, or t
  misc_feature (906)..(909): n is a, c, g, or t
  misc_feature (915)..(921): n is a, c, g, or t
  misc_feature (926)..(928): n is a, c, g, or t
  misc_feature (934)..(934): n is a, c, g, or t
  misc_feature (939)..(940): n is a, c, g, or t
ccaccagaatagtttgctcagttcaattggattatccatatttcattgaattattgttcaaaggagttctcggtgcttaatcgaacaaaccaccagaatagtgtgccagaaccctgattgatagtttcgcttttcctccttaatcgtttgaccttttcttgtgtccattttagatcttgctggtccttgtgggttttatctcttttatgtgtttccccgtttcgttgttttcggttctcctttgcctttgtttcccttttctgttctttgggggttgagctctgaggttttcatacggggtttcatctctagcctaccccaacgtgcttgggacaaaaaggctttgttgttgttgttgttgttgttgtattgttcaaaggagttctcgaagcttcactttgatctgtcttaagaaatcctttgaattttatgacaaacttgatgttgctgtattgtgtattcagaactccccagatccaagcagtcacaggttggcaagcacatcatttgtgtcccagcttatgattcaagaacgaggtagctgaaaactgcacactctggcaacttgccaggattggaagttgaaccatcgctttctgtcaagaattcgagataagtatagctgtgctggcgtttttacccccatccagtgcgcagttaaacannnnnnnnngattcttgacagnnngcgnnnnntcaacnnnnnnnnnnnnnnnnnnnnnnnnnnnnnnnnnnnnnnnnnnnnnnnntgaatcataagctnnnnnnnnnatgatgtgcttgcaacctgtgannnnnnngatctnnnnnnnnnnnnnnnnnnnnnnnnnagtttgtcataaannnnnnnnnnnnncttnnnacagnnnnnagtgaagnnnnnnnnnnnnnnttgannnnnaattnnnngaaatnnnnnnnaatcnnntgaacngagcnnactattctggtggtttgt

SEQ ID NO: 4095 - DNA, 349 bp, Zea mays
gagaggaagagagcgcaggtgaccaccgccgcaaagaagccataactgctgtcgctgcgtcgccgtcatcttcactttgctttgatctgaacatggacgttgagaaccacgacacggagagttgcttcacagatgctagtctgctcaaggcagtggatcgaacgttcttcttcagacgacctgatgagagtagcgattagcttagtgataaatgacctatctctcttttgttcttctctgtaactgttggtcagtttcttgtagtttgtttctaagatgtttgtgttggaggaatggagcgtgcatgtggtactcttctggattgaacctgcgtggaaattaattaaag

SEQ ID NO: 4096 - DNA, 574 bp, Zea mays
aagtagctggagtacggtggcggttctatcttcgacgggtcgaaatggagagagtcgtccttgacgcacttgatcctggcacgccgcgtgcccaggaacagcagacccctccggtgaggcaaagcactgaacactttctgtgcacgcaccgaacgacctccagtcaggcgcgtaaaccgaactggaactaggaaccaaagttataaactgtacgaggcgtttaggcacttaccgaggacttgcaggtgcgagaatgagccggcgccgtgacgggcccggcagggaccgccgtcgacatgcctgaacagtttcaacagagtggctgtgatatctgacgagacgaactgtgcgcagggaataacgaacgatgaaatggggtccaagctggaggttacctgggaataggcgccacgggttgtagcaggacgccatggtagcggctcccgctatggtgctgcttgcagcggtagggcgtaggcgtcagtcaattcgtagtgcgcgggcgagagtgaggtgcgaatccggcggcgaggttttggatgggaccttcggagattgccgcgttcaggataac

SEQ ID NO: 4097 - DNA, 679 bp, Zea mays
gcaatctcatatgggctgcatgggcgcctaatggaacagatgaatcaaattatgctggtaagctttgtatgtagatctctttttcctcaaggaagcacccatgtgattatcggcttatcgccagcattttagttctgcgcttttgccgtccttttgcatattttgtggactagtgattcttgaggatatctttctgtgcttgaaccaattcaaaattgttgtggtaatattttcgcaggtgaaggatttgcaatggtttctggaactagcatggctgcgccgcatattgccggcattgcagcactgataaagcagaagaacccaaagtggagcccctcagcaataaaatctgccctgatgacaacggccaatacactggacaaagggagccatcctcttagagcgcagcagtacaccgcatcagaaatgatgacactttcacgggccacaccgttcgattgtggcagtggcgctgttaacccaaaaggcgccctcgatcctggccttgttctagacgcaagtaagccaattactttttcatcgaaataagccggtcgaagttatcgaaatggcggtgtcttgttgaagttattcagatggcaatgtaacaatccctcatctagttttgctttatccatgcttggcaggccatgaagactacatcacgtttctgtgctcg

SEQ ID NO: 4098 - DNA, 795 bp, Zea mays
acccctgagttccgtggtcgaatggtatgttcttatattcctgattgcatgttccccatttggagagatcctatatgattaagatatctttagctctgtcatcatctaaaattttagtacatttattttagtatatataatacttttatctaaattcattgttttcctatgcatttatttgcattgcagtaatgcatcactttgtaatgtatctttgtttgattctttcctgtttttcttattattaatgcatataagttttcctccagaatattttaaatttgccctcatctgtaatgatctcctcagtgtgtatattttatggttttgcttatgcttgcatacagtttgccatgtacattttgtgttgtttatattttgagttccctcagattttagggtctgggaaatggaacttctagcagtcttacccttgcttagaaattcccttccctagacctctacaatttgtgggatccttcggcactataatccttttcccttttccatctcaacgtttagggctgatttggtgaccagagaattagaggggatccatgggggaggaatccccttgccgtttcccaccttccatgccgtgcggaatgagctcctcgaggagctcacgatgacacttgaggcacccgctccggccccgacactctatagtgccccgcctggtagtccggcgccctctaggggccatggctctcgcaccacgtcgatcggggcccctacccgccctcctgccaccacctcggctgcccctcgttcggcctccacctctgacggggg

SEQ ID NO: 4099 - DNA, 419 bp, Zea mays
  misc_feature (8)..(8): n is a, c, g, or t
cactttcncttaaattcgccaccgccgctgcgctggacaaagttcgccgtcacaattgtacgtggtcagccattgttgtgcttagattagtagtgttcttgattgatagctactggcatatagaagtttattattataaggtgcatatatcgtccttgcttttgcattggtcgttctctgtttttcgcgttgatcggggtttgcgtcacggtgatggtgaaatagatggtcagatggaggtgaaaaggattggaaggaacaatttgagtttggattgattgctaattggctgactgcttgagagagagatcaggatgacgaggaggattggttggtgacttggcgccaccttgggcctcggatgtatagggggaattgagcataagttcttcagttaagctactgctttcagttgggag

SEQ ID NO: 4100 - DNA, 423 bp, Zea mays
tgatcatcatcatcatacagcaacgattgcgcacacgtggttggcggcgatggcgatcgccgtgctccctatcgtctccgtcctgattctggctgccaccaagcacaagcagatgggaagaaccgtcttcgcccctcccaagcgccgagagccgccggtggcggaggagggcgctcctctcctcggcgtcctgcctgccatcctcaccaggagcttgcaaggcgtgatctgcgaccagtacttgaagctcggcagcgtgttcacgctgagctccttgggagtgaaggtgacgttcctggtgggccccgaggtgtccgcccacttcttccatgccgccgagtcggagatcagcatcggcgacgtctacaaggtcaccgtccccatctttggcaaaggggtcggctatgacgtcgacaacgacac

SEQ ID NO: 4101 - DNA, 1340 bp, Zea mays
  misc_feature (1262)..(1268): n is a, c, g, or t
  misc_feature (1301)..(1303): n is a, c, g, or t
  misc_feature (1317)..(1320): n is a, c, g, or t
  misc_feature (1322)..(1337): n is a, c, g, or t
aagagagagggagagaactggacggcggcggcggcggagacgacgatgcagtggtacttggtggccgcgctcctcaccatcctcaccagctcccaggcaatcccccaaaccctacatatttcgtcgattccccttccttgctttttggtttgcttcgattacaccatagtgtcttagatctgtcgccaagctgggattggttgtgaactttcggttgcttcccatttgggtctttgatgagatgcactgtggattaggcgtcctaggttgctggatcggcagtttatgttttcgagcggagtcgccataccctttgtgaagaaagacgcggttcagatgactcgtgattgttaccctggattccagggcagattgattgtcgtcgagaagcttggtattggttatctggtgagatacatgggatgatttggtggaattgtggaatgagaaatgacatgcttgtgatgctgtgctgtggaaatctctctcaagtgagggaacatgatcatgtgcaggactgcagactagagctaaggacttttggcagcatcaagccatggttaaacaggattggaaagttgcacaacaacaacaacaaagctttttatcccaaacaagttggggctggctaggattaaaaatccaatagaacccacaagtcaaagtttggagacatggataactgattttcatgcacttctattcaacactcttttttttgtatatcccatcctttcaagtcttcttttactgcctcttcctatgtcaacttggttctttctccccctcccttccagggacggagccagaaaaaaaccctctctgctctcttcttattgctattgtgccgtagaacccactgcacgctgatgtctctggaggtcttcgttggacatgtttaaaccatctcaaccaatgttggacaggcttggaaagctgcacatgatttgttttagatttttagttccaatgtgtctaatcagcttatctatatatgcagggaatattgaccaccctttcccagagcaatggcaaatacaattatgattatgccacaattccttttttagctgagctcttcaaggtaaataatttatatttaatctttgatagcctcatacccatttttaatcataatgatgaatacatgtgtagacggtgcagtggttcatcatttattgtgctaacattgcgctattcttggtgcagttatctgtctcaggcttcttcctctggaaggaatgccattcttcatctccacnnnnnnngacaaaggaatggaggagcgtgcgactatatgnnntccttcagttatannnncnnnnnnnnnnnnnnnnccc

SEQ ID NO: 4102 - DNA, 1205 bp, Zea mays
ctacttctattctctttgcattgtttaatagtaccacatcgttttgtccagagattgttttgctaaacatgcaaccttttcatcagaaactatcagttatctatagtgatttttttgtttaactagccacataatgtgttgacatgtatctggcatctttattacagctgttaaaatgtgtctgatgcagaaagttcacagtagttctagtatactgtattagttgttcttagtcaccttaagaatgctgtaacctaatctctcttgcagttacttcatcaagctatttctagacaagaaatatgctttgccataccgtgcacttgatgcagtgcttgcccatttcatgcgttttgttgatgatgagaggatcatgcctgttatatggcatcaatcactgcttgcatttgtggaaaggttagtgatggatgtgcagacttcaaagcatttttttctttgattcgaaacacgtaatccttttatttgtggcatgctgccaaaaacctttcatatttgaagcatgaaaggtcctatttgaattccctcttccatcatctgcacgtccttgtattctctggaacaaagtagtcacctcgaaatttttcctgttggaagtgtggttatatagtttgaacatgttctttattgtgtgaggcccaagcctcatagttgcagttatgagttcatgactgaattgattgctggtgttcattcaccaagtgtctttgctcactctttcactgctttagtcatgcatcttacactaataacttcgtgacagatacaagaacgagttagagaaaaaggataaggagaaacttgcacgtttgttggatcaccagaaacactatttagtatgccactttacatactcatgaatatcaaagcaccatttactggatttcttagttaactgacatgtgctaatgcttgaaacatgaaccctctctaaacaggttactccagaaattcgaagggagcttcgagggagctgcaacaggggtgaaaaagatacaaatttgcatacttatatcctttcagtggagcttgttatgatctttaccttgcatacatatactatattagctgaaccaaaaatgttgtaattaatgcaattagaattttgattcaagtctggttatttctttaacatgttttcttactgtcacctatctccgtcattaccaagcctatcgaggaagaca

SEQ ID NO: 4103 - DNA, 358 bp, Zea mays
gcgccggctagccagcatacttgtgaagaatgccacgattgagtggaatgaatttgaaagtagagtaaggaaactcatacagcaaactaagcaagttcatgagaggcctgttgcaagaagcatatttagacatccacgatgtccagaatgcatgtgcagaacagagcactaatattttgatagtttcttgtatctataccaacagttgttttttcagaagaaagactaccaattagatcgccaaaggtagttcttttgtgctcccgctgaaatctggatagatctcttgcccttgaactactttggaatcaaactgtacaaaagaaaatataatgattgagcccttgtttgtatcaga

SEQ ID NO: 4104 - DNA, 369 bp, Zea mays
attttcttcgatcgatctcttcatactattaatggtctcctgagatgcttttgctgctacatttgaggatctccagctcgacgaggccgagcaacatgagccccgttgtgagcctagacatgatccctgccaaaagcacgaggaaggagatgctcacacaatcactatcattcaaaccatacaatgagcaaatagtaatttttggacatcagatgaatacctctccaaaggcaagaacaaatgtcgctgacaataatacaaaaagaacatgatgaaacattctatcaaaaatataggaagtgcctgaaaaggttgcaacgaggtaaacataaaagtcaatggttaaaacagaatggagtgcgaaaggta

SEQ ID NO: 4105 - DNA, 384 bp, Zea mays
atcattcctttatctattggaaatctcaaagggttaaatgtctttgatgcacatcattgcaacttgggggggccaattccagcaagcataggcaacatgtcgaatctgttgacacttgatttatcaaagaactccctcgatggttcaatttccaatgagattttcaaactgtcatcccttgacccttatctatttaaagttttaaacttatcatacaattcgctatcgggacatcttccttctgagatgagtagtttggggaacctgaaccaactagttctgtctgggaaccgattgtctggcgagatacctgagagtattggggaatgcactgtgctgcaataccttatattggatatataactcaatcgatggaagcatacc

SEQ ID NO: 4106 - DNA, 718 bp, Zea mays
ctattactcagatcacgggggccctggtgttcttggtatgtggaagttgcatatgcttctatacactatccaatcgaattttgttgtcttatggattgacgtttgctatttgcaggtatgcccaatctaccatatctttatgctggtgacttcatgaaggtgttaagagaaaaacatgcttcaaatagctatgccaaaatggtaagattgttctcatttacttgttgccaggacacttgtcctatctgaacggaagcatgtggacaggttatatatattgaagcatgtgaaagtggcagtatatttgagggattaatgccagaagaccttaatatttatgtcacgactgcatccaatgcagaagaaagtagctggggtacatactgtccaggaatggaaccaccgcctccttctgagtacattacctgcctaggtgatctatatagtgtctcttggatggaagacaggtaaagttcatattttgtggatgcttattttgttggcaacaacttcatccttcctaaattataggtcttttggcttttctaggtacagacattttgctatatacctagatatttgctgtgtttagatacgtagtggagtaccttgtggtttagtgggggaatcataatctttctcaaaaattactcgcattttctctgtagagatactatggcatgttgttcttttccggttctgctgtacacaggaaact

SEQ ID NO: 4107 - DNA, 392 bp, Zea mays
atatgacttgccatttagtatttaagaagctactagggaaatttgttttcttgtcacgcttcaaaatgccatgttcaggcatgaactaggtttcatttaagcgattgcaaaattctactccctccgatcaaagacatttttacattttggacaaaagccaatgtccccaactctccattctgttgctttgatcactgtttactatttgtgatgcaatcaaattgatatattatgaaagttcttccaacccatgttttttctgtttccaattcaaatattcgattggaatcatgcctgattcattatgttctcatgactgggaattatatgtttatctgtactttccaagttttgtgatgatcatttgttgcttggcctttaagcatttactg

SEQ ID NO: 4108 - DNA, 410 bp, Zea mays
ggcatatacaacctcatttaatatgaagtctcttgaggggtctttagggggttagataaaaaaaatacaaaagacgggctcttcacgaatattgtttatattgtctcttaactgcatttatagtctagaggcttgtatcacagagtcttttaagtgtctcttatacttagaaaaccgaaccagagtctcaaagttgtacatgccaggttgtacatgcccttagagtgaacaagtgactgcaggtccttctaagggccgtcattcctggccttccttaaccagagccacctcatgttcagcgagacagcgaccaacccaaagcttctaaattatggattccaagaccgccttggttgagtgacctgcagactctttcccaaccaacaagacaatgccctccttgtacgttt

SEQ ID NO: 4109 - DNA, 421 bp, Zea mays
tcagatgaaatggttggtagcaagagaaatgaggtggatttactgcagaagattaatgcttttgctgaagagaagaaggctattgctgatgaacttgaggaagtgaaagctgctaggaatgcaatgaatgctgaggcaagcaaagcaaaggcagagtttgagcagatggagcaaaagttatcaacgactaaggagaagctcagcatggctgttacgaagggcaagtcactggtgcaacaccgtgactccttgaagcaggccttggctgaaaagacaggtgagcttcagagttgcatgacagaattgcaaaagaagtctgatgccctgcaagcagctgagagcagggttgatgagctacagatttttttagatgaaaagacaagtgagcatgaaaagtgcttggatgagcttcgagacacat

SEQ ID NO: 4110 - DNA, 1214 bp, Zea mays
  misc_feature (836)..(836): n is a, c, g, or t
  misc_feature (962)..(962): n is a, c, g, or t
tcaacattcgacatcatctgcccattgaagttcatcagagtatgttctgcagcagctcgagaggaaaactcaataaaaccatagccttctgagtgcccagtctgcttgttccttataattttcacaaaaagcaatctgcagttacttgaaagtattaggtcaacaaaaataacttaacaaaagtattaggattccaatcagacaacaaatatagtagatcaactaaaatatatcccgagacttatattactaaatcgttatattgaactccgaatatagaagcaaatatagtagatcaacaaatatagaagcaaaagcacctgacattcttggtatgagtttgttataaataaagagacaggttgctcatcaccggccaccctcagcagagatgtagtcattaaaagttgaaaacagaagaaaaaaacacattggcatctgtgcctacaacttacaatcagtcatatgcatggttctgggcctaaaacctaacatcttggtttggttgaaataagaagtaaatatggaaggaaggcgcccttagctcatcagggactacactgaactaaatgatctagtatcaaactctataactataatagaaaacacaataaataaacaagagcataacagcacctacagttgcgggcatatcaaaaccaaattagccaaagcaatcatacaagggagctcactctcagatttccaatgcttcggacaaaccatcaactgtctcaagtccgccatgcacaacacgaccgcctacccgatcaaggaccagacaaaagcttgttgataccaccaagcaagttacaaatcatagacaatataatttnagaacagaagcttgttgtaaaagaaaaaacactgacagtgcgactgctggggccgggtgcttggcggcagatggacaaccacaagttggcgagagcgtgcgagacggaacagggcgtgggtgcggntgctggcatgagacagtgagagggttaccccaaggttgttcatctcctagattttgtgaactccgtactccacagcctacaaatggcagacaattgattaggaatcaaagagaacccttgggggatctaaaaacagagggactttcctgccaggaaagttatccatgtgaaaaaaggaggatgaaactaccgtccacatggaataaataataaattacagaagataaagaggagcattacagaaaaacacct

SEQ ID NO: 4111 - DNA, 342 bp, Zea mays
tataacagtacgaggttaggaatgcttactgatagcggggtgcttgcctcgagcgacttcgctgatggtcaggcgcttgtggcctccgacgtggggccaggcgtcaagagaaggctaactcttgaccctgatggcaatctccgtctgtacagcctgaacgattcagatgggtcatggtcagtttcaatggtagcaatgacccagccttgcaatattcacggtttgtgtggtcctaatggcatctgccactactcacccacacctacatgttcgtgcccaccaggttatgcgacgaggaacccgggtaactggaccgaaggctgtatggctattgtcaacaca

SEQ ID NO: 4112 - DNA, 876 bp, Zea mays
ggaggtcgccgccgccacttgtacgctccttgctgccgtcgccctaccagtttcgtcgtccataccgtcgtcctcagcagcagcagcacgctctgcgacgaaacagagctactcgaggaggaagacgacggccgtgcgagccgtcatggcgaggccgcatcaggtgccgccgcctgccactgccaccgccaccgccaccacgtaccgcgacaactggttcgacaagctggccatcgggtacctgtcccggaaccttcaagaagcttctggtacgtacgcagtacgcacagcacacttgttgcgccctgcacacgctgcacacagcaccggctgctagcgatccaaatctttgtgctgcatgcatgtcaatggtcgatcggtcgacccttcttggtggatccgccatgtaactaataagcgactgcatgcacgcgatgcatgtagattatatcgcttgtagcagctgggtcgactaatataacaactagcgtacttgatgtctactttattgggtttttttaagctggtgtcatcggttttaatggtatcctcatttttattattagtcatgtttttttttcagttttacctttctgctctatatataacactagaaggttaaaactgagaagaagaaaaaaacacgactaagttttaaaaacgaggacaccaacaaaactaaggacaccagcttaaaaaatcctattttattttccatctctcttgtaaaattaattctgtgtcgacatagcagctagtagcatatctggttcatgcatatgttgtgtgttgtattgtgtgcatgcattgcagggatgaagaacggaaaggacggctacgagggcctgatagaggcggccctggccatctccgcgc

SEQ ID NO: 4113 - DNA, 676 bp, Zea mays
cgctgtgacaatgaaccagctccttggaccaggttggacaaaacacttcatgtcatcactgtcactgctagattagttcttgaccttagagaaaaaaaatgtgtgatcttcctgctgacatctgtactctgctttttagcgacgatcacggtgaccgtccaagaccattgccaaagataaaggagctgcaaggtgcaactgatataacagagaggaaagggcgcccttcatgggattatgatgtatgtacatctgtttcttctttcagttttaccataatatgttatggaatatggatgagttgtattcattgtgataggataaagatggctggaaatgggtggtgcctccgccagtcagcaggaagcctgttctatctggggatcctgagaccgacaagcaaatccgtagagcaacaaagcgtgttcatttgtctgttgctgaaaggctgcttaaaggttcatgctcttccgatttgatttattatttaactcttgggttcattttatgatatttttgtgaaagcatggtgttccctgttcctgcagaatttgcttgttcgatatgccgggcggtgattaaagaaccacttacgactccatgtgcccacaacttttgcaagacttgtttgcttggggcatatgatagccagtcttctgtaagggaaagaagctgt

SEQ ID NO: 4114 - DNA, 402 bp, Zea mays
aagatttcgacatcgggggaataccgatacggatcatacaacgttctgttccaagaaaagcttatgcaaagcgcaacaacacaaggaacactggccctagggttgtcaggatgaaaacagacaaacggacagcggtatctgacccagccctgtcatagagggtgagcaccagtatcagccgcctaacctgaagaagggaggtcatgtttcgcgtttgagctatatatatatatatatatatgcttctcatggggaaacgggaagtgaatgtttttctgactcgggaagttatacaaagctatgagctagccggtccggctgcctgcaccgcatgctcaagaagaagaatgactgtaagaaacaagcccagcaattcgaaggacagcatcacttctcaacatt

SEQ ID NO: 4115 - DNA, 1070 bp, Zea mays
atcttttctctttggtctgcaaattgttgttggcttgcagaaaattctgtttcctgttgtactttgttcattgatttttccacgtcatggtatagcagttccacttgagaaaaacatatcgattagtactattattttgtgttagcccggtacatctgttttctgatgtagttcaagtatgattggaactctttgctttgaatgactggcacaagtgttttcttttcttgttatgatgtggaggtcttttcaccttttcgtatcatatttgtagttctgtgctctttatttttttctcgaacaatgttctgtactcttcaatgttttcaagtcggacgatttgctagtagttttggctgaccgactagggcgattaatcgcgattaatcacgattagtcggacgacttggacgattaatcgcgactggtccaaaccgactttgacaattaatcgcgactaatcgcgattaatcggacgacttgaaaacaatgctctttctcgaaacaaagaatcccaggatgaaagtagaattgtactatttagttgcgagaagtctctggcaatgaaatacattcctatttatttttgctgaatcattgtcatgcagaacctgataattgaaaggtatcttattcaaattaatgattaaaatgtactgatggttttacataaagactccttcacgaaattcttacacctacaatctactctttaatttgtttttttaacattcctgaaattacaatttcaggctgtgacaggtttatgctggcaacggtcgaagcctgtcgttgttaatgagaacagttcttctgaagttgctcttcttgggggaactaatgaagagtctgttcttatgccagatcccttgccttcagcaacacctacaggccttggttctggggtggccactacaagtcttctctctttgacagcaaacacaagtggctatctttcggcctcaaattcttctactatggaggaaacaccatatagaactcgtccgctgactggtggaccgttatcaaagctacaggctcctcttagtaactataatctgaaggatgat

SEQ ID NO: 4116 - DNA, 402 bp, Zea mays
tcctcgaggaggtcaagagcaccggcacgggggagttcagggatgtcagggccggcacaatgtgctatcggctggtgactggggctccgcagggagggatgatggagggaattccttgtggggtttgccccaggattgatgagtgctcgccggaggggataatctcaccgagcacgtgcgtttactacaagaagtggctgcagatggacttctaggcggttagccgtcttctgctgtacctgtatatgtgtatatgatggagtgttggagtccattggagaactcagtttcatattgaccaattggggctgttggatcacactcatcacacgctaggctggattcaaatgttcaattggaacctctgaaaggatagtcatagaagcgcagtttcagattctg

SEQ ID NO: 4117 - DNA, 402 bp, Zea mays
  misc_feature (257)..(259): n is a, c, g, or t
  misc_feature (287)..(287): n is a, c, g, or t
tcctcgaggaggtcaagagcaccggcacgggggagttcagggatgtcagggccggcacaatgtgctatcggctggtgactggggctccgcagggagggatgatggagggaattccttgtggggtttgccccaggattgatgagtgctcgccggaggggataatctcaccgagcacgtgcgtttactacaagaagtggctgcagatggacttctaggcggttagccgtcttctgctgtacctgtatatgtgtatatgnnngagtgttggagtccattggagaactcantttcatattgaccaattggggctgttggatcacactcatcacacgctaggctggattcaaatgttcaattggaacctctgaaaggatagtcatagaagcgcagtttcagattctg

SEQ ID NO: 4118 - DNA, 721 bp, Zea mays
cgcagaggaggcttgcgcaaaaccgcgaggcggcccggaaaagccggatgaggaagaaggtgatcccccttcccctcacgggaagcttctgtacattatgctatgcttgcaagttgcattccatcctgtcttcttcttgctcagtacccccctgtttatttaccctgacgggaggcttactgagttttgtctacagttttactgtaccatgctgtcactgtttccacttgcaagatcgctgaagcactgtgcaaattcgctctgtaggcgtacattgtggagctggaaaacagccggtccaagctgtcccatcttgagcaggagcttcaaagggcaaggcagcaggtgaactcctgatctgttttcctctgaagaacgaaacgatccatactacttcgacgctgattgtctatgggctgtaaatacaggggatgttcattgcaagtggacgctccggagatcatggatgctccactggaggcagatgatctttttttcttctcttttacattgctcagctcttgttctctgaattctgatcctgtgcaatgtaaagcctaacctgtgtccttgcaggtgcgttggcgttcgacctggagtacgcgcggtggctggacgagcaccagcaccacatgaacgacctccgggtggccctgagcgcgcagatcggcgacgacgacctgggcgtgctggtggacggcgcgatgctgcactacgacca

SEQ ID NO: 4119 - DNA, 478 bp, Zea mays
tacttgaaggaaaatatccttcctaaagaccatgtgtccgctgagcgtataatgcggttagctaaacgctacacggtggtagaaggggatctctatcgccatggcgccaatggcattctcatgcgatgcatcacccaggaggagggccgcgagttgctcacggagatccatggaggcgagtgtggaagccattcttcatcccgcacactccaggatgcagctgagttggtaaagtcctgcaaagtatgccagttccatgcaaagcaaatacacacaccagctcaggctctacaaatgattccaccctcctggccattcgccgtatggggggtggatatcctgggaccattccccagggccatcggtgggtaccggttcctcttcgtcgccatcgacaaattcacaaagtggacggaggctacccctattgttagcatcacccagggtgcagatgttgcattcctcaaatcgattatgt

SEQ ID NO: 4120 - DNA, 422 bp, Zea mays
tgtcatctttcaaatgaccaaacacgagaggtagcccaagctgggtgccacgaaacgcaatttcaatttgtaatgaccagcgcgcacggcgtgttagggacagccggacgtccctctcggatgaacacgccggtgtgacgcgcgacgaagctcaggggggtgcaccgcacatgcgcagacctgcctgccaacgaatggcatccgtttccttctctctctctctcgccgattcgtccagccgtatatgtaacgctaacaatatatatctgcaagactacaagttgccattgcctagcacgggctttgattgacacactagctaggctccaaaagggcatcccatgtagtagcttcgcaaagtgttattggatcacggggaagtttagttatgtttttccagctacagctggataaagttagct

SEQ ID NO: 4121 - DNA, 400 bp, Zea mays
gtggagccacggcgtgatctccgacgaggtgtgggcgagcaccctccacaactgcagcttcctccacgacctgtgctcctccaacgcatcggagcacacgttcgagggagggaggatggactgcttcaacctctacgctccggtctgcctccagtcgcccaacggaacctactactccagcagccacgtacgttacgtacctagcgcccgccatatgccgtgtccatggaactccagccgctcttcttcttgtgagatgaaaaacgtgcacgtagtatcttgcagtcgctggtacacagatagatactgaagtgttgcaattaattccggtttgtcagttacctggctacgatccgtgcagcgaccattacgtcagatcttacctcaatagcgtcgaggt

SEQ ID NO: 4122 - DNA, 531 bp, Zea mays
ctctggagcttcattaaaaggcatctaaattcaaagacgatagtcttcttatctagtgtcaagcaggtagtcagttattatttttctgaaaagtacatttgtcttgcacacttacatatgtgaatttttctcatgtcttccaatattcaacttctgcaggtcaaatttgtttatgaaatttttaagaaacttcgtcctggtattcctttgaaatgtatgcatggacggatgaaacatgtggtacagcaggccatagttgcagatttcaatgaagctacctcagttcttttctcaactgatataacatctcgaggactagatataaagaatgtggattgggtggtgcaggtatgccattatgttacgcactaccattgttcttgtatttattctcatgctgtaaccattttatctcatctgcaggttgattgcccagaaaacattgataattacatccacagagttggccgtacagctcgttacaataagaaaggaaaatcacttatattcctttgtcctgaagaagaagca

SEQ ID NO: 4123 - DNA, 979 bp, Zea mays
  misc_feature (913)..(920): n is a, c, g, or t
catattgtatctgcacatgcattgtatctggaacttcatttaaccacacttccggcgatcatgattcatgaatattttgtctccctccatgtcccaattgacttgtactctagtaaagtgaacatcacagacatgtatgattccatattttgaagtatacatatgtgttttcagtaggcatgccgtaacaggttattttcttttgtgttttctccttcaggttggaatatatctgcctagttacgatttattgcgcaattggattgaagaatactcggaccgcaattgtcccaagcttcgaccatatgctcctcttatttctggctctattgcacgatcattggcatgcataacttgttgccctattgagttagcaagaacacgtatgcaggtcagcatcttggactttcttgcatggttgtgtattagcagtcaaattaaataacacctcatgctctgtttcttaatagtcaaggaaagaattctaaagttaagttgacaacatacttacttcagctaataatgcgaaaacttggttgtgtatcagtgtatctttgtattatgtgggtgcaacatgttgctacctcctattcagtgatcaaatgtttatttttttaaaattaggccttcaaagaatcgaatgttggagggaagccccctggaatgtggaagaccttgataggtgtgctttcatcaagacagagcatcaagagccctgaaaacggtaagtgccacgactattttttaaatgcaattggcaaaacatacagttattgtcatcgtatttaaaagatgcaaacataatgcatttaacttctaactcttgtggaccgcattgtttttgcacaaatgcatacatatgaaacttcaaatgaattgcagcatttgttttcatttatcgtgaatattgagnnnnnnnnatggagaggtactggtgcaagcggcggtgcagttcctcgcacgtagtaaccagcgcgcc

SEQ ID NO: 4124 - DNA, 442 bp, Zea mays
agggagagaaacagagcgagagaatccccgacctctcgcctccgccctagctaccaaggttcctcctgatcgattgattccaatccatccaaaaccccaacaaaatgtgagttctcatctcatcctctcctctcctctcctatcccgcgagagatttccacctgttatttttttttcctttccggtttcgtggatggggatctgttctgttctgcgtcgcgcgttttttgttctgatctgttccggcgaacggactggagctgctgtttgggatacattccgcccagaacccggttcctggcctgcgggagggagggaggagtaaatgagcggccgcgcgccgcctccccactgtcggtcgacacatgccgttccactgggtggaatttatggcgactcggacgcggcgctgcttttagtagtaaccaatgcagcttcctcc

SEQ ID NO: 4125 - DNA, 174 bp, Zea mays
gttcatctgggtcgatcggtacagctgtaacacctctaatcacagcttatgccgcctgagacgatcgtttctgtcgcgattccggtcggggtggcgttcagttgtgcgtgtttcttctgcagttgtctacccaatcccaatcgtaacgaaacttcatcggctactcaaagaatc

SEQ ID NO: 4126 - DNA, 430 bp, Zea mays
  misc_feature (6)..(8): n is a, c, g, or t
tggtcnnnatcaactgctcggacaagttcctgagcatccgcgagcggaggaaagcgaggtcgagggagaacgccatccagctggcccggcagcagctgaaggcgcaggaggggtggagggcggcgaaacagttcgcgaggaggcatgtgagcggcatgcagggccatctctcgcgcacgttctcgagacgggtgtcgtttcggcagccggtggacccgcacagctccagccgcagggtgcaggaggcgccgctgatgacgcaggagatgtcagactctgccgtgtttgcgtccgagagcaggagcgagatcacggaggtggtgatgccgtcggttgttgtcgacgtcagcgacggcggagaggtcgtcgtggtggacacgaaggaggacaagcctgcgcccaagggaaagcacaggtccacccatacaca

SEQ ID NO: 4127 - DNA, 369 bp, Zea mays
aggcgcagcaaccggcaagagcgtgaagcggggaccatcgaacgagacggcgcagatcgttcaccggagaaggaaagacaaggcggcggactccagcagcgacgcctcttcgcagatgtcggagagctctaaacccacctgccgcccgaccaagcaggccgtttctctgcccgttccagctctgcgccggtcctcgtctactacctccaggtccaggtcctgccagaccccgtcgcggatgaggccgtcagcagcagcttgccaatcgaaatgcgcgtcttcggctgctcgaacggttgtcgaacagcctgcttttagctatatcatcgctgatgcgcggaaagggaagaagaacgcatgccagagtga

SEQ ID NO: 4128 - DNA, 381 bp, Zea mays
agcggcatgatatcgatgccgagacgaattttttcatgcagccacagtatccttatcagcaatatccacaggctgctgatgttcattggatcaatagcaatcagtatggtgttatcaactcatcagacaagtatgcagctgcgcctcaccgtggagtgcctactgttcgtcatctgggacatggcagtcctgatatctacaggaatggtgctgtaattcctaatggaagtaaccgacggggtttgacacatgtgaataactgtccttttataagttatcctgactgcttttgtgaaacctgtgaatattgtcagattcgtctatctgaaaatctcaaacgttcatttgggcccagacatacacccaaatgttcatcagacg

SEQ ID NO: 4129 - DNA, 350 bp, Zea mays
  misc_feature (228)..(230): n is a, c, g, or t
  misc_feature (241)..(243): n is a, c, g, or t
gaaaaaaagacagaatagattaaaatctgaacggagtgattactgcatataacaggacctctcagatccctgaacttatctaagaagattgtctcgcagaaaaatatatatatacatgccagtctgtcaggctagaagaaaaacaactccagtctctcagatcactgaagaaaacataccactctatttctccaaagtcctaactgaactcctgcgcgtaatccatgnnntactgggcgannntagaagaaaaacaactccagtctctcagatcactgaagaaaacataccactctatttctccaaagtcctaactgaactcctgcgcgtaatccatgttatactgggcg

SEQ ID NO: 4130 - DNA, 1502 bp, Zea mays
aggaggtctttgaggacggatgcccatccctttcaaggaggtctgtacccttacctcatcttgattgtggatgcattatagctggcaaataattatactataaacttatgctttccaattaataaatgtattgtcatctatggagtactgcttcaatagtggttctaagatacctgtaattactactctaataaagaagtatgatgtttcctgctactaacttgatgccacttgagccggaagtattttacctacatgaggaagttgtatgtgctcaaatacaaaatacattagattgtttgatactgctggataccataccttggctacaaaagtttaattcctgatagagcataatgaatgctgttgtcaagtaagagtaaataacaccttcacaaaatgttgaaaaaaccagggtattgcaatcttgggctgaatttctaaagggaagtcaatagtattacaatttgtgactatgtgctatgcttctccttcattaagcgcttgctgtaaccatgtagttcctcacacagtaatcaattactctagtcataaataagtgatattttggacactgacctggtctccaaaacaatagttttcatagtgtcatttcttacagaagtatttacattcaatatagtaaaagtgatactttactaaaccacattttgagactatgctcatcatttttttcaaatatccaaactcaacacatagaaaataatattcgatcaaattttcaaatggttttcttaggacaaccccaaaacataactgctttcagcagtgttttcatttcatgtctcgaaatagatgtttgttggaaggaacagtatctcatcaagaactatcaaccatggcaaaattgtgcgaaagccatgacatcataaaatgttgaaaacaagcttgttttgtcaaaatggggtgttggattccagaagcatccaaaactttagatcatgatgccatgcctaacatttggtttccaatgaatgcaggcttaattctgagtatcctgtccgagacatgttcaaactttttgcatgtgcaatttgtcaaattgacttggaatctggccaaggcatatccatacacgagggtttgtcaaggccagggaagctgcgtccctgggatggccctttcctttgtcacagctgccaggaaaagaaagaggcgatggaggggaagcgccattcacgaggtataaactgtcctaattttattactacaaactgccctagttccttttcacacagcttaccgaatccagattgtgttagcgacaaatcaaacattatattcttacatctgcagattcctcgtccagaaatagcgggtcaagtgaatcgtgactgaagccgagaatcatcttgaggcaaacgcctagcggtgtgacgagctaattatcgttgctgctgttatcttgcagcactttctcatggattaccattgaattgagacatgttggaagtcgccatgcctatatatatgttggagct

SEQ ID NO: 4131 - DNA, 387 bp, Zea mays
ttattgctagcttgtagttttggggtcctataatatttttcttggttctcttaattaattgagctagtaaatcaacaaatctgccactacagccgtcacgggcaaacataaaaaaactgaacaacaccaaattgaggcgcctagtccacaaacctgaactgctgaacttaaatgtctggaagccacagtttctgatttctgatggtttgtttttatgctcatttactctttctttcttccaggtagaccaccttgtgttgattcctcgagtcttcacctggtgcttccgtttgcagcttcatttttaactaaggtacttagatcacatattcacatcactgccaagtattatggtatataggctcctctgtcatatgtgggtctagg

SEQ ID NO: 4132 - DNA, 405 bp, Zea mays
tcgttgatgatctgcctcttaatcggcatctcaaactcttgttgtgctctctacatcagtagagaaggtgtgttgttcacaagtcgtttcttcttaagactatgttttggttgatcttgatctatagaactattttattgtagaactactgaaccctttcgaagtgttgtactcaatttgtgtagaacaatgcatgattaatttctaccaatagtctacggtagccggtagttgttttatcctactagaaattgttgcatggttaattggttaatttgtgtaggatgtgccaaaagaagaggaagagaacaccatcaatatgaatggtgaattattcgtaagcttatcttccactaatggtgctggaagccagaaggagaaagaggaggatggagatcatgtgtc

SEQ ID NO: 4133 - DNA, 876 bp, Zea mays
gggtcggctcttgcagcggggacaggtgcgatctagatctgaggggcggtagcggcaggggcggtaggtgagcgttgctggaccaggtgttggggatcgtggcgagaggaggactcggactcgtcgtcgttgcagatgggagccagatctccagtgactccgtgagctgcctgctctgcttcacagcacacacccagcacaacactagctcagctcggcaaggtagcagtcattgctcgccatgcaatgtcattgccgctgctcccctcctctagctcaccgtcgccgtagcggggcttctgttggagctgtcagtttcttgttctctgttacaactatgtcattcaaatgcagtggtaatttagaagtaaatttttcactccacatttgagcataaagtaatggaatagatggtataaccttgcaggtggttgcatccatggactggccacaagtcacaacatataaagctctggtctcggcacaagcacacagggaagagattatacaaaatctcggcggaatgataaggtaatttatatcctctgtgttcatgaaagctgtgaatgaaactaaggtgccacgtaattatgctctgcagggagttgctgatttcgttcaataagagggctggcaaaaagcccaaaaggattatattttacaggtatgtgcttgacttaactatctagataactcttggatgaagccttcattttgtgacttcctttgcttttgttttgtttatttagggatggaataagtgaaggacaattcaaccatgttttgctccttgaaatggacgcgataaggaaggcttgtgcctctctggaagatgggtatctacccccagtgacatttgtcataatacagaaaagg

SEQ ID NO: 4134 - DNA, 405 bp, Zea mays
ggctgtgttgtctgatgaagctatctatcccgggaaggcaaaacgggggtgaatgaataaaaaaaaagggtcaacctaggcatcctgctttggctcctcaccggctaatcttctccgttgctggtgctcagcgaccttgtagtccacgacctcacggaacaggccaggggttagctcgcagtccttgctcccgtagacagccgcctggacgctggccatcatcttggctatctctcgtccggagaagccctgggtcttggccgccgcctcgcggatcaggtcgtcggtgacgcccttcaccacgatcttctggggctggcggcggaagaaacggagccagctcttctcgcgcttgtcgccggctctgatgacgtacttgtccaggtatagcttcaggagcttgaa

SEQ ID NO: 4135 - DNA, 354 bp, Zea mays
tctggcgggccagagaccggccttcccgccaccaacttgccctacgcagttcctcgcctgtcgaacctcactgtcctcaccctctgcagcattgctctccaggtttgctcaggcgtctgtgccatttcctttcagcccattttactgcctcaacgcttatacttgtttgccttgccttgtagtatgtttcttctttcacagccaaggccggctcggagggcaacctgcatggcttaagggagctccagttgctcacgttcgggatggccaactccaaccttgctgacatttatagcttcctcaagacctgcccgtgtcctcgcttggagcgtctctttgtgcaggtctctattt

SEQ ID NO: 4136 - DNA, 643 bp, Zea mays
cgttctctgccctcgggtacctcgtctgttcagtcttcagagctgggttcggtctattcctcatcctctcttgttgatccggagtgccttaagttttggtacgctctagcctgcttctcttagattatattcagattatgaaagagtgaagaactccttcagcttgcctttgttgtaaggttcattcatccgtcgcctcaaaattctaatttcaccccgaatctttatttttttcaggccgtcttgttactgtctgctgttccacagtcgacgaatcacgaatgctaatggtgtttgtgctgcttggaactcattttttcatctcttctgcgcgagactgtccggaagatgtttttttttgtgtgtttctctgtatgctgaattcgtccaattattacttggattgcaggaggaagaatgcgtagaggcaccgtcgtacatccacattgacagcaacgctttctcctacagaaagtgagcagttctgcgttagttctttctcaatctgtccaatgtgggttgaactttgatgggactggttcgcaacatttcctctcgttttctgttgttatgggaatgttatacttcctgactacctgtgttatcttttggaggcataagagtcagacagaggaggacatag

SEQ ID NO: 4137 - DNA, 249 bp, Zea mays
gaccacgacaactgcgacaagatcgggaggaccaggggtcttctcgacaggatcatctcctacgcgggcatagtggcaaacgggccggcgacggggccgccgacagacatgcgcctcaaggcggtcaagcagtcgctccgcgttgtgaagaggctggcgagcacgacggggaccaccggaaagctgcttcgcagggagctctctgacattgtgttcacggtgagcaacatcagggaggtgctgcagctg

SEQ ID NO: 4138 - DNA, 432 bp, Zea mays
gtcggttgagccaagaattgaatgtgtcatcgagagtcagcacattcaattcgttacaagctgcaccgttttttccggtcctctcatggcgatcgcgcgcgtctagctattatatcctgtcgatggtaggaagaatatatggatatggaccagcagtcccagttggaccgttccctacgacactggtgtaccgcattgcctgctccgtttggtaagtaacctcgtcgtgaggcggcagacgaacggccaggagtccggaccgggaccgggaccgggacggcagcagatgtgcagtgcagttcattcagcttcgtcgatctcgatcatgccaaccacttttgccggcctgcatttagtactgatgttcttctggaagcaggtcgcagtcgcagcccacgacgcttgcattgacaagctagagattccacgcta

SEQ ID NO: 4139 - DNA, 822 bp, Zea mays
tggagagtcgagcctcgaggtcgaggaggagggaagggaaaaggggggcgcatgggcggccagtggctgggggaggggatgccgtcgtccaacctgcagtgcttcttggactgcaccacccccaccgtcgagacgcacattctccccaaggtgacgcaattgccccccacctcccaagttctcgccttcgatgttcttcctggtttctggccggggcttgccacggtcgtcgcgtcgtcgatctgcggcgtcctggcctcctgggagtctcggatttgtcatttactccttttctccgcaccgcttagtgtggtggggtgaaaaagatgggctttcttctactctttccggctcatcttttttttactgatgcatcgttctgctttttctgaccgtaaattctcatgtcgaattgctggtaacagtacgctagtactgttcctttctccccccttaattatttggaggattgtttgcacggaaccaagtcttactagccggagaaagttgcgattcacgctgcggtgattcctgccatcttgaattcggctttccttcaactgttccattaatgctcttgggtgacggatcatatgtagggccgcttgttagtactactctcttcctatctgaaagttactcgccgttggttttggtccagacgaatggacgattgccgaccgacgcctggcaccacgctgagatggacagcgtcgagtacttcaatcttgccgacctctgggaacagtactatgaatggagcgcgtacggcgccggagctacggtgcagctcccaggaggggacagagtagttcagtacta

SEQ ID NO: 4140 - DNA, 388 bp, Zea mays
tactccagccatggcgtgtctctgctccatctccctcgcggcgccctttccagccgtgctctctgctgcatctcgccatcgacgctggtcgagtcctcgtctccaacttcctcacgctcggctcccaggttttccacttcaccggctactgctcttcctggtgcgcgcgctcctccggccaccggtctacccatctggcgcatgctctccacctacaggtcgtttccatgctgcactccttcatcacgtcgctcctcaagctcgtcctggtcactgtctttagctacaccgtcgccttcattcttctcgcaagctcctcccaatctgtcgtccctgtctctgattcctggcgtcattttccaaaccccgctgctccgcttccctctct

SEQ ID NO: 4141 - DNA, 398 bp, Zea mays
gtgcatcaatgtggggcttatgtcacagtcagggcaggttgacttcgaccaggacatgacagagagggagaaaatggattacctccgcaagcaggaacgcgattaccagcagcgtgtaaggggtgccaagccctgcatcttgccagaaaatgtacgtggagaggtgctgggaatgatgaagaagcaggagaaggtgagcgccaggatgctgcagaagatcagggaccatgtccagaaatggtaccacaacgagggtttcgtatgcgcacaggttgttaactttggaaaccttaacaccaatgaggttgtctgtgaggtggttgagggtgacatcaccaaggtggagtaccagttccaggataagcttggaaatattgttgagggaaatacacagcttg

SEQ ID NO: 4142 - DNA, 433 bp, Zea mays
tgagatttgccgattaaaaaacccataacattcagcattttcaggtgagagtgttgattttgcagacaccatcaaacagactaggattgatgtctccgtcaagtactagcacattggccattaacaatttgagttgttgaatgcataccttccagagcaacgcacaccaagcgggtcgtcgttgttgcctgtgatcctccactgtgatcggcaggtccaccgccacacggtcactgccactcaccatctccaggtcagctgccgcggcgctgaccgccttcttcccgtccgcgctccccaaatccatgtagaagactagccccacgaagaaggcatagaagagcacgaacccgacggcctgccagaggaagatctcggcgctgaggtagacgtagaacagcgcggacgcggcgaggaggtagaagaagacgtc

SEQ ID NO: 4143 - DNA, 429 bp, Zea mays
tgattgactgaaggctgtgatgaccaaaaacacctacctattttctgactcctgacgatagaaaccaatggatccttctgagcctttattaagatctcgcttttctgtttgattaatcttcgctttttctctggttcggttgtcatctgatatttttttacccctaaaaatgatgcgcgagggtaggatttgctttgttgatgggatgataagccttgacagaaacttcagtgttgacccaaatatcagactacaattatctgatcgactccaaattcttgcctttttgaacttgttcgtagtatttattttgctcttgaagtcgaacgttgccgtttgttttttgtttcaacctggtatgtgtttgtgtgttgtccgtgcacaataagccgatgctctggatgatgaacacaggaaggaagcatggta

SEQ ID NO: 4144 - DNA, 341 bp, Zea mays
tagtgcatcacagcgagaagattgccatcgcattcagtctcatcactactgaaccaggagagaccattagggtcaccaaaaacctccgagtttgtactgactgccactctgccatcaagctcatatcgagcataacctgtcgtgaaattgttgtacgagataacaatagattccattgctttagagatggtcattgttcttgcaacgactactggtagtagacctacatgttgcagttgcgagcggcatggagagctggaagcatgtccagtccatttttgtttgatgtaaaacttttatcggctagaattttgaccgggcatagaagaggcagagtatta

SEQ ID NO: 4145 - DNA, 474 bp, Zea mays
cgattcctgtggccagcgatccacattccgattacaagcggaacccaacagagccttactttattacagttggcactttggtgttctcttaagtcactccttttcgtcttgcaccacagtttgtgaacaagcgtacacgatggcccagaatctggatcccagcagtgaaggtagaggggttcttcagttcaagacaggtttggcatctgtaattaaggtatgcttactttcactgtaaacatgactgggtacacttgttactttagtttctgctcattcttcttctcagtgattatttctaaatttcccatgttctaatcatggtattccgcagcaaaaacttgctaaaaaggatggggctccgatagaccggcagaatgacgttcaagtcctgtggaacttttatcttgaatacaagagtcgttgtcgggttgatgatatgcaacgtgagcaggagagactgagagagtcagg

SEQ ID NO: 4146 - DNA, 399 bp, Zea mays
  misc_feature (6)..(9): n is a, c, g, or t
gaacannnngctgccttcattgatgctcttggtcggaatcaccagctggaagaagcgactgagttcatcaaagatttgccatccaggattggtcctggtacagctgggtcctggggagctctcctaggtgcatgtcgccttcatggaaatatcgagcttgcagaagaagtggcagagtttctcttcaggttagagcctgggaacagtggtcggtatgtcatgatgtcaaacatctatgcagctgcaggacagtgggatgatgcacgtcgagtcagggggctcatgaaggagaagggccttaagaaggatcaggcttacagttggattgaggtgcggagtgcaaagcatgtattcgttgctgatgacatctctcattgcgaggcagacaagatatatgag

SEQ ID NO: 4147 - DNA, 331 bp, Zea mays
  misc_feature (239)..(239): n is a, c, g, or t
  misc_feature (272)..(274): n is a, c, g, or t
  misc_feature (280)..(281): n is a, c, g, or t
  misc_feature (299)..(307): n is a, c, g, or t
  misc_feature (312)..(312): n is a, c, g, or t
  misc_feature (314)..(318): n is a, c, g, or t
  misc_feature (320)..(324): n is a, c, g, or t
  misc_feature (326)..(328): n is a, c, g, or t
atgtggtggggtgccactagcaattaaagtaattgcaggtgtcctccgtgacaagaaacggatacaagagtggcaggccattagagacagtaatctattcgatgctgagggcaaagagcgtagagtatctgcatgtttgaggttgagctatctgaacttgccctctcatttgaagcagtgcttcacgatttgttcactgtttcctaaaggaccctcctctaggactcgtacagagggtntttggccgacgtgctgttcagcagggagagatnnngagagnncaaaatcgtattcccgannnnnnnnnctaanannnnnannnnntnnncat

SEQ ID NO: 4148 - DNA, 566 bp, Zea mays
tcacctgacagcacatgtcgctaattatacccaggtactacacatttccattgtcaaactagcattcggcatgtctgttatctctctgtaatgacgacttgtagcccataccatatgtctcaggccatgataatgcttggaggaaggagatttatttttgttggactgcccccgatgggttgcttgccgattgcccggactttagtgggcacaggatcggacagatgcgacgagacgttaaatcagcttgccaattcgttcaactcaaagctgattcagctgttgaatttcataaattttcagcaccagatacggacttcatacatagacacatatactaccatacatgatgcaacggtggatcctagtacctttggtatatatgcagcatttctctttcttgtataggcaacagcaagtgcatagttttatgtcctggctaatcgattgcttgtgttttgggaatggtaggcctaactgaagtgtcaagagggtgctgcggatcgggggtgatcgaagttgggcaaacatgccgagggcgaagaacatgtggagaccctagcaag

SEQ ID NO: 4149 - DNA, 387 bp, Zea mays
gttttcctcgcctgatcttgaaaagttagcaagcttttggagagtcctactacttctatgctcatgcatggttggaaactgctcgtccttgaattattgacgcgtctgaaaggtccagcttagactgccgtcctgagctaccaagagtgttggaaacaacgttctggcattgagatattcacccctcaaactatatctcaatcttttttttcattaagttgacgagttgaacgtgtttcttgtttttttttctctttttttaaacagagtagctttccactgtagctgaaaaacacaaatatataagctacagtacactaattcctgcatggtccactctatcacccttgaattcagtagttgattggtgaaagcaaactgaaacgg

SEQ ID NO: 4150 - DNA, 644 bp, Zea mays
  misc_feature (631)..(636): n is a, c, g, or t
atacgcttactgaaactccatctgctgataaggtgataccagcagctccttcaatggacaatgctgggtgggccacatttgatacacctccagaacaaaagcagcctgcactcactgggctttcttatgtttctgctacaagcatcgataaacaagctcttaatcatgatttgttttcatctgaatcaaatgatgagctaacatggttccggagctctaaggatgatgcttcggttaccaatcataatcagtctactgctacatctcttgatacatgcagttctgaggtgaggaacattttcgttttttatgtcaacatgtgtttgcaataaaatgaagtttgctccttgtaaagtatgacacacttttttggaatagttgaaatcattctctcttctgaaaacgttaatggcattataaagttccgaataggcttaggccttgttactgttagggagggcctcataaaactgctctgcctgctagggtatattctgcactatagcaaggagctgcttctctctctttcagaaatgaactagaagccggcaaagccagagccaagagaaaccatgccaaacaaggccttagtcttatgcttcatatcttctgtttgaattctttactttcnnnnnntctccagc

SEQ ID NO: 4151 - DNA, 372 bp, Zea mays
tcaccaccgaagcaatatatatgtgtgctgcgcagtacctgtgtgccggcagcttcctcaagggttggacgagctgcgacagctggagagcctccccaagcacccctatctccagatccttgtcgccgacgagtgcccgtgtccacgtccttggccgccccggccttctccacagcgctgtctgtggtgtccgcggcctcccacgccttgccggccgccgcgtccttgtactccctcgccttcttcgaccgctcgtgtgcctcggcggccttcttcgaccgtcgctgatctccttctcggtggtcttctccgtcgaggccgaagacactcctcaccgctacactctaccacgtctactgttgtaccatctgt

SEQ ID NO: 4152 - DNA, 501 bp, Zea mays
atcgacgcggttatcttcccctccaacaaaaaagcacaacgtgtagagtgcaacctcaaactcaggactgacgccaatcaacgtgctggatactgatttcagcacgccatgccactcaaactgaacagtcagcagctgtatctctgaatcaggctgccaagaccagggtagaacattttagctaacattattcgtatgcacagcagcgttgcatcaattcttagctacatagtaatatactcaccgattcaccacgacgccttggaaatatataaccttggtaatccacatttcccttggcttcttccaggtaaaactgcaaattagtcacggaatacctgttagaaatgtccaaatgaggaaattagatttcattaacaacacgagaacttgcctgaatccagttatggaagcctgatacctcactctccccttgtccccgtcctttgatctcaccaacaaacacatgctcaaaggcagaagagcagctagagttgccac

SEQ ID NO: 4153 - DNA, 346 bp, Zea mays
ccacaacgaactagtcaaaaaactgctaccattactattccagatactatatgcaacaggactggcagcatacatgtgcacgatagcttgtacatcactcggatgccagacccagcaccttctggtgcagtctgggattatcttttttggtgccgagtggagcgttgccctaaaatggattgtgtattcacaagttcgtccatggtaggtgctgagaacagggacgacaggatcttttggagactggcaacgctatgggtgtcccagcttcccaaggcacggttcatatggagctcgaggaaacacgagatcagcggttattcgtttctggacctagacttcgtgc

SEQ ID NO: 4154 - DNA, 374 bp, Zea mays
atgtatcttgttttttgttgaaaagtttagtacttgagtgtcaatcatacgtgttcgcttgctaaaaactattgacaatgtatcttgttctttgttgaaaagtttagtacttgagtgtcaatcatatttcagagtcattgtgatgtactgagcttggaggttttggaccattgatctgcagaagttcaatacaataggaagaataagttaaaaaaaacgtggtccaaagtaatcttcagcagtaatgtttgtgtgctaaatgctcttccggagaattgtggtgatgcaaaccttgtaccaatgaatatacactgtcaatctgctatcttttccgtggcctctaactcttagagtgtgtttggtttgagttgagg

SEQ ID NO: 4155 - DNA, 377 bp, Zea mays
ccctgccctctgacgtgttctaccacatcatcagcacaccagccatctgtaaccccgaaagcttgcaaataactcaagacgccgagggccaccgaatcatcaacctcataatggctgaagactggtgggccccaataacactatacctccagggccattaccatccaaccgatcgcaacgaggccaatcgactgaaacacaggagcagtgatttcgcaatagtcaagggtcagctttacaaaaagggaatcagccagcctatgctgaaatgcataaccgaaaccgaaggcctagagatccttcgcaaagtccacggcggaacctacgagtcacactcagggcccagggtcctcgcagccaaagtgattcatcaagga

SEQ ID NO: 4156 - DNA, 426 bp, Zea mays
cgtatgtgggttgagaaatactgtcctccccccctttcttcggaatgaaattacctgaattcttatgtctagcatactgaccattatctcgagatcttgtactttgcagttgtcttgcaggttagtggttcgtggactgcacctcatagcccatgtacagcgatggagattcagcaaggtgcaatcaaacttattcacccgttgctgaatttgtgaatgccatccgctgattcctgttgatcaaatctgcgttgtcaaacaaacagtctttttctgttattgattctcatcaagagattatctccatttctgtctgttctgccaatttacagggctctggagtcacaaactcactgtcaagaagtgcaggatatctggttagcgttgcttaagcatagcttatgatgtttcactgttcccaagtga

SEQ ID NO: 4157 - DNA, 439 bp, Zea mays
caggaatgtgacaagaagggtgttgaggtccgacgccatgaagctgcgtgctgaggctgaggcaccatgtggagcgggtgtggaggttagcaaaactgatagtttggagaggaaacactgtgacactactgtggaggctgaggcttgcaaaagtagtgtgctgatggaagttgcctgcaatggtggggaagccaacggattagttaacttggatgcgagcgatgtttcggaagaatcaactaggtgttctgataataatatgggaatgcctggtgttcctgcaacagatttttctcaagatggtggcttagctcaaggtagcattgcagaatcagatgataagacagtcaagtcagatgaggtgtccgctgtaactcattcagagcagaatgactcccaagctggaataaacagttataatgctgatgaggcccaagat

SEQ ID NO: 4158 - DNA, 591 bp, Zea mays
gagtggtgtacgtgcgctagactgccagtggcagctgctctgcaagctagctaaggtgaaggatggatatcgagtcgaggcaagtttccaaaggggacgccatagctgctgctgtctctgttgactggaagggaaggccctgcgaccccctcaagcacggcggcatgaaagccgcggtcttcgtcctaggttcgtgccagagctttttctcctctctctcggttccaaagttttatttggctgaacaagtgttggttttccacccttcgttcttgcagctctcgctgtgttaatttgtgttccttgtgctctatatgattttgctcttcataatttggtcgatgaacctgcatgcgtcgtcgtgcacatgttgccagggatccaggcgttcgaaatgatggcggttgcggcggtggggaacaacctgatcacgtacgtgttcggggagatgcatttcccgctgtcgcaggcggcgaacatcgtgaccaacttcatcggcaccgtcttcctcatctccctccttggtggcttcctctccgactcctacctgggcagcttctggaccatgctcatctttggattcgtcgagct

SEQ ID NO: 4159 - DNA, 226 bp, Zea mays
  misc_feature (178)..(178): n is a, c, g, or t
  misc_feature (180)..(180): n is a, c, g, or t
  misc_feature (195)..(195): n is a, c, g, or t
ctcgagccgagagcgacgaccttcgcacccgacgaaggcttgctggggccagggacgacaggcttcacagctggcggtggtttgctactgccgatggcggtagacctcgagatcccccacgccttcttgacctcgcgactagggtcctcgaccctagtgaacgcccggcgcttccacntngcatcttggcgatcnttatccatcactgccgatacaacagcagcaa

SEQ ID NO: 4160 - DNA, 358 bp, Zea mays
atatgtatcttaattttaaagaaaaaactactaattttatgtacatgcttttttgttgaagaaaaaaaatgaatacaacacgcgtccagacggagtgaaggaggagcgcgaccaagcacgttctctcctaaaattaactgccaacaaaaaatttcctagcagccacagttgaccgcgacaaggagactcagtcaaacacgctgtccaggcgcgcacgcctggtcgtcatgttcaggttcagcagacttggcgcctgcgccggcgtcgccaactgtcctaccgcccttgctcgacccgtcagtctggacgctcctccgcgtcgaccgcgatccccaggcgggaagcctcgtggataacg

SEQ ID NO: 4161 - DNA, 405 bp, Zea mays
  misc_feature (4)..(9): n is a, c, g, or t
atcnnnnnngattgttgaccatgagatcattgtacgagattccagtcgcttccatcatttcaagaatggctcttgttcctgtggtggctattggtgataccttgttctgtgaaagcagcaggtgcagaagcaacactaatgttttccaagtgaaagaaatactaatgtgatcatgacttttctcaggactaatgtgttcatgacttcattataatgattcacgcagaattctgtttaccattatttctctctttgtttttagttcttctgtgacatacacctgcactggtgtttatgttgtttgcctctctttgttcatgtctaatgctgatatatttgaaggcataattcttatagatgatctgcacagtccactgttgttcattctcctgaataagccttgct

SEQ ID NO: 4162 - DNA, 498 bp, Zea mays
caggttctgtccaacaagttcggccacttcgagaaggccggcttcgggcagctgacgcggctgctgcactatggcgtgagcacccacgagggcagcaagtgggccaagcaccgcaggatcatcaaccccgctttccatttcgagaagctcaaggtctcgtctcatgcgtgaatcacctcatcagtgtagcttgctatttgatggatccgatacgagcttcccgatcaatcgattctcctgcagcgcatgctgccggcctttgcgtcgtgctgcgccgacctggtgagcacatgggagcgtctggtggtcgcggccgacggcgaaccatgcgaggtggacatctggccggacatgcagaggctgacgggggacgtcatctcccgcgtcgccttcggcagcagctacctggaaggcaggaggatcttcgagctccaggaggagcaggtgcacctcgccatgctcgtcgccggcaagatacacatccctggatacatgatg

SEQ ID NO: 4163 - DNA, 436 bp, Zea mays
gatctgcacagttacaagaagcaatttgctgctagtatataagtatatatatatatactttcctgctccactgaacaaagcggcttgacgacaccgtgcaaaagtgccagtagaaaacatccatgcgacgccaagtggacagacgggcccaccgacaaccgagcgttgccgccgttcccggcggccggcctctcaactcgcagtcgccgggtttccggatcgggaagcagcagcgagccgcggatttccgtcggccattgcccagaacgagcaaccacagggaagagaaagaacatgcctagactagagggcagaggctaaagcaaaccaacggttcctgtaacgcgaagtgtataagcttcagcttcacttgtagtctagtactgctgccccgggtggccgctcaagcacatgccgtgagaaagagcgtggactt

SEQ ID NO: 4164 - DNA, 461 bp, Zea mays
gcataccgcccatgccatagcagttagaacggcaacaaacatatgtccactgtacataagatcattacagccaccgcttgatttcctcagcagatgataccatgagggcccctctccggtgcttggcctcaaaatgtctactaagaaactcatcagtccccagtcaggtctgtactcgtcggggtaatcttgaagagtagctattatgatcaggaaggatgaaaaagcaaaatgagctcacagtggtctatcaaagcagcagctctattattgcacaacagcagttcacagtctgaatgtactgaccgtatggcatatcctcctccatgaccctcgagatcatgtctggatctgaagcataaggagcgtaatatttctgtgcccacggatgtggatggtcaggtatctgataccgagcttcggcgcaccaaggtcgagcagacggaaggatcgtggcaaga

SEQ ID NO: 4165 - DNA, 409 bp, Zea mays
aggtgttcgatatgatgccagataaagataggattgcatggacagcgctgatatctgggcatgagcagaatggagaggaggacaccgctcttgagcttttcgaacagatgctggccaagggagtatcaccaacgccttttgtcttggtgtcagctttgggtgcatgtgccaaacttggacttgtcacacgtgggaaggaattgcactgcttcatcttacgccggaacattggctctgtccctttcaacattttcatccacaatgcactcgttgacatgtactctaagtgtggagacatgatggctgcgatggcagtatttgactggatgcctgagagggactttatctcttggaactcaatggtcacggggttctcacataatggcctcggaaagcagtcacttgctat

SEQ ID NO: 4166 - DNA, 427 bp, Zea mays
atgccagatacaaaattggaggatatcaaaacatctttttagttccaaatctatcaatggtagattaggattctttcattctacggaaattactttgatggatgttgttataaaacaaaaacaatgtggttgtctgcccctgctcgtccagttcaggtcggtcggcagtcatctacgcccacgccagctgcggcgcagccgaccccctgcccggccagttcaggctgactgacagtcggccacggccacacccacacagccccgcttgaatctttattcttcacaatttgttagagagaaggctagttctggatggcttccatgtaacttgatgggtgacctttgttgtgttgtgcgagttgtgacaaaatcatctctatctactatgcttgcagatggtgggagtgtgttgctttgcctgaatatg

SEQ ID NO: 4167 - DNA, 322 bp, Zea mays
agctgacgagagacgaactctgtcctctgtgggttgcagggaaagatgtgaaggaagtctatgcggcggaggcgcctgtgatccatggggaggagatcggcggcccgaagctgaacaccaataccatgtgagctgctcatggagagcgcgggtgatctctgagtattgtgtcaggtctgtgggtttgtgtacacagtacacgtgaatggtgtggtttgcgctgtggagtagagtaggagctggaataataagcgtgctggttgcgttcgccgtggtgcgctttgctttttacgtgtgcgtgtgattgtggatctacgagtaa

SEQ ID NO: 4168 - DNA, 509 bp, Zea mays
cgttctggattttcttcacttcagcaattactgaatcaagtctaacaaaagtatcatcatcacacttcattatgtatctagcatatacaacatggacctgagaggacaagttcattataatagtgacaaagtgttttacagggacttcatagtagcaagaaagaaagcacttagacataccccatactcgcatatggcaattgtcttgagaacaaccaaatcatagctatccatgaatggcacaataacaatgtccccgaaaaactcagcctcctttttcagctctgcattaatctcgttcctgccatgctgcagaaaagaaaaaaaatgaccaactcaagtccaacaaaaaaaagtactcgagtttggtcttcaagatttaccagggcaacaaaaaaccgggccacaacattcggcaacttctgagcagcagacatccatgtctttctcacagccattcgctcagcaaaatggttgcctgctgataggataccgatgaaaatctcaac

SEQ ID NO: 4169 - DNA, 408 bp, Zea mays
acaaacaagatccgtgcctacgcacactgcgcgaaaaactcggtaaggaggagtggcacatgcgatggaaagctcctgttgactgtccgatgtctgaaccatgcacgcgttaacatgttttcaggaagagatcgctctgctcctgatcaacctggacggcatcagcacgaaccgcatctacgtgacgagccaaggcgcgcacgcccggagcggaaggaagaaggggagcgggacgtccgacgtccacatcatccctgcagggctcggcgaagcagcagccgcgctcacgagacaggagtaccatctaactcccaaggacgggaacctgcagagccagcagctgctgctgaacggcaacgtcctggcaaccgacgccgacggggagatcccggagctggagcccgtgca

SEQ ID NO: 4170 - DNA, 762 bp, Zea mays
gaaaagaaaaggcaatcatgccatgcatgcctatgcacaaactgcagctaagtccaacctgaacaaaagaactacttactgaaattaaatccaaactgaagaaacgaactatcaactgaaattgatcgtgcaaactaacttataccaaataacaagaagtccatacaacatcctgtgtatttgacaagtaacacttttgcatcactcatttatacctataagcaattaaagcacaaaatcccaaccatagttgcagcgggaaataagcaccacaggtaattcaattcaactaagcgcatagataagaatagaccgaaaaatgggtagataaattgcaagaccacaagtaagctatgcgtgagacattccatgtcacatacaagttaagttaacaaaccacgcgtaccttgcagcgcttgtagcagaattctaggagtcattgattcagcagaaccacccctcaatctttcaactagctcagcacattttctgaacaatttcctcccctttgagtcctcacttagacggaatatcttgcaaacatagtcaagctcacgcagcaaggcatccctgtcccaattgggtgcacattgctgaaagacatccctaacccatccaaacagttcagatgtcctctggcaggcctggcaccggaaaagcatctctgcatggccaacgccgttcttaatcgtctgcccagtcccaatctttccatcacgaattgcacagtctgtgtgagtccagtgcgagcagatatcacac

SEQ ID NO: 4171 - DNA, 400 bp, Zea mays
cacaatcacaccactagttttccgaagtgccttccatcccgcacaatacggtgggggaggaggcgacgttcctggatcggagaccgccaaggacttacttcaaccagatcaaggggtacccgcgcagaagcactggatctgcctcaagaactacttcaaccagaagcgcggcccggtaatgtcgcttgcgcgccgacccctctcctcttgtgatcttatcgatatcccgttcgttctatgatgtgctcgcatgatttctcttgcttggcgatttcttctggtccatagttgtagtaacttgtacccggtaggccggtaggatcagggtttttcgtcgtggtgatgccatgctactatgctagtctttgttttggggaatggagttattcgttggattgga

SEQ ID NO: 4172 - DNA, 490 bp, Zea mays
tctttacaggtaccagaaaccgggagggagcgcactcaccagggtttgccaggttgtggttgccgccgtccggaaggcccatgtggatgtgccgagcgacagctctctcctgtatgaagtgccaggcaaggaggcagcggcggtcgtagggagcaggaagctggtgcacactcaagggctaaggtatggtacttgtagtggttttgagagcttcctaatttttattttgtctactgaatgggaaaacaaaacaaaatgaccgcatttagtaggttctttgatcgggctgccaccttttcctccgtcgacgaagcatcgtctgctgctgctgctgtgcctagtccatggaagctgtgcacggtgacgcaggtggaggagctgaaggtcctggcgagaatgttgcctgtgctgctagctggcgtagtcttcaacatggctgaagccttcttcccgcttttcgtcgaacaaggagaagtcatggacaagaaca

SEQ ID NO: 4173 - DNA, 694 bp, Zea mays
cagcagcaattgccatctttgcaggcacaggtaagatgtaacttttttctgtagctgtagttattatttctgaattctgtctctgaccttccagaacatggttcatcatcctacacctaactttgaagcagttcggctgttggcctgctgtccagtgtacatcccatgtgcatgcatagcaggccaacatccgacacctgactaccgtgcttcgaagctacacaaggcttttgatagtagtgcttttcttattcctacaagtcacttgaaagttctgttttggattaaaaatgaacttcagctttccttctggttctttggcaactcgcatccctagttgcaatggaaacttgttgagctttagatcagcattaattttctgcattcacgtatgttattgtaacatttatatgccgatccagggatcggagcagcagatgcaggaagggctcagcccagccttcacgatagaccaagattgcctcaactagacagcctggagtcgcgtatgctaggattccagcaacgagctgaggtctgtacaagcacaagagtttagagtagccgatattgtcaggcgttagctgccaaaggctaatatcacgatcgaggtgtaccgtgtacgagaccattcctgagttgcgcagctggcagctaaactgcggtcgcgccttctccgagggaatcgagaaaa

SEQ ID NO: 4174 - DNA, 851 bp, Zea mays
  misc_feature (844)..(845): n is a, c, g, or t
gatgaatgcccccgtgctgtgcctccctctgtctcgggtgtctcggtccggctgtaacggttcatcctgtgtgttaacctgtgtggtaacctgactgatcacctgaccaaatccatttactgatcttcctattcagtgtacgtctatggctgcagcctctttgacgctactggagttggtatctggatgatatcatagattcatagtagattatatagctttcttccctgtgcatgcatactggttactagatgaaagagctcgtgttacgttatgccacactcctctcttccgagtaggacatgccttcacacccaaattctgcatatccttctagagaccagctgtgagttgggctctgaacgtttcttccatgttcaattcgattgaacatgactgttttgattagctgttctgttctgtttattttttatttctcacaatttactggctgcagcgtgagttcgtctagtattggtaaaaccttctgctgttggcagaaacagagtctcactctacaaatactgcaccaaaccctgatctgttctattcccttttcctgcaaatgaactggggaaacaatgtccagtaactcacacttgtgtgctcaaacctgctcatcgttctgtggatcaccaggcaatggtaccgcgactccgcggagctgagagaggactggaggatggagtacctggacgcttggaaccagttcgggttgtcggtgacgcgcgagccgcagccgctgtgcgctacttgcgcgatcagaagcctgcgtagcctgtgcccttgaccttggcttggcaccttgctgctctctgcatccatgcgcctgtaattttgatcnngagggg

SEQ ID NO: 4175 - DNA, 686 bp, Zea mays
cctcttgacatgatgtacacatgcggtttcctgtaacaataaaagatcatttgtcaagaaggggaaggattagtatatatatgactggaggtagcttgatagtgtcacatccatgtagtgcacgaagcatagcagaaatatccaactaataataagtgatgctagaaggaagagcagttgcagagagagagagagagagagagagagaagattacgataattattagtattaatacgctaagtattaaagaatggtcaaattttgcttcattgaaagactagacttgttttaactacatgaaaggtttcaaaagggtgcctagttaataaaaaggacaaaaaaaagcttacctctttgtcttctgtactacagggttttgacagagaacggcaatcttcttccaacacactgacatgatcagccaatgatgctacgagagctagatgtgtgttcaactcagcttttagttctgcatgttcgtcctgaatgccagccaactttttctgcaactcctcaatgtgagcatctcgggaagagacctccttcattagcaactcctttagggatattgctctattctctgtagctttaccattcatcataagcttgaatgctgtttcttcatacaccgcagaattcactgaagaggtaattgcatcatccatcagaacaacaaattccctct

SEQ ID NO: 4176 - DNA, 433 bp, Zea mays
tgctccacgatctttctctcgctagcaatttgatcggtggaagcatcccagatgggattggcaacgccacaaagctcagaaaccttgatctctcggacaaccttttaggtggtagcctccctgagtcactctgcaacctcactttgttagtggagctcgatctcgacgggaacgacattggtggacacattccggcatgctttgacgggctcaggaatctgaccaagctgtccatgaggaggaatgtcctcgacggcgaaatcccggcgactgtcgggaacctctcggcactgtcactgttcgacgtgtctgagaacaacctcaccggagaaattccgacctccttgagtggccttgtcaatctcggttctttcaatgtgtcctacaacaatctctcgggacctgtgcctgcagctctctccaacaagttcaa

SEQ ID NO: 4177 - DNA, 554 bp, Zea mays
ttttttcgtagccctggcagagattgcttcagcttcgatagcaacatcttttgcttcgactttagtatgttgtacttcacttattaccaatgaagtggaaactttttagcaaaggttagtaaagcaatcactagaatgagtacactaaaatttaacaaaagcgaaaagtcacataccttcgaatttcctgctttgaagcttattcctaatgtccacatgcttttcagatgcttatcgtgcttataagaattttttgaaagttagtatgagcataccccgcgaaggaaaatacgaaggtgacagagtacataccttctccctattctttatagattcttcaatacttaattctttcccacccctcttccaaatttcagataagaattttttggaccactccgaagcttcgacagttgaccttcggacatggtcagcagaaactcagaaatcgggttctatgcaagctctcacgtggttgcacctgactttcaatagaaccgaagcagtgcttcgggcacgtttccaagcacagtagtcctctcgtgctgagagaa

SEQ ID NO: 4178 - DNA, 707 bp, Zea mays
  misc_feature (697)..(697): n is a, c, g, or t
gagttgaaatcgaatatgggggtattgggcaaagaagctgttgcagcaatgactgccgttgaggcccaacagcaaagattgaccttgcagcgtcttattgcattggtacattatttgtctagttgggtgatttgggccacttgactttttgtttgtttgtcttgaagttgtctattgtgtctcataacatttgtggacttaattgaaggttgaatcagagagaaactaccaccaaaaggtcctacaaattcttgatcaacttgagagagaggtctgatggtttcacatccacatcctttccatccttgcccattgtgctaaagaaagtttacaacttcaagaaaaatctggtcggttatgttatcttgattgagctttcttattttttttctagatggtatctgagcgccaaagaatcgaaggagcacctccggtggttgagagttccatgcctccaccgcctgcatatgaagaagtcaatggtatattcatgagaaatacagttgcagaattggtcgagactgtggagtatttcttggctgaggtaacttgtttcgtcacattgcacaagttcgtagctgccaggcgctagctcttgatttttacccatataataatctacatatttgttgtcatttttcttcggtaggcaatccagtcataccaagccgaaagcgataccgagctcaacctttcnactggtgact

SEQ ID NO: 4179 - DNA, 409 bp, Zea mays
tctctccaagtagacgcttcaatcaatgcagtatatgataattgtacatcctctacctctaccaataatccccacatgagcaaactccttgtactatatgatggatcctattggtgtctttgaggacaatctctctacaggtgattattgaaatcagctttgcagcaagatgacagtcgctacaggttctgagattcatagtcaccctgataattgtccctggactagtgttcaaaaggagaaatgcaatagctaatttctcactgtgaacagaaagatggtcttccttgtcttcttcttcgacatcatgaagtgtagcctctacctctgggttataacccatcccccttatttttcccaatagctcatccagtttatggtagatcatttcagattgtgggtgacatct

SEQ ID NO: 4180 - DNA, 515 bp, Zea mays
  misc_feature (272)..(280): n is a, c, g, or t
  misc_feature (285)..(289): n is a, c, g, or t
  misc_feature (291)..(292): n is a, c, g, or t
  misc_feature (294)..(304): n is a, c, g, or t
  misc_feature (310)..(313): n is a, c, g, or t
  misc_feature (316)..(321): n is a, c, g, or t
  misc_feature (333)..(333): n is a, c, g, or t
  misc_feature (335)..(335): n is a, c, g, or t
  misc_feature (344)..(347): n is a, c, g, or t
  misc_feature (349)..(349): n is a, c, g, or t
  misc_feature (351)..(351): n is a, c, g, or t
  misc_feature (353)..(354): n is a, c, g, or t
  misc_feature (359)..(359): n is a, c, g, or t
  misc_feature (361)..(362): n is a, c, g, or t
  misc_feature (364)..(369): n is a, c, g, or t
  misc_feature (372)..(376): n is a, c, g, or t
  misc_feature (379)..(381): n is a, c, g, or t
  misc_feature (392)..(398): n is a, c, g, or t
  misc_feature (400)..(410): n is a, c, g, or t
  misc_feature (424)..(427): n is a, c, g, or t
  misc_feature (440)..(446): n is a, c, g, or t
  misc_feature (450)..(463): n is a, c, g, or t
  misc_feature (465)..(469): n is a, c, g, or t
  misc_feature (472)..(477): n is a, c, g, or t
  misc_feature (479)..(480): n is a, c, g, or t
  misc_feature (483)..(483): n is a, c, g, or t
  misc_feature (492)..(500): n is a, c, g, or t
  misc_feature (503)..(503): n is a, c, g, or t
gacgcgtcggatgcgccatggtcgcgtgctacggcggcaggggcaccttcatcacctgcaactacgacccgccgggcaactacgtcggcctgcgcccgtactgacaccgttcctttcgtcgtcgtctggccgccgccgccgccggcggcctgtgtctcttgctgtcccatggacatcgttgctgctacggtgctaccaccactataatatcgagatgacatgacaatgtgtacaaaagttgcctggctaccgttattatacttgctaaaaannnnnnnnnggacnnnnngnnannnnnnnnnnntgatcnnnncannnnnngaccaggggacntngagttctannnnangncnntatgngnntnnnnnntgnnnnnctnnntctatgtgtgnnnnnnncnnnnnnnnnnnagtgattctgccannnntcggatatcatgnnnnnnnagtnnnnnnnnnnnnnngnnnnnacnnnnnnanntanccttctgtnnnnnnnnnttntcgtttttttac

SEQ ID NO: 4181 - DNA, 408 bp, Zea mays
taagcacactatcccaaactacagataaaaagacgggcaaaaagaaccatccaccgtccaggcaaaggcctgctggaactgcattacagctggagaagacatgcttcacctatagcctttgggaacaaacaaaatctgcaacaggccatagaagcacacagtctagaaagtgaaactttaaacccagtgcataaaataggaggagagacagtagaaataaccccattattaagcaaacatcagtcacgaactgagtcttttggagcaaagcgaatgagatgggaggagagccggctcttcctaaaagagtaaaaacaccaaagctaattgggaacaggaaaagccaaccatttcttcaagaatcaggcaagggtcatgtttcaccagatgaagaacacgcaaacaggt

SEQ ID NO: 4182 - DNA, 440 bp, Zea mays
aaatctcactgtccaagaaagctgggaacgggcatctgatataactgatagagttcgcaagatgattaactatgtcaagtttgaaaggttccaaaagtttcaggatattgcaaaggtattgcgtatggatcaaaagctgctagttattgattctcctgataactggccgtctacgtacttaatgtttgactctgcatgctactatcaagatgtgtttgtgcgcctgacagaacaggaaggtcattatgatgtttttctgtctgctaatgactgggctgatgtgaaagccctcactgaaatactggacgtagtctatcatgctatggagaagtttcctgtagaaaacccaactgcaaacctctatttcaatgagatgtgtgagatccacgtgcttttgaaaacctggtgcaagagtccatctactgttgttgccaaagttg

SEQ ID NO: 4183 - DNA, 381 bp, Zea mays
tccattctgcaacggccagagagtgttatccaccacgagtccttgtctggaacgacggcgtgactctttgcgctggagttattcagcggcttgactacggatctgcacagtgccaagctctctgatcgtcgtgactgccgacgcgagacctgatgatgtacgagaccgagagagcgatcgaagcactcggccagttcctcggtgtcagggcttacacctgcagtcctgcacctaccggaggcacgagtgcacgagtgtccgcgtggaccaggaaactgtgtgtcgagcagatcagctcaggttgccattggaactcccggacgcgttcttgacctgctgggaagccggaagggatgcgttgcgtagagaccacatcagaat

SEQ ID NO: 4184 - DNA, 483 bp, Zea mays
aattcgtcgcaggaggctaggctaagagaatttatcctgtccagaaggaggctaggccggacctatataaacagcgcacacgacgagtcggcctcggcctccacggccactagccgcctcagatcagagtactccggtacggaccagagcgcgcagaaggcggccgacaagatcacagcgctgcccgggcagccgggcggcgtcggcttcgaccagtacagcgggtacgtgaccgtcgacgaggagagcggccgtgcgctcttctactacttcgtggaagcggcgcgcgacgcctcggcaaagccgttgctcctgtggcttaacggaggttagggcgataacacgtctgacgtctcttctgaaacatgcatgcagtagagtagacaagaacagcgtaaacacactagctagctcacgttgatgccctctttatgtgtgctgccacaggccctggttgctcgtcggtaggctatagagcaatga

SEQ ID NO: 4185 - DNA, 497 bp, Zea mays
agcgtcagatttgatttggtctctggagtttgtattggtttgttacatcattgatgatggatttggattgttgggttttttgggtgtaatcaggcggtgggcgacaagggcgcggggaaagtaggcgtggctttcccggtggtggtgagcacctggccgttccgtgaggcggtcagagcggcgtggaaggtggtttcgaccggtgaaggatggggttcggccgtcgatgctgtcgtcgctggctgctccgcctgcgaggacctccgctgcgatggtacaggtcagtacctgctggcctgttcccttgcacgtgtcgtccttcatatgtcaaagagcaaggccgaacttgggtggcaatggccatgctgccctctgaagcacattgttgatgcagcagcattatcacattggttggaaacatgatgcaacatcagggactacaatagaaatgggttgttaagttttatggtttggatctggattacctgttgactgct

SEQ ID NO: 4186 - DNA, 516 bp, Zea mays
ttgcctgcctttcaccaggtagcctcgattcttccttgtccaattgatggttccatacttcaattgtccaaagttgagacatggattcagaagtacgtttgcccttctattgagtattgagaattgttggtcatggccaggtactcatatttatgtgcatcaagaacgtgccgataccacatgtccggcctgaagagcggttcctcgtcggaaggatcggccccaagcagtacagaatctaccggtgcatcgtcaggtacggctaccaagacttccacaaggacgacgtggagttcgagaaggagctggtgtgcagcgtggccgagttcatccggtcagggtcgtccaagctgaacggcacggccgaggccgaggaggtcgacgaggaggaggagcagcgcatggcggtcgtccgctccaacagcgtccgcatgctggaggaagaggccacggtgcagaacaccgtcggggtcggcccgtcgtcgcgggccagcagggagatacagtcgccgtcat

SEQ ID NO: 4187 - DNA, 351 bp, Zea mays
agctgaatggctcacgcgtgtagggttttggagcagcgtaaccggccagggtagagattggtagctcacgcaggggccggcagaccgagtacccagccacctcaggcctagtttggatactcgtattgaggtgggttagatgtaacttaaactaatttataacacaatccacctcaacacatatggattaaagtcaatactagagtatccacacagccttatacggtggtctgggctgtctcgccggttctaatagatatatagaagcaagtatgatacgtagaagtaaacaatcagcgtagcatgtatagagcgaatacatagacatggaggatcgtaatgtaatcttgg

SEQ ID NO: 4188 - DNA, 438 bp, Zea mays
gcagctcgatcaacctgagcgagtggttcactgacgcagacttcgacagcgacttgggatgcctgttcgacgggcgctctgcagttgatggaggaagcaagggtggcgtaggtgtggcggatttcagtttgtttgaagcaggtgatggtcagctgaaggatgttctttcggatatggaagaggggatacaacctccaacgataatcagtgtgtgcaattgattctgagacctatgcgtggcgtgcgacaagtgtcctgtctttgggtatacttggtttgtccaatgccacggtgccactgctgcgagtcagctgaacttcttgtagaaagcacatggcagcttggcattagacaagtgtgttggtgttccttaattctttggatatgctttaggcattgactaaccttaagggttcgtcactgtctcgcttagcttag

SEQ ID NO: 4189 - DNA, 265 bp, Zea mays
cttgatgtaacgccccattttttcgagccaatacatgcatgttaacattatgtaaattcatgtaaataggaacccgcctgacttagttcaataagatagttctgttcgtttcaaatatatttatgttttatcttgaggtaaggccccattttctggaggtcgtctttggacatgtacaaacaatctcaacctatgttgaaaaagtttttattcaattagtgctatccctatcctataacatatgtcatcattctggactcgatcc

SEQ ID NO: 4190 - DNA, 503 bp, Zea mays
cgtcctggtcatccgtttccacgcgcagggcggtcacgtcttcgtcgcctccatctgcatcgtcttggccggaatgtaattaagcgattccttaatccttatgcatgcgttgcggtgcggctagcctgcctgatacgtacctggcactgctctgctctgaggtttccaggtccatcatggtggctctgccaaacctgcgttacttcgtcgacgcggcgacggcggcggcacggatgcgcgaaatgatcgacaagctgcagcctctcgagacggagggcaagaagggcaccgccatggagaacatcaggggccagatcacgttcaaggacgtgcatttctcgtacccgtcaaggcctgacacgcgggtgctccacgccgtgaatctcaccatctccgagggcgccaccgtcggcctcgtcggcggcagcgggtccgggaagtccaccatcctctcgttgctgcagaggttctacagccaggactcgggggagatactactggac

SEQ ID NO: 4191 - DNA, 379 bp, Zea mays
ggaggcttcttgcttgttcaaccctgtacaagttccatttttggattttaagcgtttatttatgcttttcccagttaggcatgacgagctggagagtccatctcctgctgagagatgtttgttttacccttctttgcttcctccaccttacacccaaataagcaactgcagtgacgttggtttcggctgcacccaaactacatgactgaagaaacttgtggcctgtgtaacgcgaatccatcagaacgccaaagttatggcttctggttgtggcaaattatggttcctccctgttcggttgagtggttgcattctggaggtatcttgttctggactcaggctaatgattgtgcgtgcgactgtttcagagtcatttcaa

SEQ ID NO: 4192 - DNA, 586 bp, Zea mays
cggtctctttggattgagcgcatcaatgctggtacacgcctccatggggtatgtatcgtttacaattgaggctcattttctatccttggcccaaagtctcttttcatggtcacgctaaaacaaacaattctcagaagacaccagctttgttcatctcatgcaagtagaataggttgccagagctttggaatctttcgaaacttaagcagtgcagtgcccatgcttattatagtaccttggttgtttgtccaggtgaactacggcaatttcatgcatgggttaatgaaggagaacatccaactcaacaggaaggtgctctcggagctgtcaatgcacgagccatacagcttcaaggctcttgtcgatgtgtctcggaatgcatttcctggcaacaggcctgttcctgccaaggaggggctagcgagcattctgtaaacgttttcttcccaataattaaacttgatggtttacatctacatctgaaagtgacctgtctgcttgtaacgtgacgaggaggtccgaaattgtcacgggcattgcacgtgttattcctctatttttttcccacctatctaattgcatgcta

SEQ ID NO: 4193 - DNA, 456 bp, Zea mays
catggatgcaatgcaactgggtacccagagtctctcttcagcatcatcagaacgtgtcggcctgacctctacttcctttcccctgtgttctacatgttcttcagatatgcattgtcattggggtgctgctgatggtgctgtcaccgattggcggacttcggcagatgattctgaaaatcaagacatacaaattctaccaagactactctggtctaagccataattaacacacgcccatcatcggctgaaactggtttctgaatctcatcgatgccatggaattccaaaaaaaataaaacattctcagagaaagatacatacatgtacagtctcatgactaatgatgatcagtggtcctgttaatttgtcttgaaccatgaattggttatggattaccatatgcatatatgtatcagtattgtaggggaaatgtttgtgtgtgttcactttggactt

SEQ ID NO: 4194 - DNA, 456 bp, Zea mays
  misc_feature (20)..(20): n is a, c, g, or t
  misc_feature (33)..(33): n is a, c, g, or t
  misc_feature (140)..(140): n is a, c, g, or t
  misc_feature (212)..(212): n is a, c, g, or t
  misc_feature (231)..(231): n is a, c, g, or t
  misc_feature (260)..(260): n is a, c, g, or t
  misc_feature (357)..(357): n is a, c, g, or t
  misc_feature (367)..(367): n is a, c, g, or t
catggatgcaatgcaactgngtacccagagtcnctcttcagcatcatcagaacgtgtcggcctgacctctacttcctttcccctgtgttctacatgttcttcagatatgcattgtcattggggtgctgctgatggtgctntcaccgattggcggacttcggcagatgattctgaaaatcaagacatacaaattctaccaagactactctggnctaagccataattaacacncgcccatcatcggctgaaactggtttctnaatctcatcgatgccatggaattccaaaaaaaataaaacattctcagagaaagatacatacatgtacagtctcatgactaatgatgatcagtggtcntgttaatttntcttgaaccatgaattggttatggattaccatatgcatatatgtatcagtattgtaggggaaatgtttgtgtgtgttcactttggactt

SEQ ID NO: 4195 - DNA, 393 bp, Zea mays
tgctgagttaagatgctctgtgggatatttgaagtccattattgcagtgacagagggtttggtgttcagtgaagacagtaaagttgctggaaattgcagtgcctgtctctctgtgattttgggatgggagaaatttggaagccaagaaaaggtggcagtcagagaatctaaatggtttaggctaataatggaggaatttgttgtggccttgactgctcctggtttgacgtcgaaatctttctccagtcagcagaagtttgctgcgaatatagctgtttcgttgctcaggctgagccaagtgccagattggctgacatcgttgtttgatgggcatctgatatctggcatcgtggctaatctttctgctaggatcccacagagcatcttaactca

SEQ ID NO: 4196 - DNA, 661 bp, Zea mays
tctgtgttctgtatgtgtgccatgccaaagaataaaagaaccaagatagagacactgccacataacatcctgtaggcgtgctgtgggcatactgttttcttaatcagatcacaacaattcagtgaggttcgacatgttcatcacagaatgccagactggtaaattcagtggataaggttaacaccatcctggtcattgataaggaatattctcaattaacacaaacacggtatcattcaaaaaagttcaaattgtattagtaaactgctatgtttgcagcaggccaaaggaatatgaataccaaaatcttacatccataatagaaaacttctccttcattttgaggcaaggttgcacccactcagaagtatgcaaaggaagcacctcactttccagcacagagggaacttctgcttctactgtaaaattaaattaataagattatagagaccaaggaaagtaaactacaaataatttacgatagatccatcaacctataccttgaaggtttatcctgtgtgtgacaaaagactgcaaaaacacaatttcagagaaattttagcctgcgcggtcatgattattccaacacattaaagaagagggagattgacattgtatacatgagtactcatcaataaagattgaacctcagtgtcaattt

SEQ ID NO: 4197 - DNA, 345 bp, Zea mays
ttcagatgaatgaaaaccatacttgtttattccatttccttctaactcggaacagagattacaagctaaacagacatggtgaaagaatgacaagtgtacataaagaataaagaattacaactactaacaattgaatcttttatcctatcacctataaaaacaaagctacaaacaaatctttcttactcctttgcttctttttttttgttcttctgattgtataaaagaattgtcagactgtataatgaactaagttttcagtaacagcaaaagaaccactgaaaaaccatgttcttttcttcttcacttcaccttgtgtcttccccccattcagctatgctgaga

SEQ ID NO: 4198 - DNA, 422 bp, Zea mays
ggtacaataaccagcagttcgttcgcgctcgctacctcgtgtcatcccgcggggaactgctgatggtcgtcaggctcgctgcccaccatcgcgcgctgacgtcgtcgttcaaggtattccggatgaccgtaatcactagggctaggacctggatcgaggaggttgcattgtgtggccgaatgctgttcgtggggcgaggatgctccaggtcctacgaggtgagtcagtacccagggttcaaggacggcatcttcttcttggatgatcggagcttctacgacgtcgagatgatgttcggcagaatcaatgagaggctgtacccctgcagcgacaacggcaggtggtcgccggcggaagggctgtctcgccatgtcgacctcttcttcccggagcgagttccttctttgaactctcctccggct

SEQ ID NO: 4199 - DNA, 482 bp, Zea mays
agctcggggaactgaccaggggcatccggccccttttcactacagtatggagaaacatagattgtggacccttcgcccaacaaaattgggagaggatcgaggaaagaaccaaccaaccaatcaaaccaaagacaatacatctaacaagccctgaccagagagcaaaaggcacgagcgtatgtacatgagttatgcacaggttgagcggagaaaaagaatgtgcaaaaagggacatgcagctggaaggaccaccctgttagtcctttctttggtgtaggaaggtgaagccagaattctcccggatcagaggtggcatgtcgacatctgttacctcgatttctgtcatcgacttcgagatgtcgtccaccgaaaacggaatgctgtgattaggagcacactgtgtgtcaagcaacggccttcaagtcaacaatacgtatatctgagtaggaataagcaaaaacaataacctggaatcatcatcc

SEQ ID NO: 4200 - DNA, 307 bp, Zea mays
  misc_feature (28)..(28): n is a, c, g, or t
  misc_feature (84)..(84): n is a, c, g, or t
  misc_feature (193)..(198): n is a, c, g, or t
  misc_feature (202)..(202): n is a, c, g, or t
  misc_feature (224)..(240): n is a, c, g, or t
  misc_feature (243)..(249): n is a, c, g, or t
  misc_feature (254)..(254): n is a, c, g, or t
  misc_feature (278)..(279): n is a, c, g, or t
attccaaagccaaagattgcatcagttntgctgctatttcctcctatcattctttctgatgttgaaaatgatattaagcctagnattcgtgaatgggagaaggtatttttgttcatggtatctattggaacctgctagattgtacacttgacaataacacattaatactagtgatcccatttttaaatttccnnnnnnggcnttgaacaagactatattactannnnnnnnnnnnnnnnnccnnnnnnnctttnaacgagtgtgatagagaactacannaaaatgttgttgtttttcaaccaaaaag

SEQ ID NO: 4201 - DNA, 567 bp, Zea mays
  misc_feature (400)..(400): n is a, c, g, or t
  misc_feature (402)..(403): n is a, c, g, or t
  misc_feature (405)..(405): n is a, c, g, or t
  misc_feature (410)..(414): n is a, c, g, or t
  misc_feature (416)..(417): n is a, c, g, or t
  misc_feature (420)..(428): n is a, c, g, or t
  misc_feature (430)..(430): n is a, c, g, or t
  misc_feature (445)..(446): n is a, c, g, or t
  misc_feature (492)..(496): n is a, c, g, or t
  misc_feature (504)..(504): n is a, c, g, or t
  misc_feature (523)..(523): n is a, c, g, or t
  misc_feature (526)..(528): n is a, c, g, or t
cgctctcaaggtgcctgccgacgccgacatgctctacgaggtcggcgacaaggtggacgcccagcagcccaagatcgcgcataccgatgagttctcgtttcttgacaaggcagccgtcgtctccgaatcggacatggaggagatgcgcgtgtcggggccgggggagaccggttcgtcgtcgtggaggctctgcaccgtcacccaggtggaggagctcaagatcctggtgcggctgctgcccatatgggtgaccagcgtcatcgtgtcctcggcgtacgcgcagatgaccaccacattcatccagcagggcagcgccatgaacatgtccatcctgtccgtgccggtggcagcggcgtccatgggctcgtttgaggtggtcttccctcctcaaacgagagcntnngnacgcnnnnncnncgnnnnnnnnngnatggacatgttcatnncgctgcctgctggatgaatgtggtggtcatctgcgcgtacgcgagnnnnnatgacgcnggtcacatatgggcagcancgnnnaggatcttgagctctcacctgggtgacggtgcagagctc

SEQ ID NO: 4202 - DNA, 487 bp, Zea mays
  misc_feature (11)..(12): n is a, c, g, or t
  misc_feature (314)..(316): n is a, c, g, or t
  misc_feature (399)..(484): n is a, c, g, or t
tttgatgtgcnnaaggagctgcctggtggattgcctctcatgaagccagaggattaccaatactttggaactttgctgaatgaagaagaggaggaggagctatcgccagaggagcagaaggagaggaaaatcatgaaactgttactcaaagtgaagaatggtacacctccacagcgtaaaacagcacttcggcaattgacagacaaagcccgggagttcggtgctggaccactgttcaacaaaatcctgcccttactcatgcagccaacactggaggaccaggagaggcatcttctggtgaaggtcattgatannntactgtataagctggatgagctggtccgaccttttgtgcacaagattcttgtggttattgaaccactgttgattgatgaggannnnnnnnnnnnnnnnnnnnnnnnnnnnnnnnnnnnnnnnnnnnnnnnnnnnnnnnnnnnnnnnnnnnnnnnnnnnnnnnnnnnnnccc

SEQ ID NO: 4203 - DNA, 447 bp, Zea mays
  misc_feature (30)..(30): n is a, c, g, or t
tctccctagccgagcttctctctcccctgntgtttcccatgcgtgcaaggagcactaaggccagcgcccttgccctctgctccagccatggcgtgggccttctctggtccgggctcgcagtcgcccatggcgctctccccttctccgcggcgttcggtagcaggaaagagcagcgccccttccttctctcccatgaccggcgctccctgtcctcctccccatggcgcccgtgcccctgctctaggtgctcgcctcctccatttcggatggccggccttggtagccgctgttgccatgagtgccatggtcgagcgccctattccctgctccatggctcgagctcgagtttcctcatggcgctgcctccctgtccatggcgacgcagcagctccctcccatggtgccccctgctcttcctccttggcgcctagaaattgcagcaacata

SEQ ID NO: 4204 - DNA, 654 bp, Zea mays
gtgtgcaggaggaggaggtggtgctggaggggaagatctcacaagcgagtgaagaccacacagtctcgcgcactcgcaaacccagtgcacgctgcggttttcctcttcgcccaccttcttggagcggggaggttggccatgaggaggtggtgcccggctgccctgctgggctgcgtagtggcgctgtccgttctggtggccgccgtggaatgcgtcaatgcgctgtggcttacgacaagaaggcagtgctgattgatgggcagatgcggattctcttctccggatccatacacttccccaggagcacccctgatgtaactgcattttacaaaatctcttctccccccactattccctggagaggtttatggctgcggtcagctgtttcttgatgcaaagctcgcaaacccagtgcacgctgcggagaggttttagccgtccctctttcttccacggttagtttcttggatggggtttgagattttctcggtcattgtcccctctggcctccatcccttgtttttctctacagcatctgtgtttcttggttcttccttgcacaacatttggataacccaaactaagaaacttccgacaaaaaaactattttgggtggttttgtggcattttttagaatctatggatctgaagtga

SEQ ID NO: 4205 - DNA, 1108 bp, Zea mays
ataatcgctacatacattattcattgttttgaataccacattctccaagttggaggtatcacttagaaatgcttgtgaggtatgcaatgtaatgtttgatacattctggtattttcagatggacttcttttttgtttttaaccaaatgatttcagggtcaagatgaactatttatagatgatggaaacttgcatgaactgtttgggaaattaccagaagttgatgtagagagttcagaatggacagaggccttggcaacagatggtacaagtttaatctatcaaaaccttcagaagctagatagttttctgtcctctcaggtaagcatctctatcttcctaagaggctaagacaaccacacatgtgtcatttctggtttcaacctcttatgttcaagtcttcaagactagtgacctttgttgttgatgaaatacattaagggtgcaattcattgtatttgatatatagttatactaacaaagttttgatgctacctgtttaggctgcctgtaaataatatacatatacatgcatacaacaaccaatgattttgctgattagaattatcagtaggatcgaagtaaaagctataagcaaccacattggacaagtgttgagacatcaaaacttaccacatagataagctgatgatgtatccgggcccaatttgtatagttgcatctcattattagaataccagtacaattttatgaacttttcccttatgttcttttgtcttttttattctgtagtactttttttaaaaagaaactaacaggagctctgcctttcaattaagcggagaatagagtttgcgtacaagtttattctgtagtacttgctagaaataactttggtttgatcactaaattgactgctatagccccccctcccccgaaatcttgtagcgctttgtacttatatatgtgtgtgttccttatggatatatttaaagcaaggtgtttattaactacctgttgctctttaattgtagctctcaagccataaaagaccaaacaaattgaccatatattggttaccctatacatgtggagcagtaggtctctctgtgtgttctctgtggctttacgccatagcagttgatgaa

SEQ ID NO: 4206 - DNA, 1387 bp, Zea mays
  misc_feature (8)..(8): n is a, c, g, or t
gcttttcncgtaatgatgcatcccggtgttgatgcttttgaggctgaaaccacaggtgtacccaaaagagaggcagtatcgtatttagaatgcagtaaaagttatagttccgtgataatatcaagtgaacattccctaaaattaataaatcttcagatatcaaatcaaggataattcaataagactagaaagagcaaataaagaacactgaactactaaactatgagatgggataatttatgaacgcacaagtgcaagccaaatatggttggcttatcacagttgttaacagagtgctacatacatttcccaatacccagaacaaatttcataaaaaaaggatgccaaaagcccaaaatgattatctgcatgcccaagagtaaccaccttgctagctgccctggagttttttagtttaagatgatggtagatgtggctatagtagatcgtctgtccagtaagaatcagagttgtgatggtatatagctgcattgcaaaagctaagttcagtcattacgctgcaggaattaaaataaagataagagaaacttggtattgtgccttaccagtgccatgtagaactgagttggcagctgcaattatgaacaaaatgaaaatattatatttggcattttaggaaaaaaaatataaaattctcatacaatctcatgaataatttcatcgtgtcaaaaggaaaaaggtgaatatatcaatgcacagttgcacacgagcaattttatgacaaataccatatgaatcatcttccacagatgctattttgtcacaaatattaatacagatctatttggaattcctgtctaactatccatattctgtggtgccataatgtgtcagttcatgaataattgtgaacgtacaataaaagttaataatgctggcagaaacaagtagagtcttatggtgcagtttagggattcatagaataatgaaggctggcagaaacaagtagaataatatccattctgttaatgataacaccacattacactatacaaaataaatgccattacttccgttaagaagctggtattcgatgttagatcaaatacagaactgtcaatgtcctacaatatacatatgtcaaattactgttgaagatggctcagaaaaagaagtataagtaatggttcttacagttgcaggttcgaggaagcaaccggcaaggttaaacaaatctctgcacaatcatagaagcataacatggaattatacagggttcgacgcttaacaagaaggtacaagtgtaagcatgcaaggagcagaaggcatgtgaaataatataatcgcatccaattccaagtaggagaagacatctgacgtagcatacccaacaatccaggtcataaggaaggcgacagagagcccc

SEQ ID NO: 4207 - DNA, 410 bp, Zea mays
  misc_feature (402)..(402): n is a, c, g, or t
tcgtatgtcgcatattgagctgtcatctgcaatagttcccgtgctcgaggattaatcataatacgcgatactgcatgcattgggcccgacaggattatgccggtctgctgagatcactgacagtgtacacaatgtagtaggaaacatagttctcgacttctcgtgccatcttcctgaggacctttctatgcgatcatgcatgcattgcgtatttagacgtgaactatgtaggctttagaatgggttgtgttggggaaaagaaaggagagataagaagaggtaggaatagaggcactagtgacccaaactgaggtttcaataaatggtacgtacatgcttaacttgagagaccacaccattcttcattgatagtatttcccttgtgtgtaatgttgtgacagncgtatcca

SEQ ID NO: 4208 - DNA, 246 bp, Zea mays
tcgggtcatccgagcaccgcatggtgcggctgctgcaggtcgcgatgcagtgcgtcgacgcctcccccggctctgccccgccgccgaccatgcgggaggtcgccggcatgatcaatgccatccgcggcgacgaggacgacgggtccgtctccttcggggcatgatgccatcaaacgaggagcaaggaccggagaactcgactcgtcgtcatcgaccacagcgctgcggtactctgcgagagatgta

SEQ ID NO: 4209 - DNA, 306 bp, Zea mays
  misc_feature (295)..(302): n is a, c, g, or t
agcacctcttcttcgacccgcgcgggcagctgatccacctgtggaacaagatcttcctgtccgcctgcctgctgtcgctgttcgtggacccgctgttcctgtacctgacgggcacgcagcggaacacgtgcgtcgagttcgaggactcgctggcgctcacgctgtccatgatccgctcgctgctggacctcttctacggcgcgcacatcctgttccgcttccgcaccgccttcatcgcgccgtcgtcgcgcgtgttcgggcggggcgagctcgtcatccagccctacgagatcgnnnnnnnngtac

SEQ ID NO: 4210 - DNA, 391 bp, Zea mays
acctagtccttactgcgccctcccacagaggccgtcattcactaatctagctgctacgcttcgcttcccgctccgattgggagctagggtttagcttatctccgagctcagcttcgggtcgcggcacgcggcatggcggggtacggggaagagaaccagaacgccatgaacgggtacgaggaggaagaggaggaagaagaggttgaagaagtcgaggaggtgtacgaagaggaggaggagggggacggggagagggaaggagacgagggggcagccgccgaggcagcagcgatggcggccgagacgagaagtgtcgatggaggccggggcctagcggaggccgttgggaatgttgatgccggaggcgaggatgagagggatgcagattcta

SEQ ID NO: 4211 - DNA, 452 bp, Zea mays
cactgaactctataagtagcaagtcaacaaattagatgtaaaaacaatcagaggaactgcgtagcgtagacattggtccctttttttccaggaagaacactcatcctacaaataaaaactacaaaaatactcctcacaccaaggcaggtcgtgcatcaccatcaattcgagcaaggtgccagcgccatcaccttcaatccatcatacaagtactttaataaattgatagaaaaaacaaagaacactcttttccgcagtacccattaccatacacgtcttgggacttgggcgaagtagaagcttgttacctgctctcggcttggcaatggctgaacgacagctccttgttgcagtattgttgccggtgaggtcgtcgacgcggaccatggtgctggcttcgctgtagaactggtggacgacatcgggggtttgttgcagcaggttgtagtagt

SEQ ID NO: 4212 - DNA, 799 bp, Zea mays
  misc_feature (652)..(653): n is a, c, g, or t
  misc_feature (673)..(675): n is a, c, g, or t
  misc_feature (687)..(700): n is a, c, g, or t
  misc_feature (706)..(714): n is a, c, g, or t
  misc_feature (717)..(724): n is a, c, g, or t
  misc_feature (726)..(733): n is a, c, g, or t
  misc_feature (736)..(749): n is a, c, g, or t
  misc_feature (751)..(764): n is a, c, g, or t
  misc_feature (766)..(766): n is a, c, g, or t
  misc_feature (768)..(770): n is a, c, g, or t
  misc_feature (772)..(772): n is a, c, g, or t
  misc_feature (774)..(790): n is a, c, g, or t
  misc_feature (792)..(792): n is a, c, g, or t
  misc_feature (794)..(794): n is a, c, g, or t
gagcggggagacgcgagaacgcgacagggctcttggatcccccagagggccagagcccagagcccacacaacagcaggtacgcggagtatgttttggtcctcttcctgtccttcccgtccccggttggcgatctcttcgtctttcgtcgtggcatccagttccgtccatctccccaccaggccaccaccaccagcagcagcagcatagatttggcacgagttcccgtcacgtttggattcgatcgctcctttgtgtattctagtccacgctctgatgatcgctggcgtctgacgagggcaacagccacagatcatgaatccagtgcagtcctcttcattttgttttgttttgtttcgtttgtgcattctagtcctcgctctgatcgctggcgtctgccgagggccacagctgtcgatcatgaatccagtgcagccctcttcattttttgttttgtttttttactataataaaagaacggaagcccccctttttgggatttcttgatttgcgcggacgcggacagtggattttgcgtctccggcgaagtgccgtgccgtaccgccactgccacacttgcagtccatgttcccgtggatcttgcgatccagacgcgggaaccccaccacctgttgattccctgtttttttttgnncttttcccctgcatttctgnnnatgccgatgccnnnnnnnnnnnnnntttgcnnnnnnnnnccnnnnnnnnannnnnnnntannnnnnnnnnnnnnannnnnnnnnnnnnncncnnntncnnnnnnnnnnnnnnnnngngnggggg

SEQ ID NO: 4213 - DNA, 677 bp, Zea mays
cgtgcccgtgcgtttccttgtcgcatcgcacgtagccattaattcccatgcacgtaggccaccgctgcatgctgcacggccacgagaacagcacacgcccctcgttacgttcctggcatgcatatctgattgcgtttcttgctccttgcgtgttcctcgtgcatcgtggcatgtcgatcggcggatcgagcaggtgtgggaggtgccggagggcgcggaggttctggcctcctccgacaagaccggcgtcgagatgttctgcgtcggcgagcacgtgctgggcatccaggggcacccggagtacaccaaggacatcttcctcagcctcgtcgaccgcctcctcgccgcgggatccatcaccgtgagtgcctgctttcacgtcaccttacagcgactgattcctctcaccaaacggacaagcagccgcgtcgctctccgcatctctactctgattccgctttgccactcgcacacgctgcagattccctttgctgaggccgtgaacaggcagctggagaccactgcgccggaccgggagttctggctcatgctctgcaagagcttcctcaaggctcgtgaagaataagagtattaattagagtttgcacactgtgatgtcattgtcacttaccattaaaacggttgtaaatcttctatcacttcaacaaataaacctc

SEQ ID NO: 4214 - DNA, 653 bp, Zea mays
  misc_feature (315)..(328): n is a, c, g, or t
  misc_feature (333)..(337): n is a, c, g, or t
  misc_feature (343)..(357): n is a, c, g, or t
  misc_feature (361)..(405): n is a, c, g, or t
  misc_feature (409)..(416): n is a, c, g, or t
  misc_feature (418)..(456): n is a, c, g, or t
  misc_feature (462)..(463): n is a, c, g, or t
  misc_feature (472)..(477): n is a, c, g, or t
  misc_feature (501)..(504): n is a, c, g, or t
  misc_feature (526)..(528): n is a, c, g, or t
  misc_feature (535)..(541): n is a, c, g, or t
  misc_feature (568)..(572): n is a, c, g, or t
  misc_feature (632)..(634): n is a, c, g, or t
  misc_feature (649)..(649): n is a, c, g, or t
attggaagcatgaattcaggctttttttggatgaggaagctgcttcctggttgaaggtccggggcaggaaaaatccttcatatgcggatattgttaagctccctctcaccggtgccaatgctgttccgattcgcaactctatcaagtctcctggtgatgctcagcgtgtggctcgggctggatcttcggttttcaatcgtttgggccctcctttccttaatcatgctcaggctcatagtatctggcggcctcgtgctgggcctcggcctcgccccagagtttccgtgttcaaccgtttgaactttccggtttcgnnnnnnnnnnnnnnttctnnnnngggaannnnnnnnnnnnnnnggtnnnnnnnnnnnnnnnnnnnnnnnnnnnnnnnnnnnnnnnnnnnnnaaannnnnnnntnnnnnnnnnnnnnnnnnnnnnnnnnnnnnnnnnnnnnnnttgaanngacaaatgnnnnnntcgcgtctgtacagtttttagtannnnttgagagttgcgagcatttttnnncgccggnnnnnnnggagacttgctttttctcaagcgactnnnnntcagatttgtaaatagtgtacttttgttactgtcacatggcgaaacatgtacgctactannngttccagtgatgggnactt

SEQ ID NO: 4215 - DNA, 716 bp, Zea mays
cgtacgtaaaagacaaaacaatgacgtccgtcacacggcgatcgtcgtccatttattatttttttgccagaagattgattaatagttactacttctcgatctggggacagctagctagattaccaaccagtacagtagtacattgagtgagtgtctgttaatgcgtagcgtaggtgaccaccgcggacgggtacatcctgagcttgcagcggatacccggcggccgcggccgcggctccggccaatcggcggccggcagtaagatcccggtgctgctccagcacggcctcctcatggtaaagtatatactccactgtactactccatcaagccatcgctaatctacacactgatttcagccactaaattgtctggcgtggccgcaccgcaggacggcgtgacgtggctgatgagctccccggacgagtccctgggctacatcctggcggacggcggctacgacgtgtggatcgccaacacccggggcaccgtctacagccgcggccacaccacgctgtcctccagcgacccggttcgattttcccgcccgtgtccgtgcccgtgcccgatcgcttcgatttcgattcatgcatgtaacttgcattcttcgctgtcgcgcacgtgttcaggcgtactgggactggtcgtgggacgagctggccagcaacgacctgtcggcggtggtgcagtacgtgtacgcgcagtcgggacagcaa

SEQ ID NO: 4216 - DNA, 200 bp, Zea mays
atctccggcatctcgtctttgccggagcaccttcaacaagatatcttccttcgcgtgggcgatatcaaagccctattcatgttcgccgtgacaagccgcgggtggctccgtcgcttcaccgacccgaccttcctccgcgagctatgtccgagacacggcggcaatagccgccatggcgcgcgcgtcctgggcgtctggct

SEQ ID NO: 4217 - DNA, 404 bp, Zea mays
gagtacgaggtaggcctggtgtgggaggaccagatgccaccgtccgccgccgccgcgcacgggttcgccccggagcttgtggagcccgggatcacctcctcgtcctgatctggactggacggggacgtcggccgggcctgcctacctacgctaaccccagattctgaccgacggccagcccggcaccaagtagaaaggctatccatactagtagtaccacctaatcaataccgtaatctactactactactactaacaaagaagattgttgggatcgaggatgacagctagctagcgtctgctcagtcagcagcatatcgtcgttagccgcgcagtgtgcagctgcgtcagctctgccattgctactgctccttttgggccttttgtgttgtgctctcctagaa

SEQ ID NO: 4218 - DNA, 819 bp, Zea mays
cccagtgatcagaaaaaccctaactaataacaagcatccatgcatgcattttaaattaaaatcgattggtttactgcagtggtttgataagtatccacagttcttttcaagtcctctctacatcgccggcgattcctactctggcatgatcgtgccaaccgttacatctgaaattgctagaggtaaaaattaacttctctgttgccatttctactccactactagtgttaacttacctagacggttacatgtccaggtaaagaagaggggagccaaccgaatctaaatctaaaggtttgaggattattgcgccgttggctgagcatatatatactagctccccgtatgatatgaaggtttcgagatttcagaattttttctggcgtaccatgttcagggctacctcgttggtaatccagtcacagatttcaacttcgatggtccgtccagaatcccatttgctcacgggatgggtctcatatcggacgaaatatacgaggtgaaacaatgcttcagcaattaatgaaatcttcagcatcggaattacagtggcaattggacactagttttcctcgctgtttaatcgcgtcttggtactttcaggcatacgagaagagctgcagtgtgggtgacagtagacgccaaagcattgagtgcataaatagccttggcgccatagacgaggcacatatccaattcttgtttaattgtttccaatgaccgacaactgagaacggttccttaactttttgaagtgcatcaaaggcataagcccgaaccacgttctggagcccctgtgcgctttcgcgagtcccaagc

SEQ ID NO: 4219 - DNA, 721 bp, Zea mays
agacatacagaggtatgtgctgttctatctatcccgtaaattatgataaggagtttgctgagatcaccagatgaacttatctgagcttatgtttctcagggaagcttgacaaaggagcagttcttaaagcactttgtgctggttttagggaaactaccgagccagccgtttgcttgagtgatggttggtgcattgatttctctatttttttttatgttcactgcttacatgatctatcatatacttccaagtgtgatttgtatgttgcatgctcttgatgttcactttatttcggccttagatatacaaacaaacgagtgcctagagaacaatggtggctgttggcaagataaggctgccaacatcactgcatgcaaggtacttcctgtggtgctgttttttttttaccttgaaattttggtttatcaaatatttgttctgattagcttatgcatgtaatgtgttttcggtttatatacaggatacattccgtggaagagtttgcgagtgtccagttgtgaaaggcgtcaaatttgttggcgatggctatactcactgtgaaggtatgctacacaaggcataaggagattcatcttttggcattttcttttattatgtgttaagagagcttctgaattataacatttgtgttttaagcttccggatctggtcggtgtgaaattaacaacggagggtgctggaaagataccaagaatggtcg

SEQ ID NO: 4220 - DNA, 384 bp, Zea mays
ttagtgtaactccgtattcttcaaataattcctttacaagttcctttggcttgaactttgggttatcatgcagcttctccttaatgatagtagtcaaccactgtcgtgttgctcgacgctgaccctctccacttcctccaccacaagtatgttcatctgtcaatctcttgataataaatttcttgttacgagatgattcagacgcatgcaaccgccaggtgcagcctccttctgcaccacattttacagtgacacgagtagtttcattttttatgaaccggtacacaaatcctttcccaatagcatacttgcacaactgagcacggaaatctttcacgttatcaaattcttgaccaactcctttgataatgtcatcccacaaca

SEQ ID NO: 4221 - DNA, 234 bp, Zea mays
gtagtatataatgtaaatgtggatgaactagagagagatttccattcatcattgaacggaccacgacaaggattccaaggcgccgattcccaagatctgcacgcagctggtaggatgagatcatcccattacagttctgccacccatttattttaactcatgggccggggataaaacaatttaaaaaacatgtttggtgaattcatagtatcaacgcaccatggtttatgttga

SEQ ID NO: 4222 - DNA, 860 bp, Zea mays
  misc_feature (61)..(61): n is a, c, g, or t
  misc_feature (175)..(175): n is a, c, g, or t
  misc_feature (201)..(201): n is a, c, g, or t
  misc_feature (715)..(715): n is a, c, g, or t
catgctcgcagtacctcctcgacgccgcctacgatgccagcgtcaacttcttttgactccncagagatgtaggctcatttgctccctcatctccctgcctcggtttgtgagtaatgaaaggtgaatggatgcacatttgcaaacctgtttccttgtcaggtacccgaactgccantacacttcagtgtgggtaagaagcanattttgatctaatatgtcgtactgtaaccactctctatattgtttcacctttgatataaccttttgtgtcatattttattacttggtcactgtgttataatacaaaatgctagagccctggtgaggcaagcaacacacgcctactgttctagttagatgcaaactaccccatttctctgcctcttcaagggttacacatatatcttggttttgctgcattctaaatgtgatttgatggttacttgcttattttataccatttttctttactaattgaggaaacataatcatactaatcattagggttgtagttactagttagtattcccataatgaatattctatgttgttatgactgtttttgttccttactttttcaaagacagcggtgatcagctacacctattcacattgctaactcaattcaaaatagaattatgctgcaagctacacaaggtcttgacatccaaaatgtgaagtgtgtaattgtttgtatagtagagataactttatncattctggtatggtaatgtttgttttggtttcattttatccatatctcttgtcttatttttatacattcttgttgataggatactatggaagcacttgtggctgagactagaatagaagggaaagaatctaagacttatatagaa

SEQ ID NO: 4223 - DNA, 380 bp, Zea mays
  misc_feature (374)..(374): n is a, c, g, or t
cgataaagatccagcaggccaaactgtccccctatcccagtggcgaagcccccaccgaatcgggtcgagaaccaaacccctcctctagacgagtaaactactcgggcaaccgcaccaagatctggttcacaacgtctagaagccaggacccggagcgcctcctcttcctcggcagcacctgcatctgcatgcagagcacaagggcagcatctcgtggtgaggggacagtgggaataattggcggctcggtgttgggagaccatgggaacaagcgccggtgaggggaggaatcttagctcgttagttctgcgagcagtcacatgaatggatggatggcgaaattggtgtgttgttttaggcacatataggcagtnaaacca

SEQ ID NO: 4224 - DNA, 480 bp, Zea mays
  misc_feature (472)..(473): n is a, c, g, or t
gacggcgtcgacatgttcagctgggacaacaagctcgccggagcgcgcgtgctgctgtcacgggtatcattcatacatggcacgcgcatattaaatcacactcaagctagcacagctaggaaccatattgctcggccgctgcgttcgtactcatgtcaaccctctgcatgcatgcacgcacgcacgcagagagctctggtgaacggcgacacgaggctggagccgttcaggcagcaggccgaggacttcttctgcaggatcctgcgcgactccccttcctccacgacgcagtacacgccgggcggcctgatgcacaagtcggggtacgccaacctgcagtacgtcacctcggccagcttcctgctcaccacctacgccaagtacatggccgccaccaagcacaccttctcctgccagggcctccccgtcaccgccacctccctcagggctctcgccaagcagcaggtggacnncatcttg

SEQ ID NO: 4225 - DNA, 665 bp, Zea mays
  misc_feature (658)..(660): n is a, c, g, or t
tacaggcagttgttaaatttctgtacaattcaccttctcgtttccatttgcagtttgattggttcaagttctaattcagagacttttaacaacgggtgtttatcgcattcttcagacttctcagtgaaagatgttgaggtatttaaaacattgaagcagtgtgttctgcatctttcttcctggtaaaaataattacatccagatgatcaagaagctttcaagattaacctatcaatggaaataattctgcaaggacataaagagcctatttatggacgtccacatgttatgtaagtttgggggtaagacactttttaacatgtctcttttttctcgttcaatgcagctttggggcttcgtctacccttccaaatacgaggagatgctgacactctgccggactgagaaaccaggaatctgtcgatggtgagtggtgaccaatcccatagccagttgaacagacaaatggacatgtcgcgtctgtacagtttttagtaggctttgacagttgcgagcatttttgtgcgccggtagtactggagacttgctttttctcaagcgacttcgctcagatttgtaaatagtgtacttttgttactgtcacatggcgaaacatgtacgctactagttgttccagtgatgggcactttgaggtaannngtcac

SEQ ID NO: 4226 - DNA, 503 bp, Zea mays
gaataattctatagttgattactttgtaacggaatcaacttttgaaccaattaggaaaggtatactgtgttagctaacaggaaactaagctgatatttaagaaagttgtaacatggttatctcagaggcgctggctacaaaatgtagtcaaacgattaggttgtgaattgtgatgtgcaggtgacaaaatatagatcgttcaccttattttgtgcatcactttcataaatgaataataatgtagaaattttcagaaaaaatgtataagagaaaggttaccatctcatcatcaagatctccaatattcaaacgcaagaaaacttacctgtactgataaatctgagatgaagcaaacggtatcactaagaaatgcttttctcctgaatagacaaatgcaaggtcatgggctaaaccagtgctaacgctaatcagttttaccaatatatgatttcataatttctacaataccatgatggaagaatcacactccgtaaccgggaatc

SEQ ID NO: 4227 - DNA, 387 bp, Zea mays
gccattccttgcggccatctctgtgtcaccaggtgcgagcgcattcaaacggaggggcacatggggaagcttcgagctcaaggaaagcggaggaaatgagatggatggagaatatgcaaggcactggatgagcgcggacgtgaagagtagggtgagctccagcgtgggaaggagcgggtccgatgatctcttccggccatatgagatctctggttgggcaggttacgcatctctggtggcagcaattctgaaattgcacgagactgtgcgaatggattggccaaactcttgggcggctgtagttcccagctcttctgtgatgttgcgcgactgcggtacaatgttgaaaatcaggctttgctcacacgaagaaggcaacaaggatag

SEQ ID NO: 4228 - DNA, 396 bp, Zea mays
ttcttgatgacatggcttcggatgtgaatgagctggcaatggcaggaggagcatttttcagcaacgacgacgcatcgtttacggcgcctcaggatctcgccgcggcgctagatggtggccagctagcaccaggagcattggacgccatcagtgcatcgctcatggagacggacgggaaccctggtctcgagctagaggcaatgttttctcctgatcagtacgagaacaccttgtttccgctggaagctctgctgggtctggatgatgctcccgtgtacgaggacggccaagactaccggcagggtggcgggagtgccgacgacgaggctgcagggacatcgctgatcggcggcgctgatgacagtcttgacgtcctggatgattatttgttcatgg

SEQ ID NO: 4229 - DNA, 570 bp, Zea mays
agagcaggttttctttttgcccttgcggtctgctgaggcttattttgatttttcacattctgatttctcagtccttttcattatctgcattgagttcaacatatactctctcttcatctcctcttgcatatatcttgtttctttggttcagttttgcacatgacttctttccttttagttgtcttcaaaacatgtcacttaagatgatgacactcaaattcttttcccgtctgtatcagtatgagttgagaaaaaaagaggaaagagaagctgctgaagctttaaaacgtgaggaggagcttcgtgaagccaaaagacaacaacagaggctaaactttctgctgtcacaaacggagctttatagtcatttcatgcagaacaaggctggtggctcagcgccacctgatgaggaagatgtccctgatgaagatgaggaagaagatcctgaagaagctcaattgaaaagagaggccttgagggcagctcagcatgccgtttctcaacaaaagatgaggactaatgcatttgatagtgaaactgtgaggcttcgtcaaacttctgattctgctc

SEQ ID NO: 4230 - DNA, 932 bp, Zea mays
  misc_feature (842)..(842): n is a, c, g, or t
  misc_feature (880)..(885): n is a, c, g, or t
cctgttggaaaatctgtcttcagcggagaaaaggaaatttctcgtcaacactgtatttacagatagtattgatataattcttttaccctgtgcggaaaatattctactacgtctcaaatgatgatgatacacatgctaatgatgtgtttgcaactattttgggaattgtaagtgacaatgaacaaaacactgacagcattttctgtcattcatgtaactccatgttctgattaccagatacagattgtacaaaacattttatagacagtttcatgtcacctgcatgatggtagatattagtgagttcatgtttcacacgatttttctcgtcttcggtagaagagtgattacagctaattcattatatgtgaattgttttttaagtagattatatgagcatctgtcggctcttctttgaataactaacatgtgtagaaagaagaaaacatggccttgatcttctgttattgacctggacggccacctgagtgcacatagtataactttcattcttgttcactgtgaataaaatcacacttgtccatattgaaatccatcagattattgcagtcatttagctgctatttgctagtgcaacaaacttactaaatattgcattctctacttgcagctccttagccttgaagattcaagagaagctgtttatggcacccttgatgcctgggttgcctttgagcaggattttcctttggcttcactaaagcaagcactttcagttcttgagaaggaggaacagtggcatagaattgtccaggtattgtatagtgtaacctgctttcattcttgtttgtttatcttatctgtctacagcacacttagantgtgaagtaaaatgtctgtgactacatactcaggtgannnnnnggatgctgagcaaagggcaaggaaatacaatgagaacatatgagcta

SEQ ID NO: 4231 - DNA, 388 bp, Zea mays
ctgatagcactaaactaagctgtaaaccgaagatagaattggatagatacggatatggcaaagggtgctgcagtttcttgcccagtgcgatagactcgacggttttggcgctcggtgcggtatgtgattttggagttgggcgttgtgaggaggctcaaatagctgtctccaggcattgtacctcagttcttgaggcggggcacgccacagaagagctgacactgacaggctctgggtgtgatccacccaaaacggagaagaagctgggcagttctgaagctgtggagggacatcacgactccaggttgattgaaccgaggcttgttgaatcagatgcaaacctcgagtttgtaactgggattcttggctcactgactgataaacagga

SEQ ID NO: 4232 - DNA, 389 bp, Zea mays
gtcaagaactattatcacagagactttctcatcgatgaggataaccgttggttgctgcttgggtggaagggacgggtgctctatgccatgtcgacatgggttgctgaggataataagcccatcttttagtgtgcctgaatccaactgtagattatatttgatattttgatcgaagggttatgttgaaccatgatccaccacatgttgtggttcagtggacttatgtttctagagagtttattgctgaaacctgtgaggtagaagcaattagatgcttagagctacataggctgtagatatagttcttgatatattcctgcagagttgtaatcatgtatcatgtacactagaattaaaaccctgcagctgacaagtggttacacgtttga

SEQ ID NO: 4233 - DNA, 327 bp, Zea mays
gacggctgcggcctcggctacggagacgacgcggactacagcgccatgtacaactacctgcaccagcccgcgtgcctggaccaccaccaccatgccggcagcattggctccacggcgagcaacggggtggtgtccaatggcggcggcggcggcggcggcagatgggacgacgactccgaggacgaggacgacgatggcagcatgttccaaggcatcgaccagctgttcaacgagcacgaagacgacgagctgcacgtcgctggtgtcgacatcaccatcaagggcaagaggatgcaggacggacgcatcttcctccggctgcgtatc

SEQ ID NO: 4234 - DNA, 376 bp, Zea mays
tgtgacggaggcttccagcttctctctgaagctgatgtggacgcgctggagcagcctgatcgtggagctgcaggcaggatacgcgtatcaggagaatcggagctgctccaagattggccgacgattttgtggttgctgtttgattcaggtcaccagcagcaggtgggccccaggaccaccttccaccgtcttcgaatcgccgacgccctgggaatgccgtttctttcttcacctgttctgatgacaccggcgatataaacattcggaccaaagttcgtcaagacttccttttgccatctcaagtaaccaaacgtgcttcaccgaggcgcctgtctcccacacaaccgacgagtacaaaaaaaaagttgatgaatac

SEQ ID NO: 4235 - DNA, 452 bp, Zea mays
agctatcggggttccacctgtagggggtggccccgaacaactaaccatagccgtcgtgttgaaggaccagagctctcaaatagaggacttgaaccagctgaaactagcatgcaacatggctctgaagaaactgaaccctctcttcaaggtgcgtgcattgttcctgtaaaaactgtctacgttttgatttggcagacctcagagatcccaaagaactccattgctccccacatgtatgcaggtttcctccgtcgtcatcgtcccgtccctccctaggaccgcctctaacaaggtcatgaggagagtccttcgcaaggagttcagccaggccgcccaggcaaagcattcaaaaatataggtagttattagaaataattagtgttttctgctgcaaatgcacctgcagaaagagttaaacaacaaactgtgcatatcgggaagtcctgttgttt

SEQ ID NO: 4236 - DNA, 428 bp, Zea mays
tactatgtgaagagcctggttggtgggcagctggtgctacggcttccctcaggggtggtgtaagagaagtgcaagctgcagcagaatacaaaactttagtgcttcaccggttcatatgtacttttagtagtgcccaacctgggagccttttttagttgatgttacgagttatgactatatgtatggcaaaattgctgcaagggtcctcttaaaagatactaggttgacactgagactgtttatagctgcgcttttctggatacccaatctttgggtacttggcttctgccgtatgactgtcgtggtcttaggatcaggtgggtaatggtctctttggattaggtaattctagaatgctttcataaatcgatatttatctatgcagaactggccacgtgaaaatcgtgggactaaggtcatcaggtcgt

SEQ ID NO: 4237 - DNA, 523 bp, Zea mays
acgccgtcctcacgctcaccaagtccaacttcaggccatacggcaaggacctcaacggcggcgtccccaccggacgcttctccaacggcaggattccgacggacttcgtaggttcgtgtcccgcgccgctagctgcgatgctgactcgagcacgagcctaattaacgaacagtcgctgtatggatgcctgtgcagcttcacggctcggcttgaaagatctggttccggcgtatctcggcaccgacctcagcgacgacgacctctgcacgggcgtcagcttcgcgtctgggggcaccggctacgacccgctcacctccactctcgtggtaaacaacaaacgaacgacccccgttgaaatgcctttcttcaggcagttctgccgatgcaggaggagctcaacatgttcgcggagtacaaggagaggctcgcaggggtcgtcggagacgaggccgccgccgcaggcatcgtggccgaaagcctgttccttgtctgcgccgggtcggacgacatcgtcaacaactac

SEQ ID NO: 4238 - DNA, 354 bp, Zea mays
gttggcgcagaggatgacggtcatgacgcacaggatggctacgacgatgttgaggaggaagtagtttaggacgaggaagaaggggctcgcaaggacgacggggacaacggagtggtagtactcattgatgaagaccacctcgtcgttcatgacctggaacattgcttcggccgagcagctggtttcgccattgttgtagaggcccttcaggagtaggtccctggagtcgtccacttcttgtttgctcaacgccggcaggtgctcaaaccttcggcgcagtagcttgaagagagcgaacgagaggcagatcctcttcaggcgctggatctgattttgggaatgggaggtgaagaa

SEQ ID NO: 4239 - DNA, 373 bp, Zea mays
gatcgcctttcaactcctctaccatcccattttcgtgccctcgccgctcgggacccacgctgatgcggcggcgacacaccgcgttgaggaggagctatgttgccctccactctcctccaacgtaccgccccgccaccgaagttagaagagacatcggagccatcgtccctgctccacgcaatgttcgggatggtctcctacaggcgcacgctgctgctcgggctccccctgctccgcctctgactgtgcgcccctgtgcgcgccttcctcttcctcgacgcgccgacgacctctcattgagcctctctctccgcctctccgtcgatgcatcccgcttcccccactaaagatagtggagatgttcaagtggacc

SEQ ID NO: 4240 - DNA, 453 bp, Zea mays
  misc_feature (420)..(422): n is a, c, g, or t
  misc_feature (424)..(424): n is a, c, g, or t
  misc_feature (436)..(437): n is a, c, g, or t
  misc_feature (445)..(448): n is a, c, g, or t
cgttacgacgtgcaatacctgcaagcccgcaacgatcagtagggacgacaccgaagctgctgatgccaggtccttgaagaacctcaacagcaccgcgccgctgtcaaactcccggacaaggcgcaatgggccacacattctctcctggctcttaccgaagtcaaagaggaagccaaaaccagatgtgtccccaaacaccgtcgaatgcgagaacatgtcgcagcttctgaaggactggggtgtgttctcactggattccctgaggaaagaggtcgttgaggccaatgagcacagggacgccgcgctccaagaggtatcagagatgaaactatcactaggagagctgactgccaagctagtgagcctggaagcatactgttcggaattgaagaaggctcactagcttggcagtcagctctnnnantgatagtttcanntctgatannnnttgga

SEQ ID NO: 4241 - DNA, 383 bp, Zea mays
aacctcactgaagcacagatctcaaattctcaactcgtacaacgattcaaaccattgaaattctaatgcttactctatcggtctgccttgggctcgtaagagaagagatcgggatcacagaagggagggggagtctaggaagcacatggagaggtacggacctgcgccttatcaatgagcctaagcgcaaacatggagacggggagcggtgcctcatagacaaaggagtggttgatgcactcgttgtagaggaagcgcgataggacacattcgtcggcggtgaggccaacgagcactacccaacttgctcagtggtgcgaagcaccttccgctagtaggagagctcggaggtgggcttgctgacggtggtgagaaccacggtg

SEQ ID NO: 4242 - DNA, 443 bp, Zea mays
cgtcggggatgaggtggttgctcgagtccaggcactcaacatcaggacgacggcggcggcgacgaacagctgcacggcaagacgatatgtgtatgcacctgcaagccttgctcccaccttttcattagtgaagatctcaacctaacttaattatcgattgcgctgcgcagcgtcaagttcgcaaccaaatgcttcatggacgaagaggagggctctgttgcgattgaaggcgaagcaatggctgtcctgcctacactggagctcagctctcagtcgactagaaactaggagtggcctcaaaccgggtcactagtcacaagttgctgttgcttaatcatacccgacctggtaatccctctcttctgcaacactgtgtagaatgcgtgtaaactaaacttagtgtagccttcacattataagcgaggagtgaaataaagctgttg

SEQ ID NO: 4243 - DNA, 359 bp, Zea mays
cgcaagccgccgtatggccacgaccgtctgacgggttcatggaatacgaggttccgcggaccgcatcaccgcacgcaggtagtacaagtcgggtcaaaatgtgctgctgaatgcgcatgccctgctgcctcggctccggctcggctccgcgtcgttggttcaacgaaccaaaccgagcagccgcccagcttgtatattacccgcgctccccgttcttcggcagcccttcccttctttattcctggactagtagtagctaatctatctgctggtctcccttcagctgccgacgatcggagggatcatcagctggctgtccgaaatcccgaacgagcttgtgcgggcggtagctctgagag

SEQ ID NO: 4244 - DNA, 670 bp, Zea mays
caacaaactcaccgaggaaaaccattctccgacatggtgaggacgagaaggaggttggtgctgctgctgctgctgctcctcgccctcacggtgctttccccgctcgcgctctacactagccgcctctccgtggcgcttaactctatacgtaagcggtccctcccctccgtgatttgttcgagatttgagtcctacttgggcgttttcttgttggcattattagggctcttaacgactttactgccccattttttttgtagaagcgcgggttttccctggagaaatcacgaatcaggtgagtggttttttgggttgttctcctcggtggattgcgatccttggggatttttctctggatcttgatggttttgtttattggttatataaatgtcgtggtagggccgtggcgtcaaggcagataagctgaatgcgcttcctctggtaaattgcgcccccacctttttggggttgtttttttttgtcagagtggcaattcattacggatttatgtttcctttggatgcaggaaacagtgagctccttgaaagaacctgtcgacattgtcttctcagaggagctgactgaatctaagagccaaggtacattgatcaccatttcaccatctttgtttggaagcatctcgttctagtgtttgtatagttggtgcaaa

SEQ ID NO: 4245 - DNA, 345 bp, Zea mays
tctgcggctctgcccccgtttcggctgcgaccccttcgcccgaaatacgaatggtacggtaccagtgccacgtccgtctccaaccttctctttgccgcaacgcaaccatcttcgtgcatgcctacacggccaaaccctagcttccacctggtatctaaatttcttcactgctgtttttttttgaacgattcgttacctaatagcttgttacgcgctactgctgtatgattccacccagccgaggatctggtttgcggtgatttatgctcaatgagtgggattcacttgtatgtttacaatgcgagtagattttctgaggctgtttacatcctttattttttttct

SEQ ID NO: 4246 - DNA, 408 bp, Zea mays
ctctgaagacccctccgacctcgccatcgtcctggtcctcgccgacacgctcatcgacggcaacgagctcgaccacccatcgaaatccagggaggaggtccagcttccacgcgcggtgtacttcgcacccgacaacgacaggtacatggtccacgtaggcacctcctctaggaccggcgactgcctacgctggatggagccattattttccaacccgcgcgagaaggtccatgacgggctcgttggcgagatagagtggtcccgcgtagtccgcttcctccactcctccttgccatcaccacaccaggcggaggtggtggagtcatccgagtcggagtctctgcgtcctcccggcgtcgtcgacaaccacgtcgagcccaacctctacagtttcaatcccgctgatct

SEQ ID NO: 4247 - DNA, 610 bp, Zea mays
ccgccggagagacaaccttcagcaggttgccgacaaactcctatctcccaggtcagtctcacatacacatgcgaacacaggaaactcggagacagaacacaggtgttttggtggcaccctattgactgccttttcttagcctctaaggccatatatttatagaccgttacatggaaacaaactaaccattacaaggaaataaaccggactgttatcagtcctgatcctgccgaccagacctgtccatataggactgaactactaccatattagctatttcctaaaacaaaaaataagtaaactagcaccaatcaaggattactttcctatcatacctaaacctagttagctagtgccaaaatttcagatcaatctaaccggtgtgggttgcgcggcactgcggtgccacgacactgccggccttaactccggcactgacggacatttattgaccgttggaatctgaattttcttgatttgtttaattccttggtctccaacagttacctgctgcgtatcctgacatagggatacaacagacaggttaaagtacccctttgtcccatttgagtctccctctccctcacttgctccaccttggctcaaattt

SEQ ID NO: 4248 - DNA, 807 bp, Zea mays
caggcttctgattggaggtattaattttccatgcttatttaagaaaaatgttgtttatatgtattctcatccacggtgacaataattcctgctagtttgtactttttaaacactattttcttgtccaaacattttttcagactatttaatgtaagcacaagcacatttttcattaagaggaacagaaaaaagcttaaaaattttacaagcctgcttactgatggtggattccgcaaatgtttctttagtgtgtaatgcataattaactgttagttttgtgtttggttctgttagttaattgttcattgggaataagtgtttttcattaatgtaacagacccaaattttagctggactgttggatttaaagaatttgctcacccagccacggagaccttctctaccattgctcaagcagggccaactttttttcttgccattgctatgttcggatttgttttccaaatcagtgcattggtggcagagaaagaactaaagcttcgtcaggttcagacttcaatcaccacagtctgcctgcatatctttatgcttaaagtgagcccgaattttgatatatttgcaggctatgtctaccatggggctctatgaatcggcttactggttatcgtggtttacctgggaggcctttcttacaacactttctgcactttttactgtgctctttgggatgatgttccagttcgatttcttccttcataataattttggaatcctattcctcctgttcttcctattccaactgaacatggtaagttccaaatattaattgatttatttgttttgatt

SEQ ID NO: 4249 - DNA, 732 bp, Zea mays
gctaaaggtgcacttttctatgcttgtttgctctatacttactgtgttatcacacacttgttcttttctgtctttgttgttccaggacatgattgatttttgcaaagacaccggtcttcagtctagtgctgctgtaacaagaaatgctactataaaattaattgggatgctacataagtttgtgggcccaggtcatcttcatgtcttcttattttaacatgttatgatagtcgccggatcatgttcttgaaataaaccatcctgcagatattaaaggctttttaagtgatgttaaaccagcacttctaagtgccctcgatactgaatatgagaaaaatccttttgaggtatgccatgttagtcactgtttggaaaatacttattgtgtaactttgattttcaccgacatcggtttggttcaattattagggtgctgctgctgctgctccgaagagaacagttcgagttctggataccacatcttctgtatctgctggcttgtctgatgggttgccacgggaagacattagtgctaagataacacctactttactaaaaaatctgggcagtccggactggaaggtagcggcctcttttaaattatttgatttactttgcaagtgtcttgtattttatttgtgatatttgctattatgcttatatgtgaattgataggtacgattggagtccatagatgcagtcaccaaaattgtggaggaggctaataaacgt

SEQ ID NO: 4250 - DNA, 1086 bp, Zea mays
  misc_feature (971)..(977): n is a, c, g, or t
  misc_feature (1019)..(1022): n is a, c, g, or t
  misc_feature (1042)..(1042): n is a, c, g, or t
  misc_feature (1044)..(1048): n is a, c, g, or t
  misc_feature (1053)..(1053): n is a, c, g, or t
  misc_feature (1081)..(1081): n is a, c, g, or t
tttgcggcttcaccaaagcgtcctgcaagaacacacgcttattccgcaatgccatgataggtcatcactcccaatccttagctgcaccaagtagtgcatttcacatgagcacatgaacatgctgctggcttatcctttccatcgtacagtccaaccggtatgttaagggctaataacacagtacaccttttttttcttaaaagtttgtctcttgtggatccacatggttatgtcaacgaaggcaaggcagagagcactcatgtgtgcagttagagatggaatgctcatagttttctaccactcagatagcttctaaattcaaggtgaattaaaataggtgagctacctgtgtagttactagacgtagcaccgatttcttgtttgattcttgaagctcaccagcaatcaaaatttcgtccaatataaagtacgcctgcagatccaaaaagaaagaagtcgaaacgtttcggtattgttatcttcacatattatacccaagtgcatttgcaaagttatgtactataaaaactgtattttaaaactgatagagtagcagatattgtcggaagaaacattttcgcaccttatgaaaattgaatatcagatcaagctcacagacctgcatgcagtatgacaaagtcagagagccatcaggaaaatgggccttagaactggggagtttatgcaaaggaatctggaggtctcacattgccaaagtagcggtccaatatctcaacatagtgatggatgatctgaagggtttccagttcattgtcagcggggtcaatgcacatgcagaagtaaaggctagcatacctgcaggatggtgcattatgtgtaggaacagattatatctgccatcggtgtgtataatataatcggtgttacgttccagctgattagtaatttgcaagcgcttcgccttttactggttactagtaacaatcaggaatggaaatttttcattcatnnnnnnntacaactcacctcttgtacacaactctgtaaccttgccagtnnnnaaaattgcacagcttggggncnnnnntcagnacgagcgtactaatctctttgatgatcnttgtg

SEQ ID NO: 4251 - DNA, 273 bp, Zea mays
gctcctctgcttcagtagaagccggtaaactagcttgtttaggaacaggatatgcatacatagatctcaaagagatcgaaagataagagaccccagctgtttattatattccatgcaaaaaataactcaagtgactaaagccagaacgctgacgtgaagctacctaagttggtgcagcgacagtgataaaaaggctaaagacttttctagttaaccagctatactattattgtacagtaacatagatgccaatgtgtgcccttagcactagta

SEQ ID NO: 4252 - DNA, 563 bp, Zea mays
  misc_feature (401)..(402): n is a, c, g, or t
  misc_feature (409)..(413): n is a, c, g, or t
  misc_feature (425)..(427): n is a, c, g, or t
  misc_feature (440)..(440): n is a, c, g, or t
  misc_feature (450)..(452): n is a, c, g, or t
  misc_feature (463)..(470): n is a, c, g, or t
  misc_feature (481)..(483): n is a, c, g, or t
  misc_feature (530)..(532): n is a, c, g, or t
  misc_feature (555)..(555): n is a, c, g, or t
gaagagaggtccacaacaaagacgaagagaggcagtagaacggaggtagttcagagtttcagagatttgttcatttgttcgataatcccctttcacaagacacagactcttatttataccatcacgccaccctgacaagctagaccctatatcacagccacacacaacaccaggtcccacagccagcgacacacttacaccactctggccctctggtacaaacgttggcacgacgctcgcgatgaggctgcttcccattctcctgtgtatggtccgacagcataagatgtgtgacattgtgccttgtccggcaacataggatgtgtgacattcccctctccttaagcttcggcttgcccccaagccgatgtagaacctttgaagcaccaggattcaatgcnnatgaaannnnngatcaacctatnnntatcaatggcaanaatagtatcnnncctaaagcagnnnnnnnngtgcttgtgannntttgcagattgaagtactaagctgcatgcggcatccaaacatggttnnnttgcttggagcctgcccagagtntgggtgcc

SEQ ID NO: 4253 - DNA, 291 bp, Zea mays
  misc_feature (216)..(225): n is a, c, g, or t
  misc_feature (227)..(288): n is a, c, g, or t
gtctcgtacctcgtccactgtataatcagggaagtaaatgtgattcggctcgacagagccagtcatggagtagtacgcgtcaggtgtagcactgctcacgtagacgagcacgacctgcggcaatcggaggagatcgtagaggcggaggaggagcgccagaagctggccacccttgtcccagctcctaacaacctccaaattatcgaacaccagaannnnnnnnnngnnnnnnnnnnnnnnnnnnnnnnnnnnnnnnnnnnnnnnnnnnnnnnnnnnnnnnnnnnnnnncat

SEQ ID NO: 4254 - DNA, 1402 bp, Zea mays
  misc_feature (403)..(404): n is a, c, g, or t
  misc_feature (688)..(688): n is a, c, g, or t
  misc_feature (717)..(717): n is a, c, g, or t
  misc_feature (721)..(721): n is a, c, g, or t
  misc_feature (730)..(733): n is a, c, g, or t
  misc_feature (744)..(799): n is a, c, g, or t
  misc_feature (807)..(850): n is a, c, g, or t
  misc_feature (853)..(853): n is a, c, g, or t
  misc_feature (856)..(858): n is a, c, g, or t
  misc_feature (861)..(867): n is a, c, g, or t
  misc_feature (870)..(875): n is a, c, g, or t
  misc_feature (881)..(909): n is a, c, g, or t
  misc_feature (914)..(922): n is a, c, g, or t
  misc_feature (925)..(931): n is a, c, g, or t
  misc_feature (934)..(944): n is a, c, g, or t
  misc_feature (946)..(951): n is a, c, g, or t
  misc_feature (954)..(957): n is a, c, g, or t
  misc_feature (959)..(962): n is a, c, g, or t
  misc_feature (964)..(964): n is a, c, g, or t
  misc_feature (966)..(966): n is a, c, g, or t
  misc_feature (969)..(981): n is a, c, g, or t
  misc_feature (983)..(985): n is a, c, g, or t
  misc_feature (988)..(999): n is a, c, g, or t
  misc_feature (1003)..(1004): n is a, c, g, or t
  misc_feature (1007)..(1008): n is a, c, g, or t
  misc_feature (1011)..(1034): n is a, c, g, or t
  misc_feature (1036)..(1047): n is a, c, g, or t
  misc_feature (1049)..(1050): n is a, c, g, or t
  misc_feature (1052)..(1056): n is a, c, g, or t
  misc_feature (1059)..(1068): n is a, c, g, or t
  misc_feature (1072)..(1074): n is a, c, g, or t
  misc_feature (1076)..(1076): n is a, c, g, or t
  misc_feature (1080)..(1084): n is a, c, g, or t
  misc_feature (1086)..(1089): n is a, c, g, or t
  misc_feature (1093)..(1093): n is a, c, g, or t
  misc_feature (1095)..(1104): n is a, c, g, or t
  misc_feature (1106)..(1114): n is a, c, g, or t
  misc_feature (1116)..(1131): n is a, c, g, or t
  misc_feature (1133)..(1134): n is a, c, g, or t
  misc_feature (1141)..(1141): n is a, c, g, or t
  misc_feature (1145)..(1145): n is a, c, g, or t
  misc_feature (1151)..(1157): n is a, c, g, or t
  misc_feature (1159)..(1162): n is a, c, g, or t
  misc_feature (1171)..(1171): n is a, c, g, or t
  misc_feature (1173)..(1173): n is a, c, g, or t
  misc_feature (1177)..(1180): n is a, c, g, or t
  misc_feature (1183)..(1185): n is a, c, g, or t
  misc_feature (1192)..(1192): n is a, c, g, or t
  misc_feature (1194)..(1208): n is a, c, g, or t
  misc_feature (1212)..(1213): n is a, c, g, or t
  misc_feature (1215)..(1216): n is a, c, g, or t
  misc_feature (1218)..(1231): n is a, c, g, or t
  misc_feature (1233)..(1236): n is a, c, g, or t
  misc_feature (1239)..(1247): n is a, c, g, or t
  misc_feature (1250)..(1262): n is a, c, g, or t
  misc_feature (1268)..(1273): n is a, c, g, or t
  misc_feature (1276)..(1281): n is a, c, g, or t
  misc_feature (1287)..(1288): n is a, c, g, or t
  misc_feature (1290)..(1290): n is a, c, g, or t
  misc_feature (1294)..(1329): n is a, c, g, or t
  misc_feature (1334)..(1341): n is a, c, g, or t
  misc_feature (1343)..(1364): n is a, c, g, or t
  misc_feature (1371)..(1376): n is a, c, g, or t
  misc_feature (1378)..(1382): n is a, c, g, or t
  misc_feature (1384)..(1399): n is a, c, g, or t
tgtagaaactagaaagctaagatgaaaacacagctatatacttgtatgttaaacttgttttctagtaaagggctaatccactagttgacaccgcattggcattgtagtacctaagcattttgtatatagtttatacggtgcactggatagcagtgcaagcactgaatcaaaaagaagacagaacatgtgtattacttgttttcattttccaaatgcaagcaaatctgaagctctatgcttactaacatagaataagttcggcctgagctacttttgcacataagatttaaggaaaggactgctgtagcacagtaattaaccttgaactttatattgtttagagtgtgtggtagcttttgcctttctaaaattaatagatcgcaaaccacaaaaacaatctcanncaagagaactaaaatgcccttaaacattctcctgctattagtacaattgaactaaatgaggggcaaatatggaattaatatggtttagtcccttttaaccacatcttgagggactagggactaaagcagtttagtccctattttagtcctaccgtttggtaatttaggaactaaatgagactaaaatggagggactaatctttagtccctcaaaccaaacggggccttaaggaaaggactgctgtagcacagtaattaaccttgaactttatattgtttagatngggtggtagcttttgcctttctaaattantagntcgcaaacnnnnaaaacaatctnnnnnnnnnnnnnnnnnnnnnnnnnnnnnnnnnnnnnnnnnnnnnnnnnnnnnnnncggcacannnnnnnnnnnnnnnnnnnnnnnnnnnnnnnnnnnnnnnnnnnncancannncannnnnnnaannnnnncccccnnnnnnnnnnnnnnnnnnnnnnnnnnnnncaacnnnnnnnnnaannnnnnnacnnnnnnnnnnncnnnnnnccnnnnannnncnanagnnnnnnnnnnnnngnnnccnnnnnnnnnnnnactnnctnntcnnnnnnnnnnnnnnnnnnnnnnnnannnnnnnnnnnncnntnnnnnatnnnnnnnnnncccnnnantctnnnnncnnnntctnannnnnnnnnntnnnnnnnnncnnnnnnnnnnnnnnnncnncaccctntacncctccnnnnnnncnnnncctcctccntncctnnnntcnnnccccccncnnnnnnnnnnnnnnncccnncnntnnnnnnnnnnnnnncnnnntcnnnnnnnnnccnnnnnnnnnnnnnctttcnnnnnnacnnnnnngatccnncncccnnnnnnnnnnnnnnnnnnnnnnnnnnnnnnnnnnnntcttnnnnnnnnannnnnnnnnnnnnnnnnnnnnnttctctnnnnnncnnnnncnnnnnnnnnnnnnnnntta

SEQ ID NO: 4255 - DNA, 333 bp, Zea mays
catgcgggactacaagaaggtgcgcgcgtacgagctcagcggtactggggccggcgccggcggcagagcgcccagctactgggcgatgggcagggaggagaggaaggagaggggcctcccgaccaacctcctccgcgagatatacgacgccatgggcgaggtcatcaagaggaggatgaccatgggctgctgcggcagtggcggaggcggactcacggcggcgtcctcttccagcctactcgacgttcccatgcaagcttccccgctcgctcaagtcctgccacgacctctgcctcccggtacttattggtcgtctcgtcactgtctgcattc

SEQ ID NO: 4256 - DNA, 375 bp, Zea mays
  misc_feature (209)..(209): n is a, c, g, or t
  misc_feature (273)..(273): n is a, c, g, or t
  misc_feature (281)..(281): n is a, c, g, or t
  misc_feature (326)..(330): n is a, c, g, or t
ctgctggttccttgggagccctctctgcagcgtcccttgtaaagcctacctctttgtctgaagttttagatgccagcaaggaaaggcttttttcatcacttgtgcctgatggcagcatgaaagcactttctaaatacacagagatggtagataatattatccggacccaggctgagaaattgcagcaagctagtgagatcactagagtnaggttgaaggaaatggacttaccagattctattctttcattggaaggaaatataaccttgcccntggatctnaaggaagacgtagaggctgtgcagataagcggtggccctgctggnnnnnaatctgagttgcagcaacttagggatttgagcagggtcaatcagg

SEQ ID NO: 4257 - DNA, 366 bp, Zea mays
cgtcgtctagccgactagcggcgggagctatagcttcgacgagccgacgacaaacaccaacaaggaggggaaaggagggaagagaagctagggcctagggagggaggagagctgctgggagacgacgacgagaagactggcaccgtaacgctagccgtccgtgacctgcgcctgatgcttgttagtttgtgtcgaattgtaaccggaatcgttccagctaatcaaagtttatataaattagagaagcaatccggttagtaatcattccgactcaccaatccggcacaaacgaagaaggcatgaaagatcgcaaggctaacaacgacgactgctgatggtatttttctattatggcagagagaagac

SEQ ID NO: 4258 - DNA, 342 bp, Zea mays
  misc_feature (324)..(328): n is a, c, g, or t
ggcgatgacaggggcggtgatgagtggcagtatgccggcccctgccatgttgtcggggcagtcggatgccccgaaggagatggtggtgctcctccatcgttgatgtggggcagccttcgggacccctggagttgccgaaaggacctctcggcgcagggacttgacgttcctgcgggaggtgagttcccagctcccgccgtacatgacgtacaacttcttgcggcggtcgctgtcatccccggagtcggaatctccagtgaagacgtccttgaggtccccctcgggtgattgatacccgagttctcgttctcccgcggccacttnnnnntcgtcgaccctctc

SEQ ID NO: 4259 - DNA, 435 bp, Zea mays
agcagatcatctaggttcgacttcgacatggcgaagcccgaacctcctcctcctcgtgcaacccctacacaaccaaaacaaccccataacaaaagatccttccacacctccgaaaacctagataaaacaggaaccgtcggtccgtcctggatctgtgggaggaaccacagctcgcagcagctccgaggaggatggataggacacgcacctggagaagaggctacagaggtgccggtcggcgcaggtaacgatgacggctcaatgcggggtatactggcgaaggcggcgcggttgatcgacgggacggagaagccgccggaagagaagaggagatggtagcgccggccctagccgcgtcgaagtgggagaagacgacgattatgagatcggggtgggccgtgagggcattgttggcctgacctgctatatacatgt

SEQ ID NO: 4260 - DNA, 778 bp, Zea mays
ggtctgcccaccaggaggttagcatcttcagcttcatccatgttacttacctttttccacatttggtacataggcagaattcctaggaatgaaatgccatgccctttttcaccacgcttgatctttgatgtcactctccttggtacagaatgattagcggtgccaatagctaatagttgcttggacaaatcactgtatccataccctcctataagaccgatgccatgccaacattagcaagtcatgaactgacctggcatgagttttgtgggaattttcttgcagatgcagctcatcgcgactgtccggaatccattcattgtggagtacaaagattcatgggtggaaaaggtagggaaagggcccaaataaagtgtcttaaatggtcccgcgttaaataattgggtgaaagcctttccttgtcatgcatctcactcgcttaaaaaatttcagggctgctacgtttgcattgttattggctactgtgagggaggagacatgtatgtatctgttggaggttaaatagttcgttcacaaacatttacttcctagctaatgcaacctgtactggttcagggctgaggttatcaaaagagccaatggaaatcatttctctgaggaggtgcagttattgactttgtttccgttcttgtgttcagttgctgtgttacaaccgaaggattcactcttcagtgtttttttttcatttctagaaactttgcaagtggctcgtgcaacttctcatggctcttgattatctacatgcaaatcacattct

SEQ ID NO: 4261 - DNA, 569 bp, Zea mays
agaaagcgaagtgtagagctgcacttgaggcagcagaagctgcgcagaaaattgcagagctcgaggcgcagaagagattgagagcagagtggaaggcaaagagggaggctgaggataggaagaaagcaactgatgcactgaacaaaaatgatatccggtacaggagatactccatcgatgacatagaggctgctactcataagtttgataaggcgctcaagataggagaaggcggatatggaccagtatacaaagcagtactggatcataccaatgttgctatcaaaatcttgagaccagatgcatcacaggggcggaaacaatttcagcaagaggtaaatctgatgtagcaatcacagattttatcgtttgaatagttaaaacctcgtcaattatgcatatgaaatcatgatcaacctatttatatcaatggcaacaatagtatcgtgcctaaagcagttaatcacgtgcttgtgacgatttgcagattgaagtactaagctgcatgcggcatccaaacatggttctgttgcttggagcctgcccagagtatgggtgcctggtgtacg

SEQ ID NO: 4262 - DNA, 407 bp, Zea mays
atacatggatcatgggcggtatcaggcattgccaactattgatacgttacatggccctttactttccgtgtccatatttgaatttagcagccagatgaaatctcctggttaaaacttgcctgatttggtactgtagttcaatcacgagttctaacattgcgtaaaccacagacagatgtatccatagcatgaacttgaacattatccatagctagatataaagtgttataaagtttgtatcctataatggcagacctagcataggtgttggaggacagcccacatcccactgtctctttcgtttccgacaagatgttttggccgttacataatgcctgtaaggtagaatgccattgcagttgttgcatcagaaagcagccatttaacggcattgtaaagtgagtgat

SEQ ID NO: 4263 - DNA, 714 bp, Zea mays
  misc_feature (603)..(607): n is a, c, g, or t
  misc_feature (629)..(635): n is a, c, g, or t
  misc_feature (647)..(651): n is a, c, g, or t
  misc_feature (656)..(656): n is a, c, g, or t
  misc_feature (658)..(664): n is a, c, g, or t
  misc_feature (672)..(675): n is a, c, g, or t
  misc_feature (684)..(703): n is a, c, g, or t
ggttgcgctcccatgagctgaaccatagccgacccaaccttctggagttcttgtattctgaagatattgtgatctcaaacttgacgttcttaaatccaccagcctagagcatacatctggtgtactgcaggtgcaacgcaattaacttagctctgtgcataaggtgtggtttggtgaatattagctacatctgtactaaagcatagtgtctttgtattctccagtaatgtaaaggtccacaatgtgacgattgagacctcattggacgctccactcactgatggcatagttccaggtatgatttttttctaggctgaatggacctttttatgatttattttcttacaacatagatatttgaattcattcttgatggtaggctggtattatttagtgatttagttctgaatgcagcaaaaaacatcttgatctctgaagaaaactgattctccttttccatttcttgttgtacttggtagcatcaaaacctgaattatatgccctaactgttgccccatatgcttaataaataatctgaaccactcttactttgtaactcttaaaatgcactagacaacgatgtcgagaagtttttactcatcnnnnntaattatccgttcttgctccannnnnnntattcaaacttnnnnntcaangnnnnnnncataattnnnngccatgaannnnnnnnnnnnnnnnnnnntgggacaggta

SEQ ID NO: 4264 - DNA, 347 bp, Zea mays
ggccctcctcctcatctatcgtaccattccccatctgggtcttgggtcttcctctccccaccgccttgccgatggatggtccaccaccgacgacgtgcgcccgtcactcactagtcactaccactctcccctctaggtctctctcagccacgccgcccgacgtggctttactgacctgcgagctggtgctgagcgcagagtcaaacgcggcgcatctttcgcgcgccctttcccgctcccgcgtcggcaatggcgaaagagagagagagggagaggggcgtatggttgccctagggcttggcggctgcattgggatttgcagtttacaactaccagtctaccacaaa

SEQ ID NO: 4265 - DNA, 730 bp, Zea mays
cacaaatttgaggagaaaagtctggaacagctcaagcatgtagaccctttccttgacatggtaaagttttactttacaaaaacaatcatgctatgtaaaatgttgcatgagtaaaaaagttttcctttggtgcagggacaaagatatcagtgcacaactactataattggtatcacagaaaaccaaacatggtgttacaaagcatgcaagatctgtaactcagcaatcattcaaaaggaaaatggttataaatgcacaaaggaaggatgtccatctacacaatttgaatggaagtaagtgtatactgctttgaataataattaccataatgcgcactgttagtaatattaatactataatctttagaacagacgtaccagttctataaatgattgtatattaaatagatccaattgaaatgagccttcactccaatatactcttacatctatatgtaaacatatgcttattgatcagaacaaatataatactctttttatttaactaactttcagttttatactctaattcagatacaagataccattcattgcaagtgatcacacctataatctagagtttatgttctttgagaaaaaatagatcaaatataatattctttttactaaactaactttccattttcatactctaattcaggtacaagataccattcattgcaagtgaccacacctataatctagagtttatgttctttgaaaaaaaggga

SEQ ID NO: 4266 - DNA, 568 bp, Zea mays
ggaagaaactgaaagaagccatacttctacgcaacagatgccaggcaagaagcatcatatggtgtaaattattatcatggctgcctctacaatcctctgtctgacagtagtcattgcaggaactggatgatatatgccgtgagagcaactggattcttccaagatacagagtacttccttcagttaccggtggtatgtggatgataatcaccgatttttcaagttcctgcatgtcgcagcatggagtccttggaccatacatagcaggcgacagttatcatatggtgttcgatcttttacagtttgtactcctatattggcagatatgtaccaggccagtgtccaccttatgggcccagacttcaacttgagtgtagatggtgatgtgagggttacccctcacgaggcacgagactcagcagcgtccaacatgctgtctcagcttcagcagaaggcaagggaaggctaggagagcggcatgtctccacagaacccttaatgctgcatccttgtgggtatcgacttgcatgcgacaggaaagaacagccatcacagctcagaaatgaac

SEQ ID NO: 4267 - DNA, 352 bp, Zea mays
caccgaggctcttacgcactcgacgccttcaggtacgagcctcactatggagaggatgacagcgatcaagttgtgagtggatttatgtccctatccaaggtaccctttgcaaaggatcaatatttcttcagtcgaactgcacagtttcgggaacaactacaagaggcacttgacagattgggctccatgattgttgatctgaatgagttggtgatgttcttggcgagctaccctcgcatgcattgccaaccttacaacatgcatatcctactgggtaactgcatgttcggtcgccaggtggaagcagaacttgtcattaaatttctgctgcacacacagcttcatagttcct

SEQ ID NO: 4268 - DNA, 828 bp, Zea mays
cgtcttgatgtcctttggagatatggtattccccaaacactgacaacaacccatacaaccaaaatattgggatcacaattttgcagcctgaaactcttgcttgtactgtagacctgaaagcaaatgatggtgactaattcaatgcaaaaaaaaaactatgtgatttttgagtaaatgaaactgaccaaaacagtagggctcaccatgctgagaccaccactcctatgtactcctggagtcctggtgtcgttacgcgaccataattgtctttacggttaaattaaagcaagacgatgggatcagctggctttgcataatctgagtacagacatctacaggccaggcctcgaggctttccctattttgtagcatctgaattgtagcaagaattatgatcacagcggaaaggaaagaattgatgacattgtgattgtatctgaaatataatttgaacagaattttattttatttttggttgcgatagacaagtgcaagatatacttagttatgagaagtttcataagaatggctagtgacagacagttgtagaacccacaaaggtaagcacataaacaacaattaacaatagagaacttaaaggtgagatgataatgatgtttctattagagagattggggaacatctctctctaatagttccactctagttttccacctaaaatagcctaaagatgtcctgcattgagtaaatacaatgaaccctaggcctaatcatgtcttgttctctccccttttaacaggttgtacaggtaaaatacacaagcgtgcactaagaactgcaatgcttgaccctataattgcctacaaa

SEQ ID NO: 4269 - DNA, 467 bp, Zea mays
cccttgcaaaatattcttatgctacttcacttcaagcaacactgcgctatggaatccttataagtttggtgcaaggtcttggtcttggatttacatatggccttgccatatgttcttgtgccttacaactttgggttgggaggttcctgatctctcatggaagagctaatggtggtgaagttgtagtagcactgtttgctattatcttgagtggactgtaagaatgtagattttaagagtttgtttttagtttaatttaaaaatgtaccctaatattcatcaaagcttttaattcattgtagtggacttaatcaagcagcaacaaacttctattcctttgagcaaggacgtatagctgcatacagactatatgaaatgataagccgttcaacatctactgtgaaccaggatggtagtaccttgtcttcagttcaaggcaacatcgagttccgcaatgtctacttcag

SEQ ID NO: 4270 - DNA, 618 bp, Zea mays
  misc_feature (571)..(574): n is a, c, g, or t
  misc_feature (584)..(592): n is a, c, g, or t
  misc_feature (597)..(598): n is a, c, g, or t
  misc_feature (600)..(601): n is a, c, g, or t
tcaggccttgtccaggcgctacaggctgcttctgtacaacagcaagcaagcgccggcgaatggtttatggacaccggagccagctctcacatgaccaacaattctggtaacttacctatttattattcttcatcatcgcctaattcctcgcatgttattgttggtgatggatccaaaattcttgttcacggtaccggccatacctctctgcattcaccaccacatacctttgttttatcctctgttttgcatcttccccacttaatcaagaatttaatctctgtgcgtcgtttcactactgataactcatgtacaattgaatttgatccttatggtttttctgtgaaggatctggccaccaagaaaataatcatgaggtccaatagtttcggcgacctctatcccttctttggaaccagctctgcttccccgacggctcttctggcacacaccacatctgttgatgtttggcatcgtcgtctcggtcatcctaataaatattccttagctcggcttcttgatcaatttccctttttatgtaataagtctttagctgcttctcctacgtgtnnnngcctgtcagnnnnnnnnncatgnncnnctaccctttccacattc

SEQ ID NO: 4271 - DNA, 184 bp, Zea mays
tctgggacaaggtgagcgagtggtgccccttcgtttgtcctcaccttttctgtgatccgctctgtggtcactcgtggctgtggtttcaggagctggaggaggtcggtggcctggacgagctggaaaaggagctcgcgcgaatcggccggaccatctgatggattcgtccggattccggcgcggc

SEQ ID NO: 4272 - DNA, 711 bp, Zea mays
atgacaggtggtcttctgcgtctaccgcgacctcgtggcgctcgccatcctcgcccccgtcgccttcctcggcgagaggtacctgcactagcttgtctccctcctgtggctgtgaattgtgatcctccgctgggcgctgggtcgattcatctcctcccttcccttgtcgcatgcagaagggtgaggcctccgttgacccctcagatgctcgcgtccttggctcttcttggcttcactgggtacgatacgacgaatttggatcctctgctcatgctggatggagcggtttgtttatatatatatcgcaatcgcatcgcagtgatcacgctagctcttccgcgcgcatgcaggctgttcgtgaacccgctcctcttcctcgtcggcctccaacacaccaacgcttcgtacgccgcagcgttcgagccctgcgtgcccgtgttcgcgttcctcttggccgtgattgccgggtacgtacgtaccaagaccaaccaaccatatcagaggagaacctgacccagtttcttcgttggcagttcatatgcatttattattacaccctgaccaccaaactgagtggttggtagtagtagtagtatactaatccgggaagcaaggccaactaaaagctacgtacgtgtactctcattttcagcgttgaaacgatcaacgtctccacgcaacatggcgtcctcaaagtcgtcggcacagccg

SEQ ID NO: 4273 - DNA, 539 bp, Zea mays
cagattgtccatgcaggatgatactgatgatgcagattttccttttgctgtggatgatgtttatccagattcacgaccagggtatcttctgctcctacttcacctttggttgatcatgctgtgcaatagttctgcatatattaactgatctttatttatttttttgacttggttggttaatttgttaagcgacattgacagtctcatagcttggaaactgctacgctcattagtagatctttgctgattaaaccatgcaactttacaggagtagtggtggaaaggacacgggggatcaggctggttcgtcatcccataaatcccaagatgctgctgttgggtatctcgtccacctgctgaaatctgcacgtccactgagagattctacctactcatctcatacatcaaggggtgaatctaccgaagcaggaagcaccagctctttcttgtcccgcaggacatccgacgcactggaggagtttgaatctttcaaggaaacaagggagaacctgctagcacgtagtagatctcggctgcaa

SEQ ID NO: 4274 - DNA, 394 bp, Zea mays
  misc_feature (388)..(388): n is a, c, g, or t
  misc_feature (391)..(391): n is a, c, g, or t
ggcggagaagcggatccccgctggcaagtccgccggcaaggagggcggcgagggcaagcgtggcaagaagaagggcaagaagagcgtggagacgtacaagatctacatcttcaaggtgctgaagcaggtgcacccggacatcggcatctcctccaaggccatgtccatcatgaactccttcatcaacgacatcttcgagaagctggccggcgaggccgccaagctcgcgcgctacaacaagaagcccaccatcacgtcccgcgagatccagacctccgtgcgcctcgtgctccccggcgagctcgccaagcacgccgtctccgagggcaccaaggccgacaccaagttcacctcctgctagaataaggaagacaccgtgtccacctcntgntag

SEQ ID NO: 4275 - DNA, 559 bp, Zea mays
cagattccattgagcgtcttgctgtaacaatataactattatttaatgttatttgtcaaaaaggtgtacatacatctaacttttgttagctgtatgcaggttatgattggtgaatacttgggacagcatgaggagttccctcttgctgtgatgcattcctatgttgactccatgaagtttatagggttgaaatttgatgctgcaattcgtgcgttcctgaaaggatttcgccttcctggtgaggcgcagaagatagatcgcataatggaaaagtttgctgagcggtaggtttatatgtatttatagaactcaacacatttttctttatgatttccgccagtgaccctcagacactgatatgattatttgcaggtactgtgctgataatcctgagcttttcaaaaatgcagatactgcttatgttcttgcttatgctgttataatgttgaatactgatgcacataatccaatggtgtggcctaagatgtcaaaatcagattttgttcgtatgaacactgcaagtgatgcagaagaatgtgtcccaaatgagctcttggaa

SEQ ID NO: 4276 - DNA, 320 bp, Zea mays
ccttatccagaaggatattttggggcttgatatcgaagtgcactatccgtgtattacaactgtggtgcaggtattctaggccacgagcgatcccgattgctatcgcatagagcttcaattctgccaccctagagcttccttgggttgctcagagtaaatatacctgtccaaagaaccatttggcatgtactcgtatataagagcccttcttgagcgctctaaacaaaacccaaataggctaacgatgttaacatgagatgtccttccaatgcttacaacttcgttcaggaattcctccccatcccctttgcactcatgca

SEQ ID NO: 4277 - DNA, 574 bp, Zea mays
gactgttaaatcacttgcagctttctacactgatgtctcaggtgtgttactttttccttattgaatgactcttgttctcttttattggggtgattttagtagcatgattatcattggtcatacttattgctatgcacattcagcaactaatccatgtatgattgtgagcttagattttcccagcttgctgggggtttctcttttccagaaaaaaaatgaccttcttggtgcttgctatgcttaagtcgtttacaaatggtaaatttatgtgatgaaggtatcaatgcatcggtgaagtcaactgcaggggaggccatggtacatcccttggatgatattgagcataaaaaggacgctgaacaggaaaattgcccattctggtgggctcggtcaccagagaatatacttcagcaggatacttatctagcattggcgaccgtatttgtaattttgaggttgctgtatcgtatttttccaaagatagattcctttaccagatgggcatggaggaggcacaatatgtttgcaaaattgatgggagcacatgaatattttctcacctaccttgagcaag

SEQ ID NO: 4278 - DNA, 420 bp, Zea mays
tccttcaaccacctgcaaggcgaggtgcccgaccgaggcttcttcagaaacctgcctcgctcatcggttgccggaaacgaaaacctctgtggcggaacgcctcggcttcgcctgcatccgtgccccgcgtccgctgcggggaagaacagtcggagcaagaggtggccgccgctgaagcatgttgaaatggctctggcgacagtgggcgcagtcgtgttcttggcatcattattagccgcagctactcagctcgtcgtctgtaggagccgtaaacaaaggcggcagcagacgaagaggcagcccctaggagccccagcgaccggccgagagcagtacgagagggtctcttacaaggagctgtcggaggggacgaaggggttttcagacgccaacctgctcggaagaggaagctacggcaca

SEQ ID NO: 4279 - DNA, 427 bp, Zea mays
ggctgtggcggtagcaacggtcaaaaatggcgggaaggggaaggggaaggggaaggtgctagtgcttggattggggcccggcggcgggagccgggagacacaagggttcatgggctcggtccttccaagtagggtccaggtggactgagctgtgcatttttttgggatgtctctctctctctcacacacattttggagactgggacgttgtttttgtatgtattgtacgtaaatggttggattgggtacgtaaatggttggattgggggcctggaaatggagagtttgggatgagctgagtttataagtatccatcaaataccgtactattcttttatgtgtgggtgtggattgctcaacttgaaaacttggatatactagtgagcatatctccacagattttgtggctaaagattcacatgatttc

SEQ ID NO: 4280 - DNA, 409 bp, Zea mays
ctaggtgaaggcgaaggcagcaagagcacccccgcatgccgcaccaccagtcgcacgggggacttgcgcgctgtcattggctgtggccaccgcatcatccttgccatcatcagtgatgcctcgatcaccgtgtgagggacgcaacgattgactggagcccagggttttgggggaacaagtatcaatgattcatgattgagacaatagcaagcgaacaagggaacacggttgggggccaaatccgtggtggaagcctaggcaaacatcgacctaaggctaggagaagagatgaggagtatgcgaggcaagctagactgtgaggtgggaatgggattggatttgaggcgagattggggtaaggaagaggaggactggaggaggctcacggcggatgcatatgaggagagag

SEQ ID NO: 4281 - DNA, 397 bp, Zea mays
gcacatggcggctaatctcaagtgggctcctgttctagccctcctcgtcgtcgttgctgccatggttggcaccaccagcgccggcaacatcgcagtgtactggggccagaacggcaacgaaggcagcctggcggacgcctgcaactccgggctctacgcctacgtcaacatcgcgttcctcacaaccttcggcaacggacagaccccagttctcaacctcgccggacactgcgaccccggctccggcagctgcaccggccagagcagcgacatccagacctgccagtcgctgggcatcaaggtgctcctctccatcggcggcgccagcggcagctacggcctctcctccaccgacgacgccaacagcgtggccgactacctgtgggacaacttcctg

SEQ ID NO: 4282 - DNA, 491 bp, Zea mays
ttattggcgttcttgcgaattttgagccaggttatttgtggtgagctctcttgcttgttttccagttgtcgttaacaccatgacacttgctgctgaccccagattgctcatgtgtgtgatttttgtggtgggatgaaagcggagtcccgatgtgtcgctcgccaagggcttgataaaacgactgaaccagaaatccattgccattcttgtgatatcgtgtcgacttggtcttggtaagaaaaattattgtttgtgttagttcggctgatgaatggagtaactagatatcttagttgtgagcattgatatggtcgcaatcgtgattggcaaatcagcatttttgtcgtgtaagctaagtttatgtttgaagatttaggttatgcgatagggattaaattggtgtttcgtatccaatgtgtcacacgcgtatccaatgtgtcacacctggatccaagacccggacgcgaacataaacaccaagtgtgctgaga

SEQ ID NO: 4283 - DNA, 722 bp, Zea mays
  misc_feature (702)..(703): n is a, c, g, or t
  misc_feature (716)..(717): n is a, c, g, or t
  misc_feature (719)..(719): n is a, c, g, or t
ttggttgctaaccccttcttatctttccaggagccacggtctttcgatctttcctccattgcagttaaaatttcaggcctgtactttttccttaactcttgcaatcccatttctctaactgattgaaaacccatacaagctgtcaatacaagctggctgctgtcaaatgtagatccagcaagagactgcagtagtgtaattgcatctccggcatcttttgtggtcactagtgcaggccctgcaaattaatgtatgaagacaacagtgttagttgcacatcaaaattcgtaaaaaaaaagaacaaataaaaaaactttaacattttccagatgttaataaacagactacgaaggaataaccaataccatataaatccagcaaagcaagtgtcgtcctgaacaacattatgcgatttccttcaaaaaggatgacatcccaaatgcgaagtactataagagaggtaaagtcttacttagatatcgatagcacacatatggtaacagaatataacctacaaagacataagaaaattttccatatgctgatagtgagatttaaatgttagtgaaccagaaggggattaaccaatattacagcagtgaactaccaacaaaaatattggaataacacatatcataatgaaagaaccaagacactgtataaaacctgaccactttcccatggaagcatattgatgaaaanngaaagaaaccatnntncag

SEQ ID NO: 4284 - DNA, 305 bp, Zea mays
tgggtgcttgacactggggcgacgaatcacatgacgggaacacgtcacatcttcgccgagctcgacaccgccgtcaccggatctgtccgcttcggcgacgggtccgtggtcgccatcgaaggaaaggggacagtcctcttcgcttgcaagtccggggaacatcgccggttggaaggagtgtactacatcccgcgcctcaccaccaacatcgtgagtctcggccaaatggatgaggatggctacacaatcaacatcgagggaggagtgctgcgcctccatgatccgcagcaccaactgctggcgaa

SEQ ID NO: 4285 - DNA, 388 bp, Zea mays
tgtcgttgaagtgcaagacaacgactgtggtgcttcgtgaggggtacgagagaggtaagctcgtggagcagcatcccctggctgctgtgagggacaaggtgcattatgtgatgcgcactggagtgctgtaccgtggaaaaggtttgtccaagcttgttctggatgaggatgtcactgaggaagagggtgcactgaatggggaggaatttgaaggggagggaatggatggggatgctgatgtcgagtgcttcagaatggagattgtggatgacgatgggtctgctgatgatgtggatgatgaaggttatagtgatggttgacatggactgatgactcttgccttcttgatttatgttttgcatttgtggcttcagtcgtgaattacagt

SEQ ID NO: 4286 - DNA, 434 bp, Zea mays
ttactccagatcgatttgtcaacgaatcagctcaccggagatatacctgaagatttcggcaatctcaagaacctcacaatactgtttctgtacaacaaccagctcagcggcaccatcccggcaagcatcgggctgctaccacagctcaaggatatccgcttgttccaaaaccagctgtccggagagctcccgccggagctgggcaagcactcgccgttgggcaacctcgaggtgtccatcaacaacctctccggcccgctgcgagagtcgctctgcgccaacgggaagctcttcgacatcgtcgccttcaacaacagcttctcaggcgagctccccgcggaactcggggactgcatcactataaacaacctgatgctccacaacaacaacttctcaggcgacttcccggagaagatatggtcgttcccgaatct

SEQ ID NO: 4287 - DNA, 359 bp, Zea mays
tatctctcctcctctcccgtattggtgctcgctctggagcttatctcccaccgccgatcgctgatcttcctggccgtgccgctcaacgtgtggagaaaaaaaaaatcccaccgccccagccaggtcttcttccccctgcgcgcttatcttcagccgccgttcagtgttcgtgggacagaaaaatctggccgtcgttcttcacgcgcagctccatcgtgctccattttctctggccgctactctggccagcgttctctgcttgcttcagctccagcgcccagcctcagctcgcgcccaagctcctgcgcgtctctcagccctgcgcgcgagctcagcatctccctgcgcaccacgacatc

SEQ ID NO: 4288 - DNA, 495 bp, Zea mays
ggcgagcccggggtgagttgagttggccgtgttcctctccattcctttttttacgctttgcacctcgcggcacgtggatttcgcggaaccaacccccacggcctcccttttcgttgccgtaggagtcgtggacgaagccggtgtcggtgatcgtcgccggcctgctggtgcccgctgtgatggcggcggttgcggccaacggggtgccggagccgctgcggtcgtcgaggctggccaatgggatctttgcgccgtggatcctcttcagcgccgtcatcatcttcgctcgtgccaggacgcggccaagggctccatgaatgaatctctctagagagcacgctaccgccagtttcttatgtacttactttcccatatcaaccatgttagaatgtaggaatttggtaacgattccaattatcaccggattttgtttgtgtttgctgacggcacgttatctgaaatgctatagattcagactgtcaccgtagttccttg

SEQ ID NO: 4289 - DNA, 375 bp, Zea mays
ctatctttcctgaaaattcataaaataaaatccagtaattcttcacctacaggagcaaagtgaaagaaacattgttcagtgtgcattgtggccctttgcaagtatgcttttgctacgtccttgattgattctctttctttacacatgttgatcatggtaaggaatagcctggtttccggattacgtatcccagtggtgctatccactagtagtggataactgtaccttgccctattaatctgagttgatgacgattctaccgtctacttcaaattcacactgtctaaacaatgttttgcacattcacttattcataccagtaaattcagccttagggctggtttggttttgtgacaaagggagattgaaggagaa

SEQ ID NO: 4290 - DNA, 362 bp, Zea mays
cccaggcgcgaacttgcgcgcgaacatgtgtgagtgtgagtacgtgccgttggacggcggcttcctgaggtccctgatgaggtcggcggacacctcctccgctcggtacgtgcgcgggtggccgtcgaaggagccggtccagttgacactggtgagcgagaacccggcgcacccagcggggtccagcatgtccagcagcgtcgggaagtagtgctcctccgggtagcacgagcgctgcctctcgacgaggcagggcagccggaacttgccccacagccgcctgtccccgaccaccgccacggcgtgccgtctggcgagcacgaagaactgggacccgacgcggaagctctcgaacggaacct

SEQ ID NO: 4291 - DNA, 434 bp, Zea mays
cgccgtcgtgtccacccacccttcctctaccggagagctggacgagagtacagtactgcagcatctcctctttattactcgtatacgagtattaattgggctaaccccccgtgtgataacggatgtaggctccgacaagtgcagagcagcaccgcagtgggggaccgttggaagttggtggccctggccatggccatggccggctcgacctcactgtcactgaggtcactccattcaactcccccaactaaccggaattcaagttgctgccagtgacccaaatggcctcctgctttcatctagagtagaccattcccaagcgacttgcactttttatcactcgtacccctcgtacggcagcagcataatctaatggaataaatactcctgctatatatattttatatataataaggctatcatggattgcggta

SEQ ID NO: 4292 - DNA, 381 bp, Zea mays
agctgacacagatatcgaggaccaggagaacaatgcaattggtgatgattacaatgatgaccttatggatgaagaagatgacgactttcttgagaaccatgttatagaagtaagatggagggagagcttaactcgaatggattatgatcatcatctgagattttccaggggtcgtgcagactccagtggttttattgatatatcttctgagtcatttcatggtgtggggacagttgattcatttgatctgcatcgttcgtttggtcttgaacggcggcgccaaatcggaagtaggtcgcttcttgatcgaccaaggaccgatgggaatgcctttcttcatccactgcttgtcaggccagcacagtctagggagggaactaa

SEQ ID NO: 4293 - DNA, 1311 bp, Zea mays
  misc_feature (277)..(278): n is a, c, g, or t
  misc_feature (303)..(303): n is a, c, g, or t
  misc_feature (319)..(319): n is a, c, g, or t
  misc_feature (352)..(356): n is a, c, g, or t
  misc_feature (363)..(363): n is a, c, g, or t
  misc_feature (377)..(379): n is a, c, g, or t
  misc_feature (392)..(395): n is a, c, g, or t
  misc_feature (397)..(397): n is a, c, g, or t
  misc_feature (422)..(426): n is a, c, g, or t
  misc_feature (444)..(444): n is a, c, g, or t
  misc_feature (548)..(551): n is a, c, g, or t
  misc_feature (564)..(566): n is a, c, g, or t
  misc_feature (583)..(585): n is a, c, g, or t
  misc_feature (602)..(602): n is a, c, g, or t
  misc_feature (620)..(622): n is a, c, g, or t
  misc_feature (631)..(631): n is a, c, g, or t
  misc_feature (655)..(655): n is a, c, g, or t
  misc_feature (944)..(945): n is a, c, g, or t
  misc_feature (1113)..(1114): n is a, c, g, or t
  misc_feature (1245)..(1251): n is a, c, g, or t
  misc_feature (1298)..(1307): n is a, c, g, or t
gacctccacaagctgacaaaaacagtggtattgccgacaatttcagctctttgttcatatcattttcttggttcccatgacaaataacttgagttctatttccatatatttaattgaagtgtttgtcatgatcaactcttgtgctggaaacatactgctcctattcttgtggtagtgaatgcatctagggatgtatctctgttatccaaatactacaacctgaaagatatttccagttactccatgcgaatttaaactttttagttcaagttatganntgagttgcttatatatgggagtagntttctcacgtgtaccnataatcataaagttcctggatcgatagggccgnnnnntgcggtntatgctacctatgnnngatttttacatgnnnngnacaaaaatgaccccacgtatctggnnnnngtatctgggtcgaggacnatgtttcttgatcgagtgtcgctaccactgtacatgtttcttgtgattatgcgtgtacctatcatgtgtgtgcgcgcgcactatcaccaccactaatgatgccnnnntatccaaactttnnnacacacaaccacaacannnccttctaataattttcnatacagcaagtcttgagnnncttaggtancttaggtgtcttaagatagaactngtaccaacatgagcattaagggtgtgtttggtttgaggaatgagctggtacattttctcactcctcaattttttatttggtttgtggaatagaatgagttgatccatcaccacaacattctttataagctaataattagtatacatacgaggaataagttgattccaccaaaatttatggaatgaactcatgatgtatcaactcatgaagcataaggtgactccacaaaccaaacacactgtaagttgacgcggtggaatgtttgggtgatatgcggccacaagcatannaagtaatttctttttgttgtttaatatgatcttaactgtgatgctgaaagctattgtgattttcttgacatttgtaaacatacctctaacatgttgttcacctataattttccagagaagcagcttgcgaattccgtcaagcagaacagatgcgggtgcaccattctnngataagacgcctgcttgatgttgtacaatctgtgtagtcttaggattttgtatctgctttgctgtgttcacacaagcgtgaattcattttgatatccagtccttgaagccattcgagtccagaaacatacnnnnnnnaaatccatcgaatatgaaggtttctggatggtagatttggatcgtcnnnnnnnnnngtga

SEQ ID NO: 4294 - DNA, 356 bp, Zea mays
ctccttgccgtcttccacagctttcttgaactgcatgccgccggctggtggatgctgcgcgcgcttgaattccggtcgatcccaagaggcgcagttcaataaagctgtgggaaactgcagagagaggccaccagccgatccgatcgatcggatcggatcgcggcaccagatctcgaccaccgccggaactgggcgggggcgaagcagatgatgcggcgattaattaaccggcgtagcagcggctggggatctacctgcatcacgtcgatccacccgcggtagatcgatgggaccgtcacaacaaggacaaggtacggattaggtttcttgtactggtaggaatggatggtggttac

SEQ ID NO: 4295 - DNA, 882 bp, Zea mays
ggcaatgggtgcgggttggatccaacctcacttctctagattatgaagatacgtctgtccatagaattgatcatctccttcaagagatggatgcagcaaaattatgtagaatggattcatgtgatgggcaatataatttgtgtggcacggaatcaacatctggatcacttgcacaaaacattaaatccagaaaaaatgggggtgagcatggttctcagcaactgcaaaccctggatcgtgttgactctttagatggcttccagaagcatgacagtgaacattctcttttaaaaacttctcaaggtaggccgaagtctagttgggaataagttactttggtattcgtattacctcgatgaaatcatgaaaatagtacttcatcccgaattctaagttgattgaacttttctaggtacattgattttgatatgcacctagatatacagtatatgtatctagaaaagccaaaatgatttaaaatttggaacggtggaattagttgataagaaatactgttatatgtatctagagaatccaaaatgacttacaatttggaacggagggagtagttgctaagaaatttgaatagttcgaatgcttatagatcactattctagatatacaaatgctttgttggcccctcacatattcattattatattgatccatattgtgccatcttgtgttatcatgtagaatttgcaagttaagccagaatataagtacctatgaattctttatctctatagctttctatatgcgaaaatactgttttctggccattcatctggtattagacattttcagtttatctcacttttgatgatttacttacgtgagctttcctttcccacaagcagtatcgccaaagatacagcatgc

SEQ ID NO: 4296 - DNA, 499 bp, Zea mays
tcttataaatgaggatcctcgggattttcggtctcatctttgccaggtactctttgatattttgctgagtttgatttgtcctgaaataccttttgttttgactttgaatgtgcattttgcctggctatggtgttggttctgcagggcattgtgtatgcacttttagacagaaaagaagacgcagatatgcagtttgatgtatacagaagccttgtgccggatgaattcccagataagagttttatcagtgatgttatactggcggctaggacggagtcacatgatcggctacaaaaggaatttgactctgagtttcaagcgaagaaatgatacattaagttttgtatagatgaggcccaaatactcctggtaggctaaatggttgcatggtaccaatcttacaaataaaacataacacagtaaaagcatagtgaaaagaggcgtctcttatcaggctatcaccaattttcctcatttcctctccctcttagtctctgca

SEQ ID NO: 4297 - DNA, 698 bp, Zea mays
agaggttcaagggggtgatttgcggtctttcttcacattggttagcaatcaaatgttccatctttgacaaatattctacaaatactactacttctctgatggccatgctcatcaaatttcaggttatgacagacccagatgttccaggaccaagtgatccatatctaagggagcaccttcattggtaatattcagcatttcttaccttagtagggatgttaaatagcatatgttgctcaggaagatagaaccatatcttgcatacaaaattgcatgctttttagcacttaaatgggagtagtgtgactaaatggcatccttcacatttgcaggatcgtgactgatatacctgggacaacagatgcctcctttggtaggttctgctgaatcaggcttagtctattccatgttttagttgttctttgaattaataacaattcatctgacaattgcagggcgagaggtcataagctatgagagcccaagacctaacatcggtatccacaggttcatttttgtgctcttcaagcagaagggtaggcaaactgtaaccgtgccatccttcagagatcatttcaacacccggcagtttgctgaggaaaatgaccttggcctcccagtagctgctgtctacttcaatgcacagagagaaactgcagctaggagacgttgaaagttccagctcttattgtccacct

SEQ ID NO: 4298 - DNA, 1524 bp, Zea mays
  misc_feature (1119)..(1119): n is a, c, g, or t
  misc_feature (1519)..(1519): n is a, c, g, or t
gggaacccgatcgatgggaaactgctgtctcgagaggcctcgtcgcggtggcagcggcagtgcgggctccgtgcattacgccaggacgaaccccgtgtgggtggaggacaggagggaggaggcgtgcaagggcgagggcgagggcgccggccacgcgccggcggctgccacggagatgaagatcaggatcacgaggaagcagctggaggagctgctgcggcgcgtagaggacggcaagcacggcggtggctgcggagtgcccgtccaggacgtcatctcggagctcctgtgcgtggccagcactagctccaacttccggcacagggaggaggggcagtggcggccgtcgctgcagaccatacccgagtgagacggaccgtggtctgattgacgatcggatcatgttacttgaaatgtatgacatgctttatctatgaatattcatttgtccgacaattgcatacagaaactttacctactatgaaagcacataactctaacatcggtctccacagcgatcatttttacggtcttctcgccaaagacaacgtcatctcggttcggagtcatcacttcaaagatcatttccccacccggtagtttgctgaggaaaatgaccttggtctcccaatagctgctgtctacttccatggcccccagagaaactgcagcttaacagaccctgaaacctccgcctctatccttcctccttgatctgtgcattacgtgcagttatttttcttaattatcctcttcttattttcttttcactctcaactcttttctctcccatcacatcccttgctcctcaactgatctctaatttctccctctcccctccctaactcccccctcctcctctttcacatttctcctttcttctcactcctctctgtctcacttccccatatcctcccctatccgacttcgatcaaatagagccttccggagaccacccatgaggtgagtacgcgctatcactgtctcacctcactcttccttaatttcctccctctcccttccttttcctttcatctcctgcccgtttccctcggttcctccttcccttgtctcctcctttttcttacctccttcgttttctctcctctttattccctnacccccaccccactttgtccacgacacacagcatctctgcctcactcccctattccgtcctccgaacttaccacacacaccaaacctaccacttctcttaccttacacttctcattctaccatatttttactcccctttctccctctctccttactctttattttttttcaatcctttactctccttctttctttcctttaccgttccctcactactccgcctctattccttatctcattacttcaactactccctcccgccacgaccaagctctatcctcagatgatctactctggcacagcttctgctcacacccagcatccctgctctttatcctcgcacaccgtgcctacctcgtcatgacactttgtcacttgctcaacaactccgtagacactncaccc

SEQ ID NO: 4299 - DNA, 349 bp, Zea mays
gggtgttactgttgatttaaaagaaggtgctagattcgtcatcacaggcatcagcattcccaatgacccttccaagttgtccaaagctacaatcttgtcactgcttggttgcatcaagagctacttcacctttgcagctggacctcttaagggcttcaaggaaaatatgtgcaagaagaagttgttgaagacatccatgggatatcagtgtcctaatgattgtatcctctttgatccaaagcagtcttctgtctgcatggaagatggccctttcatagatgaatcattctatggttcagagatagcctcattcaaagatgctcttacaagaatcggagtaaccgtggat

SEQ ID NO: 4300 - DNA, 475 bp, Zea mays
tgttggagcagccataaggccgacagtagaagtggcaccgaatgtcgaagccatacctgtgcagcaggagccacattagcacgagaaagcaatcgaagcaagcatgtaattatgtaacccgtaatctgaccacccatcgagcaggaactaactaacaggagcacattttgacccagtaatgggacacaacatccttcgccttcgctgcatctctaagtctaaacatcatgttctaactacagtggcacgccagccacacgagtacagaccccgcgagattcacgagctccaactgtccgcagcattttgggtgaagctagcgctagacaataactccccatcccatcccgtaccagatccactcgccaccaatctgtgtctttctacgagaacgaacccgagccaacctcgcgccgaaacccatgacccaccggactggagctgcgcggcgcgggcatccagttccagttccacc

SEQ ID NO: 4301 - DNA, 896 bp, Zea mays
  misc_feature (172)..(174): n is a, c, g, or t
  misc_feature (241)..(269): n is a, c, g, or t
  misc_feature (641)..(641): n is a, c, g, or t
ctggtctactagcacataaataaagtaaagaccctatcattgaccggtatgctttttgatcaacggacttacctcctttgttgaggtcggtgtgtccgtcggttcccatcggagtctttgcgggcttggcgtccttcatcccaaaccgctttagcaaatcttgcgtgtactnnntttgggagatgaaggtgccgtccttgagttgcttcacttggaacccaaggaagtagttcaactcgcnnnnnnnnnnnnnnnnnnnnnnnnnnnnncatccccaccacctcgcaaaagtcgaggatagcaatgaaatctggctggcgatttctttacttagcatctcggtgaagtgccggtataaccatctcccatacaatgatacaactatacaagatgcatgcgtggagtgggggctgctgctgcccatttcccccctttaatttgcttgctgaggaagatcaagttgcattgaccgggagcacgccattggtggtggtatgctgcatcgctccagcgacagcgaggtgtaaagggggtggagattacatcgctggagaatcgatcgggaatccagacgcctttcttttctagtgaaaaccgatgcatggctttacaaaatgttgggcggcatatactactaccangttggatcggctttcccaaccttgaaagcattagcaattaaaaagtctctaaggcattcataccatgctcttggggcttgcttaagtccatagagcgccttatagagcttacacacgtggtcggggtaccgttcatcctcgaagccagggggttgctccacgtacacctcctccttgattggcccgttgaggaaagcgctcttcacatccatttggaacaacctgaaagaatgttgggcggcatatactactacc

SEQ ID NO: 4302 - DNA, 412 bp, Zea mays
cgaggttgaacatgtgtgacgcctgccttgctttcaacggatgatggtccagagcagaggcattgtagttgccgtaggagcaagcagtgcccagcggtcaagctgtactgcaggccatcaataactggatcaccccttttccattgaaggagttcccaaggacaggcaggaggcagcaggcagcagggagtggtggtggcaatgggaacgcaaatgcagagagaagaagctgtaccttttggttgggttgggttgggttgggtgtgtcgtgttgacaaatcatcccaattgttagacagattgatcctgcgggtggtggatgcgatgccggtacgttacattcttattcttatcctgccgcgatccccgctggaaattgcgtctccctggaacgcctgttagcatatacctt

SEQ ID NO: 4303 - DNA, 1028 bp, Zea mays
  misc_feature (960)..(962): n is a, c, g, or t
  misc_feature (994)..(994): n is a, c, g, or t
  misc_feature (997)..(1003): n is a, c, g, or t
caatccaataccaaatcagaaggaatattagaaaaggcttcacttgttaaatatgtcaaggcattcatgtactgcaagaatagagggggcagagaatcccatcagataggtgctgtagaatgtggataaagcctgaacaagatggtctacttgcaaaactgaagcagagaaagtgtaaaatatacagttcagaccactgaggctaaaagaacaaatctacattgggtaaatgtcaacattcagattttaaaacataccattttaacattgttatggcagtccagaagtggtctacgagcaaccagattgtaagccaaacatccaaagctaaacatatcacaagcagagccaactttagaatctctactttggaccaattctggtgcagtatagttcaacgatggttgaagaggtaaagctgtatcctcgacatcatagtcctagaaagaaaacaagcagataaattgttaacaggtcagggcattggaagcaacaaaaaaaatcacaaaacgtatcttgaagacacaaatcacagaagatgtcaccaaagtacttaggaatgggtatgatgaagcgctaaatatgcttagttgaccattgataacttaacaatgtagcggtctaataatgactaacataggttcgtggtgcacatcgtatatgccattacaaatcccagcagtagcaatgtgctaaacacaatcgccagttcgccacatcacagtagtggtatattcttaacttttatatgaaaagatcagttcaagacaagaagaaactctgccagaaaaatatgtatcatgcaaaactgtgtgacaatttagaaattaaatgattgcaaaaaaaagaacaatataagttcagtggaatattttctgttacagcaaacttcaaagggataatacagattagtaatattcccaaaatatggtagaagaatctgcaaattaaagccaccannntgacaaactaaatgtatatcacttactaaccnaannnnnnnatagttgtgatgaagtcaaactcaa

SEQ ID NO: 4304 - DNA, 389 bp, Zea mays
ccatgccgccttctgacgagagcccgcgtgactcggggtgtgctgctaggcgtgttgcagatttggccgggaagcgatccttcttcaccgccgcagccgacgatggcaatcccgttacaccctaccaggcacgggtggttgaacttgaaacacccgagacagcagcagcagcagaagcatgagtgtttgaagcatggtttcgatcagacagcttagcttggctccccttcgtcatgagtgtttgaagtgtctgcttacttgagcttgcatctaggtgagaggccttttttgcagtgtgccactacataatctactgctacaatcgtatcatatctcatgtcctatttttttttctttccccttgagacctggctagcaattcatcttgt

SEQ ID NO: 4305 - DNA, 354 bp, Zea mays
ttgggggtataaaatttctttcttatgatcatccaaatttaggtgttactcttctctatctcactttagtttccctctctctctagttttctctctctctcttttaattagagttagttgtattagtgagggattatttattttattttgcccaaaacatatgagtcatggaatgttgcatcatattgagcctaaatattctttgaattgttgctcatatttgatttggtttgaatttgaaacttgatttgaatttgaattgaaaaccctagagaaaataaatagaaaagcaattagaaattccctagaaaatggaaagccgaattcggcccaaggcagcccacttagcccagt

SEQ ID NO: 4306 - DNA, 353 bp, Zea mays
cacagctggtgatcagcctgagtcaagaacgaaccgcgcaaaacagtagtgacctttgctaggtggtacgggtcgatagggctggcccgtagcacacagcaatggcggtggttcgggtattgactcagcctccaattgttctgggttaaattttgcattttggacgtacgactggccgggcaatgccatggttggttttggtggttttagggagtctggagtcatcggtgctttttgttggctggctcgtggtttttggtatgatgtttgcttttgtaaccatagatgtaggagagccccccttgatgatacagtcaatatcagacaaatgcagcattgtatcgtgagattca

SEQ ID NO: 4307 - DNA, 575 bp, Zea mays
cctgacctgagtggtttcttctttgcttggtaaggaacccttgctttcttggatggatctttgttctgcggattgtctaaatctcaattttcttcttcctccacgcaggtagtcgcgcatatttggtagccgcgtccgcgtgacgtcgtcggtgcttgggtccattcagacattgttcttatttgatcagtacccctatttagcgcctgcaagatcgagatcgatcttacttgactccataagatgtattggggatttggagtgccttgtactccaacttaagactgggagtgaacccgcataccccaagcccgcccttccaccgaactgaactagacatcacatcctcaagcgtcatcaattctaatggatgatgcagcagaaaatattcttgcatcacttggccgtgtgcatctcgttgatctaatggcctctgaagcagattgcagcaacgaaggagcacgagaactcgaccatcaccgaatcgacagaactctacagatggtcagccagcgaagacagcaacggtgtgctcgccaaggacagcgtcatctctgttgcgagtggaaaggtca

SEQ ID NO: 4308 - DNA, 230 bp, Zea mays
gtttcttatttctgcatgtgtaccattagacaggttatggtaattgatcatcccatcgcgttttggttcatggccacgctcctttttgccatattgaacacactcgataaatttgagaaccttcaggtaggcttgtagtggtataaatacctacaaaagggtaaaaccgattatttaacaggaaaataacacaaaaaactattaggcataaaccagcaccagcctgttgc

SEQ ID NO: 4309 - DNA, 365 bp, Zea mays
gcctgccgtggcggagcggtacgagcgccgcgagaagctgggcgaaggcatgttcggcgacgtgtacaaggcctgggaccgcgtgcacgaccgcatcgtcgccgtgaagaggctctcggggaggaccgacgaccgcttcgtgaagacctccatccccgacttggcgcgagaggtcatgtccctcgcggcgtgtcgcggccacccttccgtcgtacagctcctggcgacgcacgtcgacggcagccgcgccgacggcgactgctacctcgtcacggaacacgccgggcctatgaacctgcgccagtacatggccgtccgtcgccttaacggccagccattcggcgaggacgaggtgcgcgacgtta

SEQ ID NO: 4310 - DNA, 392 bp, Zea mays
  misc_feature (383)..(386): n is a, c, g, or t
agtcaccagcagtccagcactggtaagaaaacaagaggccaagaggatgtgccaggcagtgcgagtgtgcgacacgtccgaaaaaccggtcatcacagcagccaaaggcactgtcagcttgcacacacagtgaaaagatcatccactaaacaagtggcgatgagcccacaagcacaaaagtttgcgagcataagaattggactttgggttatgctattctgattgtgcaacagactttagagttccaacaaagcatttgcaaaccgatgctttataatagagatttattttgacataatttgtgagatatcgaagtcgatgaatatatatatgttggtcgttgtcgtgtaatcgttgtgcacaaacattttgtaagatatttnnnntgccgt

SEQ ID NO: 4311 - DNA, 379 bp, Zea mays
gctcagaagtcagaaaccacacagcgcgatcgatcgatccatccatctttggatccttggcgttgcgtcagcggctttttgtgtgtgtgtacaagcagctggcctggtgctagctagcttccagcaggaggagcaaaaccgcccagtcgatcagctccaaaacagataccagggcatatggcagatactactgacgaccgtgcgcgaggaagagggcgttccggtggacggcagccggcagccggcaggcagagagaggaaggatcggatcgagagagtgacgacgacctcggcttggaacaacacgagctgggcccagccgtctcggaagaaaggcggccttggatcggattttgatgggggtggcgctctttaactt

SEQ ID NO: 4312 - DNA, 346 bp, Zea mays
tacttcctgtctagtgtctccgtcgaccgtcgctgccagccagccacagcaagctccgcacgaccgccggtccgccgcctaccagagcgagctcatctctcagccgcgccggggggcctcctcgtcacgccggcgcagcccgcgcttcgttccaccgtagtttgcccggccgtgctggggcaaaaaaaggtccgggcccacgtgttcccagacggagcgagaggacgtcgatcggtcaggccatcagggaccagaccagacaaagccaaaggggccgcggatcggtaggcggccggcgcggatcggaggaagaagggaggaggaggccatccagttggagtacttg

SEQ ID NO: 4313 - DNA, 755 bp, Zea mays
  misc_feature (746)..(750): n is a, c, g, or t
attcgggcgtggtgagttgcttctcgtcctcggttgagcgcacgagtttatcctgcgcgtttcgctgtaacttctcttggattttgctccggggtttggggtttgaatcgattggggtgatctgatctgagatgtgatgctgcaggtttgtgccgggagggaaggaatccgtggggctacagccccatccgggctgagggttgaaggaaccggccctttggtgcgctccccccaatcgaggaaaagggggcatcggatgctttgttgccttcggtgagcaatttcactgacttttggttacaatttactggggatttgagtaaattcctgacccatcgctccaaatgatcagaccgtcgcaggctcgcagcatccgttacgcgattgggaatggaccatcagcaggtcgaaatgactgttctgtgacactttccccccaatcccatcaatcccggtacgcacctcctcacccgtttcacctatcatctgtttattctgtacccagttaactgaaggttttccaagttttgtgcagacttgatttttatttgaacacaagatgggactgtaatctcggttgctgttctgtgcctcttaggttttcctccgtcctggatttggaagggaggaactcttggatttctgtctccatggcgcacgaattgtagtttccagaatcttactttgtagatttagtgtaaataatagtgatagcagctggtgacgaatctcgggtttccttagtnnnnntcacc

SEQ ID NO: 4314 - DNA, 576 bp, Zea mays
ttggatctcgtctcggcctccggcacagagtttgcgcaagaagacgacaacggcgatgaggacgatgacggctccgacgatgatgaggaaagcgactttgacgaggacttcaacgacgtggttaggatgaaccctcaattgtctagaccccagagaggttgctggtttcagttgtctagactccagagaggttgacctagatgatgtatgtaaaaacatgcaggagggtgtgttttcggttgatgaggacgacgaagatgacggagaggaagaggaggaggaggaggacgacgacgacgacgatgacgaggacctaccaagctggtccaaccttgagaccgtgaattcctgccatccactgtactttgcaaggatgattgtagaggtacacgatcgaagtttggcagcatgtcttgtcagcaactgcactcttaactaaatccattattcccagactgcaaccaagtctagcatagactggctggaccggccacctgcaagccttgtcgtcgagggccagctgaggcctgcctttgctgaggagagcaccatggttgccaagcatatatcaagtga

SEQ ID NO: 4315 - DNA, 1486 bp, Zea mays
  misc_feature (590)..(590): n is a, c, g, or t
  misc_feature (620)..(624): n is a, c, g, or t
  misc_feature (628)..(628): n is a, c, g, or t
ttgaagcacttcaggttttgaagcacttcaggttactcccctgcagccaggtcaatcaacaaggacacttttacaaatgaacacgttccagaatatcagccctggtgcaccaaactcgctattacaagttgctgtgaaaaataatcagcagccagtgtggtacttcaatgacaaaattccactgcatgttttctttggtgaagatggaaaaatggaacgagctagttttcttgaggtaaaaagcgcgatcaagtctgtatggttttgctgtttcttttttcttgtttgggcaatcaaagcgagtgatggtgcattgcccatagaactacttgatttaagtcacccatgtttcgttcttccatacgaaatttgaagtcattttatctgactgcaggcctggaaatctttacctgatgacaatgaatttacaaaagaattcccgggctctgtaatcagcagtatagatgctacagttgagcgccttgcagcatcaaatgtgttctttatagccaagcggaaaaatgcaaacatggatgttctgtatcttccgcgaagatgccccgcggaatccccttccttatagagcccantctttgggggagagtcaaggcctggcgggnnnnnaggnatcccttttttcccgtttggcttataaagaaacacttttggatgctggcaggggctccagtgtagcatttatttctgtgattaacagagcccggaattttttttgaaatctctttggttatcgggaagaattcccggcggggcccaaaaaaatggcttcaaatttgtatgggagaacaaaaatggggggattaaattcgggggatactatgggcaatggcactcctttgtttgccaacagaaaaaaaaaaaaaaaacaaaaaatggatcggttttttcccccgaaaaaaattcgtttctttttcttttttttcccaaaaaaaaaaaaaaagaggaattttttttataacacaccccgccgtgggttttttttttttctctcttatataagaaggggggggggggggcggggggtaaaggggggagcctttctctttaaaaattgctttgtttattggttgcggggggggggaagaaaggaaaaatcaataaaaaaaaaaaaaagaaccacaatttcgacccaaaacttatccctttgctctattatttcttttctatgcaaagctctaataatatttatgtctcaacttaatgctttttttctatttacattctctccatccgaattagcatgctacctcaacattgaactcgcccctcacttcaccttgactacccacatcactcatgctcttttcttcatctttacttaactaaaaacacacgtatttacgtaacccgcgtttactgcttatacggcgagcacacgtacaccgcaaccttccatacgctatgtccgcaccaactctgtcctctggcagcctcatccacctcccgcgtccgccggtcaacgcataca

SEQ ID NO: 4316 - DNA, 363 bp, Zea mays
atttggggttcaaatctttccatttgcttgtatcgtgtatgttatatgcattcatttcatgccacggatcatgcgttccgaggtcatgaggcactgcacctttagccttgcggattccggatgtaccatcagccaaaaattttactttgcgccgatcttcatacagcacagcattggcaaaatcacgttggatactcaactctatttttgggaacaaatcaaggagagcaaaagatgcgtagaaatgcacatcatatgtgttccacatgatgtattccactccttctagatacaaaaacttgccaacgtgttcagggccatcctttgaaatcaagtaaggaattggctcttctgacttgagtc

SEQ ID NO: 4317 - DNA, 397 bp, Zea mays
  misc_feature (387)..(389): n is a, c, g, or t
actcatttagctcatgaccacccgacggataagaactcagtagctcgtgtcactaacttctatctgttatccttcaaatcagtgactgtatgttttcactaggcccaagttaaccttgtacagttttgaaccaaaggtaggtttcgtttggtagacctgtttaattacaggtatactgagatccattgcctatatatatctatggaagtacactgacattgaaattattcctccacagggatgtttcagcttttcacctgatacatgggtgtcactcatatccatgaccttggcatagtttcctattccttttccttttcttctgaaatgatgtaatttgtggggcgccagcatcttgtctcctagagtaatattctgtttgcagtnnnaacgtcct

SEQ ID NO: 4318 - DNA, 1357 bp, Zea mays
  misc_feature (450)..(454): n is a, c, g, or t
  misc_feature (458)..(711): n is a, c, g, or t
  misc_feature (714)..(742): n is a, c, g, or t
  misc_feature (744)..(761): n is a, c, g, or t
  misc_feature (765)..(833): n is a, c, g, or t
  misc_feature (846)..(860): n is a, c, g, or t
  misc_feature (862)..(869): n is a, c, g, or t
  misc_feature (871)..(872): n is a, c, g, or t
  misc_feature (874)..(874): n is a, c, g, or t
  misc_feature (876)..(876): n is a, c, g, or t
  misc_feature (881)..(892): n is a, c, g, or t
  misc_feature (894)..(899): n is a, c, g, or t
  misc_feature (905)..(913): n is a, c, g, or t
  misc_feature (917)..(922): n is a, c, g, or t
  misc_feature (926)..(927): n is a, c, g, or t
  misc_feature (929)..(943): n is a, c, g, or t
  misc_feature (945)..(950): n is a, c, g, or t
  misc_feature (952)..(954): n is a, c, g, or t
  misc_feature (961)..(966): n is a, c, g, or t
  misc_feature (975)..(986): n is a, c, g, or t
  misc_feature (989)..(1000): n is a, c, g, or t
  misc_feature (1003)..(1008): n is a, c, g, or t
  misc_feature (1016)..(1017): n is a, c, g, or t
  misc_feature (1020)..(1023): n is a, c, g, or t
  misc_feature (1025)..(1028): n is a, c, g, or t
  misc_feature (1031)..(1031): n is a, c, g, or t
  misc_feature (1036)..(1059): n is a, c, g, or t
  misc_feature (1064)..(1067): n is a, c, g, or t
  misc_feature (1070)..(1073): n is a, c, g, or t
  misc_feature (1075)..(1075): n is a, c, g, or t
  misc_feature (1077)..(1085): n is a, c, g, or t
  misc_feature (1091)..(1098): n is a, c, g, or t
  misc_feature (1100)..(1102): n is a, c, g, or t
  misc_feature (1105)..(1111): n is a, c, g, or t
  misc_feature (1114)..(1116): n is a, c, g, or t
  misc_feature (1119)..(1119): n is a, c, g, or t
  misc_feature (1121)..(1121): n is a, c, g, or t
  misc_feature (1123)..(1130): n is a, c, g, or t
  misc_feature (1134)..(1144): n is a, c, g, or t
  misc_feature (1146)..(1148): n is a, c, g, or t
  misc_feature (1150)..(1184): n is a, c, g, or t
  misc_feature (1187)..(1187): n is a, c, g, or t
  misc_feature (1192)..(1192): n is a, c, g, or t
  misc_feature (1194)..(1194): n is a, c, g, or t
  misc_feature (1196)..(1197): n is a, c, g, or t
  misc_feature (1200)..(1201): n is a, c, g, or t
  misc_feature (1203)..(1206): n is a, c, g, or t
  misc_feature (1210)..(1211): n is a, c, g, or t
  misc_feature (1220)..(1220): n is a, c, g, or t
  misc_feature (1224)..(1226): n is a, c, g, or t
  misc_feature (1230)..(1232): n is a, c, g, or t
  misc_feature (1234)..(1240): n is a, c, g, or t
  misc_feature (1247)..(1250): n is a, c, g, or t
  misc_feature (1253)..(1253): n is a, c, g, or t
  misc_feature (1255)..(1257): n is a, c, g, or t
  misc_feature (1259)..(1259): n is a, c, g, or t
  misc_feature (1261)..(1270): n is a, c, g, or t
  misc_feature (1275)..(1275): n is a, c, g, or t
  misc_feature (1286)..(1291): n is a, c, g, or t
  misc_feature (1294)..(1294): n is a, c, g, or t
  misc_feature (1296)..(1298): n is a, c, g, or t
  misc_feature (1301)..(1302): n is a, c, g, or t
  misc_feature (1308)..(1312): n is a, c, g, or t
  misc_feature (1315)..(1319): n is a, c, g, or t
  misc_feature (1324)..(1336): n is a, c, g, or t
  misc_feature (1338)..(1340): n is a, c, g, or t
  misc_feature (1345)..(1349): n is a, c, g, or t
ggtctgtcccatggagcagtcagtacaaactcctcttgcatcagatagttcatgtctcgtgtatgcatacgcagtagcttgccacagcccacaagcacatttttttggacgtggaaggcgctgcaggggatccgggatttggacgtggacgcggacggcttcgtgctgaacaccttagacgacctggaaagcggctcgacgacggttctcgcggaggcgccgggcaaaaaggtgatcgccgtcgggtccgtctcgctgtgccgctcaccaagtctcgaccctcggtccatgtcgagtgacgccaggcgatgcatggcgtggctggacgccaaggacctcaagtccgtggtgtagtgagcttcggccgggcgcatgccacccgctcagctcatgcagcttggcatggcgcttcgttgctgggacgttggccagaggagggatttataagannnnntatnnnnnnnnnnnnnnnnnnnnnnnnnnnnnnnnnnnnnnnnnnnnnnnnnnnnnnnnnnnnnnnnnnnnnnnnnnnnnnnnnnnnnnnnnnnnnnnnnnnnnnnnnnnnnnnnnnnnnnnnnnnnnnnnnnnnnnnnnnnnnnnnnnnnnnnnnnnnnnnnnnnnnnnnnnnnnnnnnnnnnnnnnnnnnnnnnnnnnnnnnnnnnnnnnnnnnnnnnnnnnnnnnnnnnnnnnnnnnnnnnnnnnnnnnnnnnnctnnnnnnnnnnnnnnnnnnnnnnnnnnnnncnnnnnnnnnnnnnnnnnnctannnnnnnnnnnnnnnnnnnnnnnnnnnnnnnnnnnnnnnnnnnnnnnnnnnnnnnnnnnnnnnnnnnnnctctcctcctaannnnnnnnnnnnnnnannnnnnnngnncnanccttnnnnnnnnnnnncnnnnnnccctcnnnnnnnnnctcnnnnnnctgnntnnnnnnnnnnnnnnncnnnnnncnnngaccgcnnnnnncgttcccgnnnnnnnnnnnnccnnnnnnnnnnnnctnnnnnntctccaanntcnnnncnnnntcntctcnnnnnnnnnnnnnnnnnnnnnnnncatcnnnngcnnnncntnnnnnnnnnttcttnnnnnnnncnnnccnnnnnnnccnnnacngntnnnnnnnntccnnnnnnnnnnntnnncnnnnnnnnnnnnnnnnnnnnnnnnnnnnnnnnnnntantcccncncnnccnntnnnnatcnnatctattcncacnnnctcnnncnnnnnnnttccccnnnnccncnnncncnnnnnnnnnngtctntcccccctccnnnnnngcntnnnccnntccacnnnnnctnnnnncctcnnnnnnnnnnnnncnnncatcnnnnntccttcat

SEQ ID NO: 4319 - DNA, 554 bp, Zea mays
agaaggagaagcaccacaagcacatggagaagctcggcgagctcggcgccatcgccgccggcgcgtacgccctggtgagaacaaaaaaaaccaacctcgatctctttgatcgcctgagccatgcatgccatggtccagttcttgatctttgtgtgtctgtgcgtgtgcatcgacgtgtggctgcagcacgagaagcacaaggccaagaaggacccagagaacgagcacgggcaccgggtcaaggaggaggtggccgccgtcgccgccgtgggctccgccggcttcgctttccacgagcaccacgagaagaaggacgccaagaagcacgcccacaactgatccgtcgcaggctgcctcagccgaagcagcagcacatcgtcgcggttgctgttccatctgttcttccagcctcgtcttcgtctactgtgtgccggccaggccttgatttgaggctttgagctaccgatatttgcatggacgtaggaactgtgttggtcggtcctcggcgttcttgtatcaagatcaaatcaggccttcaataagtgtgtgtgtaa

SEQ ID NO: 4320 - DNA, 782 bp, Zea mays
tctccggcccagacagccacaccaaccgagatgtcgaaccggaggtcacggtccaggcagtctggttcgtcgaggatcactgaggagcagatcagcgaccttgtatcaaagctgcaggacctcctccccgaagctcgccttcagagcaatgcaagagtatgtaactgaagttcatatcgtaatatcgtacgttaccactttatcagctgaatggtatatccaaaatctctactatcgttattaggttattagctgaaaaattagcattaccatgtggcggcattcgctacacattgaggcctaagaaatgtgatctgatacggttgtactggtacctacggccgacctgttagtacgttgttacaacgatcaaattggccaaaatttccagtcaaaagttgaatggcccctactactatattatatatgaagcatgaagcatcccatgcagcaattcgatgtactcacgagcttgtcgatcaaccctttagttatttgcttcatgtgagatgagcttgagccgacggtccggtaaattgttctccctttaatttgccgtcttccccatgcaggtgccatctgcgagggtgttgcaggagacatgcaactacatcaggaacttgcaccaggaggtggacgacctgagcgagaggctgtcggagctgctggctacgtccgacatgagcagcgcgcaggcggctgtcatccggagcctgctcatgtagctcagacatctcgcagcattcgtagcctaagtagagtgatttttttttgtacttgtt

SEQ ID NO: 4321 - DNA, 468 bp, Zea mays
agcctcgtgttggcgacggcgaggaggttgttgatgcatatgtcgcaggagaaaccacttcccggatccgacatccttacgatcggaactctagcaccggtgattgcctacatgagtttcattgtcagagactggagaggaactctagcactgaacgcaattgcaagaagaagtagacaagaacgctgcgtgattcagttgcaaaattcaagggaaggatttacctccacgttctcgaaaccgtcggccctcaacacgtctgctagtctcacaagaacctcgaccgcgctctcggcgccggtctccatctcgagacagacgtccacgtcgctgtgcgacgtgccgaacgaattggcgcacgatccgtagagatgcatctgcgcgtggggacactccttgcggacggacctggcgagggagtccacgagctgctcctgcttggacctctgctctcccgacggcttcagg

SEQ ID NO: 4322 - DNA, 376 bp, Zea mays
ggcgttacgatgcttaaggttgaaaggggaagaacgcccaaggatgatagatgttgcgattgaacttgaagcactgagaaggctgatgaaacaacacttcatcttgaagaacgagtctttgcttcaggagtcatgttgcaatgaagaaatgagcatcgacgcaccatcaagtttgttccttggcgttgatggcatttctgacgatgaaagcatggagatcattccacttacatgtccatccaaaattctcacatcctatccctaactcgcaactgtcacaaataaaaaggatttttgctgacttctaccttctcaattgccaattccgtcttagtaatctcttcgtcttatgattagcttccaacgtaactacccg

SEQ ID NO: 4323 - DNA, 754 bp, Zea mays
gagcgctagcgtggcgatagctgatgttactatagatgcttgcgtggcagaaaacagtatagtgtaccctcatcttgctgctgatatgataagcttaaatggattctgttcatctgttggaggtcttatcggattctcaataagtggttttcttgttcatgcaataggggctcaagtgagtatcactagttcatctcttaagatttgtttgagtttcgtgcttttgaaatttctttgatgtgcatttatcactgctagaattagaacccctggatatcttcatcttaatctaattcgaagtaatttcatccgatgcattttttctgcataataatcagtcaactttacttgtactgcttctcttttctgtgacttgtcaaatgtaaattagactgacagttaccattacttggatggtgctggtatatttttcttcctttcaaaatgcatatggtgttggtatctgataatggataaatcttgcctttctcaagggtgcccttggcctgttaaccataccctctgccttggtaattttatccggaactctgctaaaggaggttcatatccccaactttccatacgagcaggttaggaatgttgttgttcttgttttctatgagaccacatatactctcatattactctaatttttctttcctggcatggcaaattcaggcccataagaagttcgtagaagcaagtgggaaaatgttaacagctttgaaatgtcctgaagtatggcgaccatgtg

SEQ ID NO: 4324 - DNA, 386 bp, Zea mays
cgcccgttagttgttcgcggaaatgtccctccgccagctgcttcaccaaacgcgtccgtggcgcgcgcttgagcagcccacgaagatgtcttgtctcctctccatcttccgtgcgctctccattctccgttctgaaggctcggctgagccactgcgcagatcttcatctgtgccagccccgctgccaagaagcttgccttgctccagctctgacccccttggccccagattcagcatcgacgtggtcgactcggaccattggccctcgtcatttgacttgttgtccgacgctgcacggagcaatgaatgcccagatgtcttcgagcaacatgaggatgatgaactgcacgactctgatgatgagatagatgacatgaggcatcgaa

SEQ ID NO: 4325 - DNA, 560 bp, Zea mays
gcttgctcgctcgcttgctttcgttgctctctctacgcttcgctagagccatggccaacacagattcactacccagcgcacgacacactaggagtccactcgttttttacagcagccaaggagcagcagccaaggagcgggggggtggggccggcgcctcgaggaggacgaagcgaagcgccggcgacgcttcaaaatgtggcgagcttctttcatttgaggtgtggccgccgccataatcatcgggtcaccgagctagtagccttctcgcttggttacgattcctgagcctcggaccggtctctactacgttactgcaacaaggttgaggaaaccactagggtcagctgcttcaggcgaaggaagcatgtggcggtttcggaaactctaatgtaaagatgctctgctgctaaagggggaaaaaaggttgcgacgagcagttccaggttcattctgactatgcaaatatcgctttgctgggccgaaaggttcgcttactcgggagctgcagtggtctcgctgaatggtggtggcctcgtgttggaatggttcttgtaaaa

SEQ ID NO: 4326 - DNA, 399 bp, Zea mays
  misc_feature (392)..(395): n is a, c, g, or t
tagcagcctctactgcctccacctctttaatccttgtaccttcacagtgaacattgacgacgagattcctgagggtggagaggtggctgatgccgaaatcaggagaaccaaatctgcgtgcagtatgcatctcgtgcgctatgatttgaaactcaagagtttcaagcgctggaacagctccttctttgaacatcatgtttacccagccaacgaaactgaacttcttcagacatcggaatccatcgttgctgacgacaaggcacattgggcacattgcctcagatcctgctgcatttgaggacaccttcaggaattgtaaggcagggaaatctccgaggatctggagagtttcttgtctaactttaacctcaacgtccaggtaggttaggttnnnnagcg

SEQ ID NO: 4327 - DNA, 399 bp, Zea mays
gattctctatcaggtcgcccagtgaatgggacctcgacgatcgagcgggagggtgcacgaggaacaaccaactcgattgcgccacggacaggttcttgcccgtgcctggcgttcagttggcctacgaccccgtgcccatgaaagcaactgacgctgatggatgtggccaggcttgtgccactgattgctcttgcactgcttactcatatgctagcactactggtggtggtggtggtgggtgctctatctggcgtggagaattgcttaacaccgcaacagcaagtaccaccggcgacactctctaccttcgcctctctgccaaggatctgcagacgctaagagagaaccaaagatcaggccgcccatctaataaggcgacagttgttactgctgcaagca

SEQ ID NO: 4328 - DNA, 391 bp, Zea mays
tggtgggcttggccatcgtgtcagtgactgtccgaagttggagcatcaaaagtccatggcaattgctggctcgagaaaagactactttggcggcgggggttaccgaggagaaatatgattgctctaggttgatgcttgcgtgtggttatcagaagctaagatgctgcaatttcaggtcatacatgtcacatgtatcagccaccagaacatccttcctcccccatcgttgaagggagacggtctgcgttaacgaacttgtgatatgctgctgggtatgacactgcttgctactgacctaccatatatcttgtttgaaggacgcaagttgattatcctgccctgttgtaaaatgtaaccagaacaattgctggcgtatttcttaagcaccagt

SEQ ID NO: 4329 - DNA, 1356 bp, Zea mays
  misc_feature (1328)..(1328): n is a, c, g, or t
  misc_feature (1347)..(1348): n is a, c, g, or t
gatctttgacttctttggtgagcaattaaaaacattacgtctcgcattcatattcattacgctcacctattgtttttgacctctttttagcagcatacaaagagacattgctgagtgcctttcatctcatctaattactggtttccacttatgacaggttatcatataccaacagaagcttcgcttgctgtagtaactacctgtcttagtggaggcgtcatattaagtcttaggaaagcatcaaaagttgagggggacaagtagactgatgcaacaacacatgcaggtaaaggaatggatcagcttgctccattttttgggcagataatgaagttacaaaagaaattatgataaacatggcttaaggtgccacttcccttagcgtctgaaatgggttcactttgagctctagaattaggggttgaatatcatcaccatggcttggggtgccacctccctttaccgaatttcaatcatccagacatcatccacatagagcattgtgttgctaatactccctccgtttctttttagttgtcgttggatagttcaatttcgcactatccagcgacaactaaaacgaaacggagggagtaccataataagcataagttactgcgatttccagatgtgtcaagtgacagccatgtttgaaacctacggcgacttaccattgctcggagttttactgattttgttttctgcccttttctttctggtgtttcccagattctcattgcatccgtgtccactagttaattcacaaatgctgcattgtccatgccatatgcatttccttttgaatactcatgacatgaatcgtgagaaaagaaatgccatatgtatttacttttgaatacttatggctgcgacctcggtatagaatcacagaaatggtcaaggcaaggcagtggcattggtgcctgatcctaatctggacgtgccatgagcttgctctgaaacaatgatatgagctttctttgacgatggtacttgtaatgtaacctggcacatgcagtatgttttgagcatgatggattctgggccttgattctatactgcatctcaaacaaatgatacgagctttcttcatcacagaaaagaagatgatttcgttcgttttgagcagtatgttttgagcatgatggaatttaatcagtatatttcgttcgttcatgtaggtaacgcttttgacccgagatgtgaaatgaatttatcctctacgcatgctgtgtaggaccatgtgtgtaacgttctgagaattagtcacagaaaagaagcttgtagaaaagggaagaggaggaagaaagggcattgtgtttagtatnccttgctccgtattggtgnnttagggtg

SEQ ID NO: 4330 - DNA, 390 bp, Zea mays
  misc_feature (352)..(354): n is a, c, g, or t
  misc_feature (359)..(363): n is a, c, g, or t
  misc_feature (370)..(375): n is a, c, g, or t
tcgacgctgtccttggcatccgagaccgcctccatggtgcccctcgccgcgtcctccgcgccgtgttcgacgcgggacaccgcgtccttggctccctcttccactttcttaccggcgccgcagagtctatccttgcaccgcttgacggtaccgaggacaccgcccttggcgctctccttgacgtcggacaatctctccttgccttcctctgccgcaccggccaccttgccggccgcgtctgagaccacgcccctggcctcatcaaaggttccgccgtcgccctcgacgccgtccagtgcgtccgggggcaggacgcgcgtctccttgaccttgacgctgccgccgccatcgnnngacannnnnagctcgnnnnnntactccacgattacc

SEQ ID NO: 4331 - DNA, 395 bp, Zea mays
cgcggccgtggctgggaaacggtggccggcgccatccttgaggtggtgtgacgatcgacgacgtgcatggcgtggcgcacagagctagtaataaaagggtagtgtacgcttaccgcgtacgtacgtgtcaccgggcgtggcactctccagtctccagggacccatccaccaagtgctactgctccttcgtagggagacgtgggaataaagagtggtagctgcatgcacgtacggcggccatggctctccgatgagagagctagctgtgtacgtgtgttcgtgatgttgttccatgcatgacatgtatacgtcttgcctaagtacgcttgtactagttgagagactgtgtaagtgaaatgtgctataataataaataagtaaagggcgccttctcc

SEQ ID NO: 4332 - DNA, 397 bp, Zea mays
atttaatttcttggctctttacactgacttaattgcatgcattaaccacagcgtgcggtccgcatctgctcaagtggacgcattcacgttattatttctgctgtggccaccgcagccgaagctgcagttgcagttaagcttgtcggcctgcacgttcatagcagcagcagcagcccccgccgccgctgctgccggcggagcggtgagtggagctccgaagcaagagaagctgctgcggtgcgtcgactgcatcagtgcgtcaccgccaccggcggagactgcgtgaccgatgacatagtcgccgaccgcaggctgacgaggtgggcccgggtacgtcgccggcgggtagctcatcgggtgcagtgtggatggcgccgtgtagaggtaatggtacgaa

SEQ ID NO: 4333 - DNA, 646 bp, Zea mays
ccctgatgcttgaaaatagctgtaccatgatttggcatcagaacctatcatgacttctacaatgatctaaatgaaaacaattgatggacaacatcaccatggtcctcacacctgccactttctctcggccagcctcatataactttagctcaacattcctggaccagtgttgaaagtgcagcttaaagtcaacagtttcatggccttctgtcataataaatgtgtgaacgttgaatgacctgccttgggagtgcacataatcctatacatgacaacagtttaaaaggtattggtttcagacaccgagtgcatgtagtaatagaagaaaggaatataatgagtttcatgtgcttacttccaagacagcaacagatgacttcctctctgaaaccagtgttgtcatccccatccataagaatatttcagtgctgcagtccagcatgtaacttctgtctgagttcagcatttctctatccaacgggtgtgcctcgagtggaacaaggtttttcttattgatcctgcaggcaggaaagcatgccaaacatgtcgcggcaacttcagggttcaggctagttaagcttaaactgaacaggggagtagttaccaaaaaagtttcttagatggtgcagttagtggctcttccttg

SEQ ID NO: 4334 - DNA, 410 bp, Zea mays
gatttcgatgattccatgcttctccccggtattattatcagcccggaggacgcaccacggctgctgagctacatcaactccagcacggtgccaacgggcgccatgaagttccagcagacgatcctcggcacgcgaccggcgccggtggtcacgcactactcttcgcggggcccgtcgccgagctacgccggcgtgctcaagcccgatatcctagcgccaggggacaacatccttgcgtcggtgccgcccacaattccaaccgcgatgataggccaaacgcgactggccagcgacttcctggtccagtccgggacgtcgatggcttgcccgcacgccagcggcgtcgcggccctgctgcgcgcggtgcacccgagctggagcccggccatgatcaagtcggcgatgatgac

SEQ ID NO: 4335 - DNA, 367 bp, Zea mays
tagcagcacagacactctgccgcacgcacctgcgcttgtcgcttcccctcttgctatatctcctgctgcttttgctaaagccggaaaccaaaaagaaagttgagcttttcgtcacaattttgctttacttattaagtgctagtccgttttgtttatacgaccttactattagcttctgagcccggattcaaagtgctacagtgcgttttcactaacaacatttaggattatagcacatcaaacttctttaaatttgactagtgttacaaaaatatatattagcatcatacatatttagttaaagttaaaaatatttaatttgtatgaaaaaaacaagagtgacactctctatgggataggccgagta

SEQ ID NO: 4336 - DNA, 584 bp, Zea mays
actactaccactaaattactaatcaggcaggttgaccttctctagcccagacgaaacccaagagggcccaattccacaaggggctcacgtcgtgtccttgacgagcggcttcaccttgcgcttgtgcccgaagctgttcaccaggtccttgcgcgcgcaaaccgggaacaggtgaacgccgggcggcctcaggcgcctcaggacgtagggaaagctcagctgatcccgggacgtgaacctgaccacctcgttgaaccaggcgcacatgaagaggttggtcagcggcgcgtggttcctcacgatcactgaagcttctgcgagagctgtaaaaaaaaaggccaaaaagaaattgcattgctattaacaggcggtcgacgaccaccactggaaaaggatgtgcatgatatgaaaccatcaattatgaagcgaagcattatgttcgtttcacttctgcagtggttcccgttctaccaatcccacaattgtgggggcttctggtggaatgcgtgtatcactgtttcaggggcagaaaaggagcttgcttttatgctaaacgcgtgcaactggcccaactttattacttg

SEQ ID NO: 4337 - DNA, 756 bp, Zea mays
  misc_feature (682)..(691): n is a, c, g, or t
  misc_feature (707)..(709): n is a, c, g, or t
  misc_feature (740)..(744): n is a, c, g, or t
cgctgagctcgtcgagggcgcagtggacggcgaagcagaacaagctgttcgagcaggcgttggcggtgtacgacagggacacgccggaccgctggcacaacatcgcgcgcgccgtgggtggcaagtcggcggacgaggtcaggcgctactacgagctgctggtgaaggacttggagcacatcgaggccggcaaggtggccttccccgcgtacaggtgccccggcggctacgacgacgccgacagcgacaggtatggttggatcccattgggttttcgcgcgcgtttactaccgcgtcgtttccagttttcagccatctacttatagacactaccggaatcgcgttttttgccgagtgtctaagacactcggcaaagactattttacattcggcaaagactttaacgagtgtaacactcggcaaataacactcggcaaagatttcatcggtaaagggttctttgccgagtgcttttttttggacactcggcaaagactttgccgagtgttaaaaagcaatcggcaaagaaaaacactcagcaaattaagaatcgaaaaaaaaacagcaaaacattttttaaattctatgaacaactctctaaccctaccctgttaccttactcgttgtcatatcatttttcactattattttgaatcaaacttatatgttttgtaaatggtgnnnnnnnnnntcacaacctctctctnnngcataccctcctataccactacactactacnnnnnttatgtttatat

SEQ ID NO: 4338 - DNA, 374 bp, Zea mays
ggacgattcacatccgcaacaagcagcaacgacgcgctgtgccttgctcaggatctgttccatgtctgccgtcgtgccttgtccgattcttcggtgctcccgggcacggagaagcagcgtgccagcgaggagatcttcctgctgggatgggagcgcatgtgcaaggtggtggagatggagctctcgctcatgtacgaggccctgtacaccaaggccatcgtgctgcacacctgcccggttgcaggctacctcaaccgtctagtgtcgcccctcgccaccgctgccgcagtgttgctcttcaaccagtatatcggcagccgcagccgccgggccatcatcatcaggagatctttcgtcgacatcacctacctctt

SEQ ID NO: 4339 - DNA, 776 bp, Zea mays
gcgggcacgacgtgtccaaactcaaccacgcgctcgctcaaggcacacgccaatccctcccagcgcaccgctctcgtcgaagcccgcaagtacgttgccttctacaccctttcgcccagcgctcaggccttgaagggtccctttctgtgtgtagcttgccttgaagggtgtccaaacttgtgttttgtttgctctggatttctttacctctctctggggaggagacaagttgctgcaataacgttatgctctggattctgaatcatgtgccttcatcgttaggttgattttcctgattcagaaagatgatcgaggcaatctacgagtaccgaggcgaggatccgctccaaccgtggctggagtaagcgattctcgatgcctctctttagctcgcctctttcgatttgttcgttcgtggttgctaccctagccgaaagattgcttatctcttctctgcttcgtccgcgcgcagctgcatcaagtgggtccaggagtcattcccgaccggcggcgacagtgcgtgcggaccttatggcacgacgagcgctacaaggacgacatccgctttctcaaagtgtggctggaatacgtgagtcgtgcgatggcagcttgattttttttcctgtagttttagtctgtgcagtgaaggcatctcacatatcattccgctgccgatcttgttctctttgtaggctgggaactgtgctgatgccgaggtaacatacaggttcctggaggccaaccagattgggcagggccatgccatctactacatg

SEQ ID NO: 4340 - DNA, 732 bp, Zea mays
aggcccgattgctgaatgattggtttgttagcatcaaggtaattttgttggacccttagaaagttattccgttgtgtctcactctttagtctttacctgtctttgatgtgtcaaaagctttacatatgcaacttgaccatacctctttcagtctgattattaattttgataggttgaccgtgaagagcgccctgatgttgataaggtaagtttcttcaagtgctccaatgcatcagttccatttctagccgacttacggctccctttcccctttttcctgtagttagctcgaaaaggtttctgggcgtgtttgtattgggtggcacactaggttctttgttgaatatagcctcacatattttaggtttatatgacatatgtatcggcactgcatggtggtggtggttggcctctaagcgtctttttgtcacctgacttgaaacctctgatgggtggtacatactttccaccggatgataattatggaagaccagggttcaagactgtattgaggtataagcagaagtgcgtagtttcagaagctatccttcatccctactaaatatttactgcatacttaccttcaggaaggtcaaggaagcctgggaaactaaacgtgaagcgcttgagcggacgggaaatcttgttatcgaacaattaagggacgcattatctgctaaggctagctctcaagatgtgccaaacgacctagcagttgtctctgttgatcaa

SEQ ID NO: 4341 - DNA, 563 bp, Zea mays
ctgcaacgcatcagcaagaggagatcagtgtgaaacatgcagcaccttgttgaatccaactgaacttattgacccaaagtgcaaggtaggaatgtatactttgatactgtgctctgccatttttgcctctgtcaatataattgatttaagcgtataatatatcatagaattgtaattataaattgccttcttatcttgtgattttccatgtaggtttgtaagaacactccacgtattcgtgacacggatcacttatttttggagcttcctctattgagagacaagctggtaaactacatcaatgaaacttcagttgctggtttgtggagtcaaaatgctattcaagcaacaaatgcatggctgaaggaagggctaaagccacgctgcatcaccagagatcttaaatggggtgttcctgtcccccatgagaagtataaagacaaggtttgagcatagaaattacgcatttctgtctttaacgaattatccagtttcctcattttgattattttcaggtgttctatgtttggtttgatgcacctatcggctacgtgtctattacg

SEQ ID NO: 4342 - DNA, 438 bp, Zea mays
  misc_feature (408)..(413): n is a, c, g, or t
  misc_feature (419)..(429): n is a, c, g, or t
ctagtagataggataggaaatgggtatggattacgtattagttgctgtgctgtttgcgagcgtttcgatcaaaggctaccgccgggatcgaggggcttaccgctcgtcggagagacgctggagttcttcaccgcgtcaccgaccctcgagctgttgcccttcttcaagcgacgtttggagaggtaatgaaataatatatactacctctgtttttttatacatgacgtttcctagtttaaagatgaactgttaggcgtcatgtatttagaaacggagggagtactatagattaagggattaataacgaaacaaagaatacaaaacggaacaggtccaatttcgacatgaaagtttcatactttcatgtaaacatagcatgatatggaacaacaacatttggaaaaacannnnnntagccnnnnnnnnnnntcctaggta

SEQ ID NO: 4343 - DNA, 689 bp, Zea mays
tgcagggagcagcgacgcaaagcgccatcatcgcaggtccttccggcgacgacaataataatctcctagagtggccaccgacgtcgacgctggactccgtcgtcgtcgacaacagcgctcctacgcacaacgccgtgcttgccagcgatcctactactactgctacaagcggcgtgcaagacgacgccggcgctgcaggtacgtcgtcggcgaccgcaccaaggtcgtcgtcgtcgtcgctagactgcaccggctgccaggttcttcgagaagttgtgcactgcaacggtagacacacacacgtgcgctatatagctactactacagtaatatatagtaccaaattaattaatggcatacttacatatcaaacacacacttacgtctattattggctgcgaatttctagggcttcaagcaacaaagttgggtatccatggggtcgccgccggcgtgttccaccatgcaaccctagagttgtatcgcatagactccaacggcctggcagcgacaatgacaacacaactgacgcatcagtcctacgtggagtaagctgtttggactcctactagatttattcatttatttttcatgcatacatacacgtgatctgagcagctaatagctatagtaatctgatgatctgagcagttttagtggccgggactacgtgtgggtgaagcactacc

SEQ ID NO: 4344 - DNA, 720 bp, Zea mays
  misc_feature (563)..(609): n is a, c, g, or t
  misc_feature (617)..(622): n is a, c, g, or t
  misc_feature (628)..(632): n is a, c, g, or t
  misc_feature (637)..(715): n is a, c, g, or t
  misc_feature (717)..(717): n is a, c, g, or t
agttgattggccttgctgtgcacaggaatctcttgtgtttgtatggattttgcatgacctctaaagaacggttgcttgtatatccatatatgccaaatggcagtgttgctgaccgcttgagaggtaactcactcgtctacaacatttcaatgttaatgaagtctacaattggcattctgtgcaagtcttttgcatttcttgtaaatattttgtttaacattatgtgttttggttggttctttgccacggccatatactctgcttatatatccttatacctttgtaatatacggggttgcaattttcatattatcgcaatggaaaaccatctcttgattggagtaaacgcatgcggattgctcttggcgctgccagggggttactctaccttcatgaacaatgcaatcctaagatcatccacagggacgtcaaagctgcaaacatattgctcgatggaaatttcgaagcaatcgtcggggattttggattggtaaaacttcttgaccgtcaggaatcgcatgttaccactgcagtttgggacactattgggcatattgctcccnnnnnnnnnnnnnnnnnnnnnnnnnnnnnnnnnnnnnnnnnnnnnnntcaagaannnnnnccaatnnnnnatccnnnnnnnnnnnnnnnnnnnnnnnnnnnnnnnnnnnnnnnnnnnnnnnnnnnnnnnnnnnnnnnnnnnnnnnnnnnnnnncnttg

SEQ ID NO: 4345 - DNA, 436 bp, Zea mays
ggcacgaatctgttagctaccaaatttgtcatagtatggcctcttttgttaccagatctccgaacaccgggtcggtgctcaggtagaacaaatatctatctaccgacagctcgtatcagttcctaacctgatccatttttcagatctgactggaagtccccaaaaagcggtcagttgtatcaaacactaagattttagcgaactacgagagtacctccacaaactcactgccaacaccagtgcaccagccatgccagcgaggatctgcaagtagttctcaagttcagcatgctgaaaagagaataggacgcagcaaataaatgaaaacttcgattcgaaccttagcatctctgctgaccccattagaactccagctaagcattgacttcactgacgcccaacaggatgactttggcataagaataaccacagtgta

SEQ ID NO: 4346 - DNA, 382 bp, Zea mays
gtactcggggtccaggtacccgcaggtcccctgcaccagggtcatgaactggctcttgtccgccggcgccaggatcgaggccccgaagtccgacaccttcgcctcgtagttctggtccaggagtatgttggacgacttgacgtcgccgtggaggatcggtggcgacgcccacgagtggaggtagctcaggtaggacagcgccagcgcggactcgagggcgatgcgtatccgaaccgagaagggggcgctgcgagagccaccgtcaccatggatgaactggaacagcgtgccattggggatgaactcgtagactagcatcgggacctccacttcgaggcagcagcccaggagcttgacgatgttcttgtggttgatctgggag

SEQ ID NO: 4347 - DNA, 386 bp, Zea mays
tatgattttaatgaagaatgtattttgtgagtccacagttaggttgaatctgcttgatgagctttcttcaggtaaaaataaggattcccccaaggcaaaactggatagttctgaaaagaacagtggttgccctgatgttgatgcatatgttcctggcacacactccattgaaaaactccgggaagagatctatagacaagcatttcagtcatattaccaagcatgccagaaattgccagtatcagaagggtcaggtgcttgttcaagtggcttccagtcaggattcaagatgagtactcgtagagcatcagttatgtcagtatgtgcaaaagatgttgatgtgagcttatcaaagatcgatggcggtgatgaaggaatgattagtt

SEQ ID NO: 4348 - DNA, 370 bp, Zea mays
tgaatggaactcccacctggagccgaccggaccggaccggccgagcaaaggaaatcacatgttgcatgggtatgctaacgcagaagctttgcacatggcggggagttgtttgttatcaggtccatggtcgctggaggcttggaggcaattggtagagctgagcatcatgcatgggagggggtgaaaaaaaaggccctggaggtcaggacggggaggaaaaagcaggaacagggttttgaagcgtgtggagttgttgtgaacgagggatggatgatgcatgcgggagtggagtttctgcaggggatgatgtatgatggatgtagtaggctaggctaggccaggttgggtgtgtacaatgcaagcccccccc

SEQ ID NO: 4349 - DNA, 383 bp, Zea mays
cgacttccaggcggtgttcgacaagatcctcgaggtggccgttggcgccaggctggcgccggagcggatggtgcgtcgcgtgttcgtgttcagcgacatggagttcgaccaggcgacggagaacccgtgggagacggactacgaggcgatcgtgcgcaagttcacggaggctgggtacggtgcggccgtgccggaggtggtgttctggaacctgagggactccaaggccatgccggtggaggccgggcagaaaggggtggcgcttgtcagtgggttctccaagaacctgctcaaggtgttcctcgacggcggcggcatcgtcgcccccagggctgtcatggagaaggccatcgcggggccggagtacaataagctgaccgtca

SEQ ID NO: 4350 - DNA, 739 bp, Zea mays
  misc_feature (704)..(704): n is a, c, g, or t
  misc_feature (706)..(706): n is a, c, g, or t
ttttgtaactgacaagatctgtgttgtaataacaggaatgatgtagaatattctacatcacatgacaccatatgtcaacttcaaaagcatattctagtattacacacagttccttatttccattacatcagtatcactctaaacaaacactgcatcgtaaacagaaaaacatctgggctgatacaaaccaagcctctgagacttatcacggccaccagtaaagagccctcgaaaagcacgcaaacgcacttgaaactcattccggatcaatacagtgtcagcaagctacaagttccattcccgtatgttaaggacaaaaatctgaacaaaaatctcagcaaaggccacccaaaattgagtatcaacaaccatgtgctgtgcaggtgcatcaacacttcgcagccccaatcgccaaaccaatctccttccgcacgtgcatcctactgcaccgaaaagtaacacagctgccacagcctcatgactcatgatcacaccaaaataggcacggattcgcggcacgccacgagaccatggcgcggtcacctgaaactgaaagggggagaataacgcatgacgtcaccttcggagcagcggcccttggggatggacgacacggaggacggcacgatgaggcggtggtggtcgcgcacaccgccgccgcccgctgaccccctcgatgtggacggcgatgcgaccgccttctnanggtgcttgtctagcgcgtcgctgatccgtttcc

SEQ ID NO: 4351 - DNA, 398 bp, Zea mays
ctcattctctctcccctcagcctccccccacccccggccgcccccaaattttagtttagttttatctactccacagaagcatactgcacacgtacatagaaaacgccatggactacgtactgcatcatttccttaaccatcgctgctcaattttggcagttttcaagcccatggatttgcacatgatgatgaggagaggagaccgtcgcttccatgacatgtttctccatcgaggtgccgctgccggctcggtcatctcctccccgctgctccacaacggggatttattcgggtcacgggacgtcgtctcgccggaggccagcaggctctacgcgctcctccaacgccggcagcagccttcctccacgcaaacgttcgccctcatgaactacagtaga

SEQ ID NO: 4352 - DNA, 389 bp, Zea mays
ctagcaacctagccaagcgcgaccagggacactcacgggcatgttgaaccctccacctggtcggaagcgagcatgaacccagccagctgatggtcgtcgccctgaaggcgccaacattgtcccgcacgagcccgtttaaccccccgaagcggtaggcacatcgccgttggaaaacgaccgggtatggagatcccactggaccgtcctgttgtcgtcacggaccagcggatccgatctgctaggcagaatatcccatgcggcgccgctcgtcacagacgtcacagacaagacacggcgtcacgaaaacacgcgaccatcccttccctgcagtgcagggtcaacaggttgggaggagcaaaaaaaaactttcataagcgctcccaagaaac

SEQ ID NO: 4353 - DNA, 357 bp, Zea mays
agatgaatagcagagcagggagagaggcagcagaaaaaggaccaaagcacctcatgggcgaggatggaggacgcctcaagccggcctcagacttcgagcgggacggcgggcaactcgaactcggacgcgatctcctcgatctgcttccggacgctcatgtcgatcaagttggagccgtcgcggccgtactgcacggtgaagccggcgatgagcgccgggtcgagctgcgtcttgaggcggacgttctgggcgccggtcatcttctggacgtgctgcgcgatctgcgcgaggtcctgcgactcgagctgcacgacggaggtgacggtggcgacctcggtgccggtgagcgagttgtag

SEQ ID NO: 4354 - DNA, 500 bp, Zea mays
  misc_feature (424)..(430): n is a, c, g, or t
  misc_feature (454)..(456): n is a, c, g, or t
  misc_feature (479)..(492): n is a, c, g, or t
tgaggagataaaccacatgaggaacctgagagagctgctcctggcgttcaacaacttcaccggcgagctcccgcaaggcctggggtcgaacacgacgcatggacttgtttgggtcgacgtcatggggaaccacttccacggcgcgatcccacctggtctctgcaccggaggtcagctcgccattctcgaccttgcgctgaacagattcagcgggggcattccgagtgagatcatcaagtgccagtctctgtggagggcccgtcttgcgaacaacctgttcagcgggagcttcccttcagatctggggataaacaccgggtggtcgtacgtggaactgggcggcaaccggtttgacggcaggataccaagcgtgctcggttcatggcggaacctcacggtgcttgatctgtctcggaacagcttnnnnnnntatctccaacaagacccttcactnnnccaccccaagatatctttgattnnnnnnnnnnnnnngacttttt

SEQ ID NO: 4355 - DNA, 503 bp, Zea mays
gattgaagatcgaaacagactcggcagcagctgatctgtttgtagcatcatcaacatagatcacatcatcaattcttgcaattatgttaaatgccaagctctccagaacccttgagtagcattcaagtatggactgcccgacatcctaaaaacacgcaagaaacaaagtgaagattgtggtttgtgtaactgaaagaaagacttgatcgattttgatttggccagagaagaagtccatggttatttgtttttgcatgagctttaccttgttatactgtatcttgttcatgtcaagggaagtttgtggcaggcctggatatctcaatcttaagctctgcaatagaccatcagctctttcagacaaagtgtggctcttctccttatctccaacaagacccttcacttttccaccccaagatatctttgatttggcttgaggtgtcgactttttttggcctttcagtttccaaacatggatggcaccttctattctgtttgccact

SEQ ID NO: 4356 - DNA, 425 bp, Zea mays
  misc_feature (412)..(414): n is a, c, g, or t
ccaggtttctgttcttgatctctcagggaacctcatgtccggcgccctccccggcaggctcttggccacggcgccggccagtttgacacgcctgagcatcgctgggaacaacttctccggggacatctccaggtatcagtttggtggctgtgcaaatctctccgtgcttgatctttcgtacaacagactgagcgccaccatagggttgccaccgagtcttgccaattgccaccacctcagggaactagacatgtctgggaacaagattctgtcgggccgagtaccggagttcctggggggcttccgagcattgcggcgactcggacttgccgggaacaacttcaccgaggaaatcccggatgagctgagcctcctgtgcggaacgctggttcagctagacttgtcaagcaannnagagatttgca

SEQ ID NO: 4357 - DNA, 1131 bp, Zea mays
  misc_feature (1086)..(1094): n is a, c, g, or t
taccccgtcaggtcctgccccagcgcaacaggaagaagaaggcgcgtcccctccccttctccccggattttcatcctctcttcattcgcattccaggtctcatgctgtagtttatgcttctcgttcagcccgtctcctacgcacagctggcccggagcatccacgagctcgccgcgacgtgcgaccaggttcgtccggctgctgcttcggtttggtactttgattataatttcatgatgctggcttggatctgttaactttatctgctcttgtgatatgccttttgtagaaaagttcccagaggcagctcgtaaatagtgtgttccccaagcttgctgtgtacaattctgtggatccttcggtggctccatctcttctcatggtaagcttttcctgtgcccttcctcgactgcttctagctattttgtggaggtaggacttagatcagtcacagatacacaccagcaagcaaggttttaaagtcggctagtcgactctagtcgcctgagcaccgataaggtgactaatcgcgattagtcgtcgatttgctcgattagtcgactcctagtcgtccacctatagccgacccacataatagaggccggattagcggcccaaaacagacataactagtcgaccataacccctagtcgaacgactaatcgcgattagtcggtaactaggacgactaatcgctacctagtcgctctagtcgagtcgtagaccctaatcaagcttggactagcgataaggccgactaatcgcgattagtcggacgactttaaaaccttgccagcaaggataacactgtaacggcatgtgttaaattatagtttttctcaactggattcacacctttgcatgtcttcaacagaaattagatacttagataaatgtgttgtacagaaatcatatacttagcatagaccatggtcatgataaccttcaatattatcgattattttaggtattttctctctatcattacttcgactctcctttgtatttgcagctccatcagcaatgtgaggacagaaatgttctgcgctatgtatactactatctggcccgtatactgtcagatannnnnnnnncagggtttaagtgctgctggtggcatacccacgccca

SEQ ID NO: 4358 - DNA, 495 bp, Zea mays
gcacgtccatcctagtagtttgcactttgcagcgacgccatgaacgtttttttgctttcaccagcttgattgaaagctttttggcgcaaatcaactgaaacgtgctgctctatctgatgtgtttcagggcggcatcattctcggcccgtccatgctgtcacgcagcccggcgttcaaggagacggtgttcccggcgaggggcgacccggtgctgcacaccatcgcgacgttcgggctcatgtacgtcatcttcctcatcggcgtgcggatggacccgatgctcgtcgtccgctccggcaagaagggcgtgatcatcgccctctccggcttcatcctcccgctggtcatgaccaccgcgggcttatccggcgccgccatggtcgaggaacccgacgtaacgaggcgttccacgttcctgttcgcgctggccacgtcgctctcggtcacgtccttcgcggtgctgtcgccgatcctgtcagagctcaacctcctcaa

SEQ ID NO: 4359 - DNA, 290 bp, Zea mays
cgaattcacaatcctcacggaccacaaaagccttactcagcttaacgagcagcgcctgcacacgccctggcaacacaaagtcttcaccaaacttttgggcttgaattaccgcatccagtacagaagtggctctgacaaccatgctgctgacgccctgtcacgacatagttttgcagaatgtcaagccgtctccgttattttccctcaatggctagttgccgtccaagatagttatcaccaagataaacaagcactttccctcatctctaaattggttgttgacctagcgg

SEQ ID NO: 4360 - DNA, 499 bp, Zea mays
  misc_feature (453)..(456): n is a, c, g, or t
aaaggcatgcgactttctgttgtcaaaagaacttccttccggtggttggggagaaagctatttgtcatctcaagaccaggtaaactcactcagtcactcctgtcagtttctttaaaataattgcacttaacagtattatggatatactggcaatgttttttcatcgcctgtgtggtacagtcaagatttttgggggcaacctgcttttattagatttatgtaatgtaccaaacctagagaaaacctgtctatttagagctatcgttttatctgaagaggttggtacgagtagatagcagttgaaaagtaaacatgccagtcatttaaaaaaaatagtcatatgcccgtgtattgctacggtttttatacatatgacatgggataaaataaaatttaataaagcacaaaatatatgttttctattgatttagagggtgtaaatgtggagccaannnncaagattcaaacactcacttatacataatttcaacttattttt

SEQ ID NO: 4361 - DNA, 374 bp, Zea mays
tctgctgttcaagaaaatgctggcattaaaggtttggcctaccaatgcgacgtattcttgcatcctgaaggtgtttgatacgcccgatttgctatccgttggaatgcaacttcatggctgcttgctgaagatgggaacggaggttgacactgctttggggactgccttgatgacgatgtatggcaggtgtggtggagttgatgagatacctaggttggcttgtcgtataaggcatgatgcgctttcgaggactgccctgcttggcgcttatgcacgtactggatacaatgcagaggcaattggtgttttcaaggagatgatcatgaaaaatatggcaattgaccagtcagctatgactggtatgctgcaggttt

SEQ ID NO: 4362 - DNA, 379 bp, Zea mays
ggtaggtcatcagtgaagtctatcaggagctcagggagaggtgaaggcctaacagaaatggactgcaatcccttgtcaccaccaaagctgtttgacaaggattcgtatactttgccatattctgagcatgcttgcttttcagagctggaggattttatgcatacattgagtccattgacagtcagcggcatcgtcagctcatcgttctgctatgtgaatccccgtcaccacttcagacatctttgtttagacaataatgttaatgatgacactgacaggacgcccataaaaaataagggtaaggataatgataagctgacaccaaagagttggcgaaatggttctgtgactccaaaagaaaggaaggtcaggatctcca

SEQ ID NO: 4363 - DNA, 371 bp, Zea mays
cagtcgtgcgctcaacataaaccctcgtcacccccacatgccaatcttcgcaccggctgccttccaagtgttaaattaccttgatgaacaaagccctcttgcaacatagctacatgcctccccttgacaacaaaactttagagcaggcacttatccaaagtacaatggcagtgtaaacacaactcagtacatctataaaacactaatttcctactttccatttctgtccattttacaaaaaaaatcctaatatttatttctgatcttaggacccaccatttttgtgagtcatcaaatgactcgtatcaatatcttccataccataccgttaaaggacaccaacacaacacgaagccatatgtaacactccc

SEQ ID NO: 4364 - DNA, 608 bp, Zea mays
tgtccgtcagctccgccgcctcatccagcgtcaggttgtggttgcacccggtgaaggccagcatgtccttctcgtatctgacgacgatcaaggcaaaccaatgcaagttcatccattgattgatctgcagataatagccggccaccgaacgctgtgaactctcagctacctcaggtgaagcgcgatgtaatgctgggactcgtttctcagccgatcaaccagcgtgttgccgagctcttcgatctccttcctgtactggagcgcctcgtagttcgcgcggcaccgaagcttttgcagcgaaggagcgaggccgttgttcacgatccgtgaatccgtgtgtgtaaacctcaccactttgaacttcctcaggattttcgcaaagtctctgtagaaggaagcctggaaaacggagctggcgatgcatcagcctattcagtacgtattcggttatcctctaagctgctgcaactgcaatgcaatccagtagagcaaacaagttgttgactcgtaccctggaccaggaggtgggcgctctcacgtacggtttcacccttctgtaatgtggtgggagggaatccacgatcacaatgtcttccttcaacgactcc

SEQ ID NO: 4365 - DNA, 573 bp, Zea mays
tttgaggtatccggcaggagccaattcagggctgagggctcctactctttcttgttccaggtagatacgtacgccttattccaacttttgtcatctctggctctatgctagtttcctcaactagaaccaactcttaaagcgcgaacatgccgttgctttataggactacaattgtagcgtggagtttttccgctcccctttccttgttcaggaatgggagatgccaatcagcaacggaaagggtacccgggaaactctcaggcttgacgtcatcgatccagcgttcccgaggtacaagaacgcagatatcattatcttcaacactggtcactggtggacgcatgacaaaacttctctagggtgagcaaaacaacgcactgcctgattcactgaagatctgtgcagttcacacatcctgcatttccatttgccatgtactgttctgattattttttagaaaaaaaaaacgtgccgcaggaaagattactaccaagagggcaaccgcgtgtacagtgagctggacgtccacgatgcctttcggcgagctctcaacacctgggccaagtgggttga

SEQ ID NO: 4366 - DNA, 483 bp, Zea mays
  misc_feature (473)..(479): n is a, c, g, or t
ggccgccgtgccgccgacggtgtccgcgacgaagccctcgagcgggtgcccgtacagcgcgccgaaggcgtagggcaccacgaggcggtggtgccacgagtgcaggttccggtagaggaacctgctggcgtgcatggtccggtggcacgcgtactgccacacgtcgaagaagaccatggccaccaagatctggcaggctagcttcaggtacgacgatgcttcggtcgtcgtactgctggtgctccctcagtccctcctgtgagctgtacgcatgcatgcatggtgcggatgtatatatagaattatagattagtatatatatacatacacacataatcatgcaataataatactagctagtacgtacactactcctacgtaccttgaacaccatggcaacgatggtaacctgcacgagctgctgcttgaggacgttgccgatgacctgtcgcttcgacacatagttcttgctnnnnnnntggg

SEQ ID NO: 4367 - DNA, 1041 bp, Zea mays
  misc_feature (985)..(993): n is a, c, g, or t
  misc_feature (1017)..(1021): n is a, c, g, or t
ctcccttcgtcgcgctggtcgctgccgcctccccctcgtgttcacactcctctaggcgcctcaggcctcacggtcttcgtcctcgcctcggcgtctcagcctcgcgacccgcgtggagctcacggcggcgaccgccattgtagttcccggaggtacaaagctcgcctctctctcctcgcctggaatgcctagctagctttcttcgcttctagcgtttctcggctcccgtgtattgtaatcattatcacgcgcgtttgattgctttgggctttggcatcgtcccgtgcagttccttcagcatttgtgatttaggtgcttgttcaagtgctgcgattgggtgggagcctgatttggtgcgcaaggtgcataaaactcgcacacgtgcacgcacggcgcgctctgaggttgggatcgggagtagcggcaggtgtttcaggtgatcctgtgtttccgctcggctagaggtcctgtgattacgacagatttagggcttaggggggaattggatttagtgagcttactatgggaagagtactctttgggctaagtggagtttctgatcgtcagcttttgcatgccttgagtatgataattcgttgttttcatgcctaagtttctacatttcaagagataggaacgaaagtactccgtatgcgcgatttaaggtcaaatacattcgacaggctatactggcgatcactttatgggatgtgcttttatatgggactgtctatgtttccttaagtggagtaagacccataaatggcgtctgaaatttctttaagctgtaccactttttttatggtttggtaagttctgcagctaaaatagagtcttcaatcttgatacaggtcaatgaaggagtcagtgccaatgtcagtaatcagcagtatttcaaacttccgcacgctgtctaccagcagtgtggtagaaactgagctagttaagagatactgccggaagatcaatgaaatcctgggtcttnnnnnnnnngtcctggatgaagttctcacccannnnnagtctggatgataggatgct

SEQ ID NO: 4368 - DNA, 369 bp, Zea mays
tcttcttcttctctctcctccttggggataaattaataggtctatcctcaactatacttacaatttattcctatatatcgatatattgggatcaatatattgggatatatataaatatgtatatcaatgaaactgatatatacaaaatttgattctttcaattctttgggtggcagccacttggaggagtagctagtgagtgtgtgggagcaagtagagtagtgagcagtgacgagtgagtggtgggtgttctctgaaatgtgatgaaagcaagggtagtggcaatgccatgccatgccatgccaccactgttctcccaacttgaaactgagtgggtgcaatgttgtggcctgctactatcatatccac

SEQ ID NO: 4369 - DNA, 337 bp, Zea mays
ttttcatagcagagcaagggacatgcatgcacacactcgcataaaagcaaaataacggtgcttttttttactgcaaaacacgaggataataataatccgatcgaaacctaaggggccagactatcagagcaaagaagaaaaaaggagcagaaaacgcaccgctcccaggatccgccgggaaagcgtacgagttcttggactgcttcctcccgatcctcgggaagcagccgacgttcccggcgtcgccgaacacgctcttggcgttctcccaccaccccatcgccggcgcacgcggtggcagctgccgctcctatgtaaatagtagtaactcttatcg

SEQ ID NO: 4370 - DNA, 521 bp, Zea mays
ggcagcggaggatactgatggggacgcgctgcgagctcccgcggttcagtgggctcatactctatgacgagcacggccggcccctgcagagcagctcccagaacagagcaggccacctgacgagcagagcaagcagacacgagcccaaggtaaatggatgcatagcgctttgcgaactcggttttgaatagcgcatgcgtttttcagacgtctcaaaaatcaaatcaaatcaaatcaaatcaatcctgttttttgtcttacagggcaaaaagaaggctgccaggacaaccacaactctcagggacctcctgtagtcagttacctcctctcacatcacatgctattgcctcatttactggtagctaaaaatcgcgcctttgcaagtgctcccaggctcccagcaaactactgcgtttggtcttcccctcatgtaaagcgtgaaccattgaaggcatgcagattcagatactgaagcgttaatatctatccaaattacggtcagttggtcatcctattccaag

SEQ ID NO: 4371 - DNA, 379 bp, Zea mays
ctgtgcaacgggatgcagcccgtgagcgtcatctttccttacctcccgatccccgcgcaccggcggcgcgaccgggcgcgccgacggctgagagagatgttcgccaccatcatcagggcacggaaggcctccgggcggtccgaagaagacatgctgcagtgcttgatcgactacaggtataaggacgggcgcgccaccacggaggacgagatcgccgggctactcatcacggtgctcttcggcgggcagcagaccagctccataacctccacctggactggggcctacctgctccagttccggcgctacctggcagcagccgtggaggagcaggaggaggccatcaggcgttgcggagataggatcaaccatgacgtct

SEQ ID NO: 4372 - DNA, 455 bp, Zea mays
  misc_feature (104)..(104): n is a, c, g, or t
  misc_feature (122)..(122): n is a, c, g, or t
ttcttatgtgctgactggatactatgatgaagctcccatggatgaatatggtcagatcgactcagttgaccatgatatttctgtttttttatcttaatcatgtntgctcctattgacataanaagcacctaacgtagtccatgaattttcataggtatgtacaaggagcccaaatttgggcatctcagggacttgcacaacgtaataaggtcatatcaaaaagcattcctctgggggcaacattcgtctgagatattgggtcatgggtatgaggttgggaacaacttcttcaatcattttggtttctggaaacttatattattatttgacagtgttctccgaccttcaaatgaatcttctttggtgttgtgattatttttctatattgtaggcacacatctttgagttgcctgaagaaaagctatgcctctctttcctttccaacaataacacgg

SEQ ID NO: 4373 - DNA, 483 bp, Zea mays
gctattagagcaacgagggtggaggaattccttactggtaaatcactcactgcatcagctgtacttggtgcaattcaattacttagagaaacggttgtaccaatggagggaacatcacatcctgaatatagagtcagtgcagctgttggatttctcttcagtttcctatctccattttctaaatgcatcccagagcctggaaagtctctggccagcagttctactgattcagcagatacagatgatgttcgtaatctgccattatcaacacgtcgagaaacattttctagtgacgaatataaaccagttggtgaaccgattaagaagtatggtgttgaacttcaagcatctggtctgtggttacattacagtttttagtattgttatcatcatattctcctaatctttctgcagagcaagattttaattttctattgtgtaatacaggggaggcattatatgtggatgatattcctgctccaa

SEQ ID NO: 4374 - DNA, 1207 bp, Zea mays
  misc_feature (763)..(766): n is a, c, g, or t
  misc_feature (810)..(812): n is a, c, g, or t
  misc_feature (819)..(832): n is a, c, g, or t
  misc_feature (836)..(844): n is a, c, g, or t
  misc_feature (850)..(850): n is a, c, g, or t
  misc_feature (852)..(852): n is a, c, g, or t
  misc_feature (854)..(854): n is a, c, g, or t
  misc_feature (856)..(900): n is a, c, g, or t
  misc_feature (905)..(921): n is a, c, g, or t
  misc_feature (923)..(1065): n is a, c, g, or t
  misc_feature (1067)..(1178): n is a, c, g, or t
  misc_feature (1184)..(1198): n is a, c, g, or t
tgttcatgctgttcttttccttttgtggtctatcaggcgtcctgttttttgtgcatggtatggtatacacagaaatgacagtgagaagtaaatagtttgtcatttgttattaactccctggacatcttttctcagaaaagaagaaaaactctgcataaattgtctaagtggattatcaggagacctgagcatcattgcattaactaggaaatagttcaagaagaacgttaactccaaaacacactaacataaacacccatgaagattggaacctctcaactgtttactgaaacctgacatctctgtaaaacttgcacaactatccaataaaaagagaaagttattgccaatgccatgtatttttctaatactccattcttgtgtacatggaagtgctgatggaatcacacttataatgtagatgaatgtttctaacctcattattatgtttcgtgctgtgtattatctattatgcttaaacaggtcaaaagccataagcactcctgatgtgaatatttcaactgatgatggtgttcatgatgtaatctatgggataacggttagtgcaatcaacaatcctactttttgttactacttatacttcatgtacagtcctactttttgttactacttatacttcatgtacagtttacgtacttgaaccttagtttacaaaaccttttgttttatctaatcatcatggacccaataaatgaaaatggccatcatatttatgttcttttctgacctgccattttgtctnnnntatttcatgacttccatgcccattcctttttactgcaagtatgnnntacaagnnnnnnnnnnnnnntagnnnnnnnnnagtgcngnancnnnnnnnnnnnnnnnnnnnnnnnnnnnnnnnnnnnnnnnnnnnnnatatnnnnnnnnnnnnnnnnnannnnnnnnnnnnnnnnnnnnnnnnnnnnnnnnnnnnnnnnnnnnnnnnnnnnnnnnnnnnnnnnnnnnnnnnnnnnnnnnnnnnnnnnnnnnnnnnnnnnnnnnnnnnnnnnnnnnnnnnnnnnnnnnnnnnnnnnnnnnnnntnnnnnnnnnnnnnnnnnnnnnnnnnnnnnnnnnnnnnnnnnnnnnnnnnnnnnnnnnnnnnnnnnnnnnnnnnnnnnnnnnnnnnnnnnnnnnnnnnnnnnnnnnnnnnnnntttttnnnnnnnnnnnnnnnccccccccc

SEQ ID NO: 4375 - DNA, 641 bp, Zea mays
  misc_feature (354)..(364): n is a, c, g, or t
  misc_feature (375)..(384): n is a, c, g, or t
  misc_feature (410)..(412): n is a, c, g, or t
  misc_feature (424)..(428): n is a, c, g, or t
  misc_feature (482)..(486): n is a, c, g, or t
  misc_feature (500)..(504): n is a, c, g, or t
  misc_feature (520)..(525): n is a, c, g, or t
  misc_feature (529)..(532): n is a, c, g, or t
  misc_feature (536)..(575): n is a, c, g, or t
  misc_feature (582)..(586): n is a, c, g, or t
  misc_feature (591)..(593): n is a, c, g, or t
  misc_feature (606)..(629): n is a, c, g, or t
  misc_feature (631)..(638): n is a, c, g, or t
ggcggtacttggtgtctcagtgactaaccgactattgtaaagtagaaaggtaatctgtgtaggccagaggaaagttttgtggaatcacctacgagttcgtttgttgtaaatcgatgcgtaataaatacgcttctgggagacagagacatactgaatctgaccctaaccccaccagtaagatcaagagctaactctgaactttaggatcccatttggttacgaggcatatccctgtatataattgtcattgtcacggaggttcttatcctttagcagttagtcttctatctgtatcgtaattgatgagcaacatcggttttatatgatgatgtgatggagaagcaaaggtgtaannnnnnnnnnngcacacgtgcnnnnnnnnnncgctctgaggttgggatcgggagtannngcaggtgtttcnnnnnatcctgtgtttccgctcggctagaggtcctgtgattacgacagatttagggctnnnnngggaattggatttnnnnngcttactatgggaagnnnnnncttnnnnctannnnnnnnnnnnnnnnnnnnnnnnnnnnnnnnnnnnnnnntgataannnnntgttnnnatgcctaagtttnnnnnnnnnnnnnnnnnnnnnnnnannnnnnnngta

SEQ ID NO: 4376 - DNA, 356 bp, Zea mays
cccgccggagattggccgctgcaagaacctgaccacgctcaacgtgtacagcaaccgcctcaccggcgcgattccaagcgagctcggggagctcgccagcctcaaggtgctgctcctgtacggcaacgcgctctcgtcggagattccccgctcgctcggccggtgcgcgtcgctggtttcgctccagctgtccatgaaccagctcaccgggtccatcccggccgagctcggagagctacggtcgcttcggaaactgatgctccacgccaacaggctcaccggagaggtgccggcgtcgctgatggatctcgtcaacctgacatacctgagtttcagctacaactctctctccggac

SEQ ID NO: 4377 - DNA, 352 bp, Zea mays
ggacggggttcgaagacatatggactgcattgatgttgtcgcagtaaaccaaagtggtacgatgcaacgaatgacgaagctcagcaagaagctgacgaagccaggtggattcagctacgatgttggcgacagcacggtactcagcttcagcactggaacgagacacagtcacctagcgtctggaggaccaggaaatcaggttatcaccaaggaatactgcaaagcctgaagtggatcggcgtgtgtcaggacacccagcccagtcagcatcagagtaggcaattagctttgcctgagaagaagggcgtagctggagacccaagtgcagagtgccacgaacatagcggagaat

SEQ ID NO: 4378 - DNA, 404 bp, Zea mays
ggagcgcttcgacggtccaaacgtccgcttctgtgcaatcggtgatggccacgaggagtgcagtgctgcgcaggtcatgaaatggccattcatcaagatcgagttccgccctgaagcccatcacaggttccctggcctagacttgcccacagtgcagacctacatggatgtgatatacgagtcatccagcaaagatggttgaccgacgattgatgtcgattctgttttctcctctgacctccaccacccatggagctattgtttgaggaaactgtaagcaaagagatgtcgtgggaaaggaacgtgtcgtcctccctagatctttcaccttggcgaattaggaggcaggtgtgataaataagagtcttgctagttcgtcgtcgtcgtccatgttgtcatagatc

SEQ ID NO: 4379 - DNA, 559 bp, Zea mays
tgcccgtgagttcatggtaaagaccaggcgaaggaaggtaagggatatagttgatttatggcaaccatatattcgtaacttttatcgtagttgatttataagcaaccatataatttgctcccgtaacttttatcatacagtaaaaatccttgtcagtgttatactagccataatgctaactgtatgcaccatcacacttgcagggcatgagtgaagatgtgagcatcaataaattcttcgacgaggccatgatgaatgagctggcccaacaggctgctgatatccacttgcaaatgatgtagtcaaaaagcgagatgaagtgcacacgtggaagatgcaaatgccctcagcttcttcataccatacatgctgcagatgggactgccggagttccagtcgcacctttatgctggcatttgcccctacctgtttcgttttgattaacacattatgattgctgggtatcatgtagcgaatgtttaaagtgggtaccgtatgcaaatcatgtatgtactgtactagtttttacaccatctgaccaatcagcacccttgaggac

SEQ ID NO: 4380 - DNA, 345 bp, Zea mays
gccaggacgcgtgctgcggacagggcccccacaacggcctgggcctctgcaccccgctctccaacctgtgcgccgaccgcagcaagtacgtcttctgggacgcctaccaccccacggagcgcgccaaccgggtcatcgtcagccagttcatgtcaggctcgctcgactacgtcagccccatgaacctcagcaccgtcttgcaaatggacgccgcatttcaccagatcgagtactgactcatcgtcccgagagagtagagacccaaccaacaagcctgctgtcgtctacctcgtttcgttttatatctctgtgactgccgtgcgtgtgtctgtgtacgatcacata

SEQ ID NO: 4381 - DNA, 853 bp, Zea mays
  misc_feature (24)..(26): n is a, c, g, or t
  misc_feature (743)..(746): n is a, c, g, or t
  misc_feature (760)..(765): n is a, c, g, or t
  misc_feature (774)..(779): n is a, c, g, or t
  misc_feature (787)..(788): n is a, c, g, or t
  misc_feature (795)..(798): n is a, c, g, or t
  misc_feature (803)..(807): n is a, c, g, or t
  misc_feature (809)..(816): n is a, c, g, or t
  misc_feature (820)..(842): n is a, c, g, or t
  misc_feature (850)..(850): n is a, c, g, or t
agagctgggaaacgtgatagcaannntggttgcaaatgtgacagagctgggaaacgtgacagagctgggaacacgggcaatggatgcaaatgtggttgaatcgggtgcccagttcgagaacatgaccctgtatgttcaggctggcgaccttggccggcccatccctctgctcactgacctgcctctaacagatgatccgatcatcatattggcgttcacggtcgattcaccaggtgagaaccatataaatactctgctaatagaagctcagatctggaaagttccagagaaacatatgatgcctacaaagggatggagaaactccatacagtttgagccctgtattaggatctgtacatagggacagaatggtgtaagtatgttctgaatctaactaagtggttggtcacactattttgaacgtatactaggattttgcttctcaagaaattttattggttatccatctatctacggtattattattcccgaaaactggatccactggatagatagtatcagtgagcagcaaatgttaagtattccagtttaccatatatgacttcgatagtttttctgaagttcagtctaaagcgctattcatagtttaaggtgtattggcaaaggtaaggttgtattcgtagtttgatgcaggtcgatatggagtgccagtactgttaaaaccaatggtcatgctaaaaacgatgcccaattttaagtgggttaaccaagcttcttacctnnnntatgtgacctagtnnnnnncatttttcnnnnnntaaactgnngctttcnnnnatttnnnnngnnnnnnnnaagnnnnnnnnnnnnnnnnnnnnnnnatactttngaa

SEQ ID NO: 4382 - DNA, 383 bp, Zea mays
gtagaccttctctaccaaaaagctcaataacacatgcataatgcatggcccgtggttttatcctcagattttcagtcatcaactggaaaatcctcttcccttcgtcaacaagacctgaaaacctacatgcattcagcactgccagaaaagttacatggtttggcacagcaccctcagctatcagcctctcgaacatctcgatcgccttatctcccatgccatggtagccgtatccagctatcagagcgttccatgagatcaagttcctcctaggcatcctctcgaagacatatctcgcgtcctccattcttccccatttgcagtacaggtccacaagcgccgtgttcccaacaatgtccagtggcaatcctctctggatcaag

SEQ ID NO: 4383 - DNA, 503 bp, Zea mays
cgtacgatccagagtccggtgccaatgtgttgctgtacccaagcctggtggagcagctccgccagaccgagctcgagaggaaggagagcaagtcgctctccaagatgccggcgggggcggcggcgggggctcaggaggatacgacgtcgacgtacctgcagatgagcggcgaaccttccgctaacgaaccgaagcttggatcctcatcggcgttcagacgcctttgccaaaaagacgctacgtatcggctgtattcgcgcagggtacgtacgtacgtacgtagctcgttcatcatccacgtcgtttgatttggttgttgatcgatgacatatatacatgatgccccactacgtaccaccaggtcaactgcatcaacaggaagatcacgaagctccagcagactgcggctagggttggcccgagggggctgttcgccgtgaagcagaagatggaaatgtacaagcgcgagaaggcggagctttacgacgtgatcaacaaaggaa

SEQ ID NO: 4384 - DNA, 705 bp, Zea mays
tgctacagacctacagctatgaacactttttgagtatctgacatcgtttcttttagcaaattccctttccccttcatattgttgtttcactatttttaaaacattaaatgttattatgaaagatttaggtatccattttgtgtagttaattttgagccatgactagaatgctaaaaggctatccatgtgcctgaaccttgacttgtgggttctgttgggttttaactctagcctatcccaatttgtttgagactaaaaggctttgttattgactggaatgctaatacaatatgaattcttatgattttcagaagccaatataggactgatgttcctcctcaagtatctcaaggtgattccagtgctgtccattttgactttgagactcagagtcaaaacccaccattcaagggtcttagcagaaatgatgtactggatggttcagatagtgctgaagcccaaaacacacaagaaccttctactcgatggggtctaggggactcatctaatttggcatctggccttgaggatgcaaacccttcatatccttatcttcctacagttcttgaggagcctggttcttctttctccgaaggtaattattattgaattaagttcgtattgtttaacgctgcatattaatggatgcctattatgaacatacagctgcagaggatgatccattgccaggcatagaagggcttc

SEQ ID NO: 4385 - DNA, 566 bp, Zea mays
acgtggatgtacttggcagtccctgtcgtcttctatgcctccgagagaagtatcagaaaaattcgtgagcaaagctatcgcgtgagcatcataaaggcggcaatctacccgggaaacgtgctctcactttacatgacgaagccaccaggcttcaagtacaaaagcgggatgtacatgtttgtaaaatgcccagacgtttcgcctttcgaatggtacgtcgtgacaatgccattttccatctgcaatgcttatctagaaaattaaacgaatagatccgttaatgtctgcgctgcaggcaccccttctccatcacttcggctcctggagatgactacttgagcgtgcatatccgtacgttaggtgattggacatcagaactcaggaatctgtttgggaaggtcagttcactgagcacaacacaaagggatctattaaagtttgacatgaataatatgcatatatatatatatgcatgcaggcttgtgaagctgaagtaacttcaaagaaggctacactagctagactcgaaacaactgttgtggcacatggtctcgcagaggatacta

SEQ ID NO: 4386 - DNA, 350 bp, Zea mays
ggcttacatacatggcatacatggctcagcagctcgtcgcccggatcacaatggaggtggcgccatcgaagctgccgtcgacgatggccaggtgcgctaggctcccgaggaacctcgacacgatcgcggaggacgacgacgacgacaaggaggcagcagccatggagtcgacaagggagctgcctctccgcaatgcgagccgcggcgtgcaggtcgtcgtcgtcgtcgacgcccctgtgcactgcgccgacaagctggcctgctacctcgcccccatggccaagaccgagtgcctcaagatcaagatcaaagcctaagtttgtcaggacatagagagagacgagggtgag

SEQ ID NO: 4387 - DNA, 381 bp, Zea mays
cggggtccgcggccttctcagggttgacatggccagcgccagtggcgaaccagtctgccgccacgcgctgttcgtcgaggatgggattgccggcacggtcggtggcatccgcggtggtcatgatggccgacttgatggcggcaggtgaccagcgagggtgcttgctcttgatgagcgccgcgacgccgctgaggtgaggcgccgacatggacgtgccggagatgacgttgaaggtcggtccagggaggagaggtgccgacgacggcgggccaacctggaacggccacgcggcgagcacgttgacgcctgggcccgtgatgtcgggcttcagaatgccggggttctcgaggctaggcccacgagaggagaagaagacgatcg

SEQ ID NO: 4388 - DNA, 378 bp, Zea mays
ctggtgatgttgcgtgcctggccattgcaccggtccctgaggggaggcaaaggtccagatttcttgccgtaggatcctatgataacaccattcgtatcctctcattggatcctgatgattgcctgcagcctctaagcgtccagagtgtatcatcggcaccagagtcactcctattcttggaggtccaggcatcagttggtggtgaggatggtgcagattatccagccaaccttttcctcaatgctggtttgcagaatggtgttcttttccgtaccaacgtcgacatggttacgggtcagctatctgacacacgttctcgattcctaggcctgagacctccaaagctgttcccttgtatagttagccacaggcaagcaa

SEQ ID NO: 4389 - DNA, 517 bp, Zea mays
  misc_feature (371)..(385): n is a, c, g, or t
  misc_feature (387)..(387): n is a, c, g, or t
  misc_feature (389)..(396): n is a, c, g, or t
  misc_feature (404)..(404): n is a, c, g, or t
  misc_feature (406)..(406): n is a, c, g, or t
  misc_feature (408)..(421): n is a, c, g, or t
  misc_feature (437)..(439): n is a, c, g, or t
  misc_feature (470)..(474): n is a, c, g, or t
  misc_feature (486)..(504): n is a, c, g, or t
  misc_feature (508)..(514): n is a, c, g, or t
caactgcacgtcccttgtccggttccgagtgagcggcaaccacatcaccggcgcgataccgaccgagatcggaaggcttggtaacctcagcttcctggaccttggttcgaaccggttgtccggctctctgccagcagagatatctgggtgccggaatctcacgttcgtcgacctgcacgacaacgctatttccggcgaactgccaccggagctgttccaggacttgctctctctccagtacctcgacctctcctacaacgtcatcggaggcactctcccgtcggacatcggcatgctcacctcgctgacgaagctcatcctcagcggcaatcggctgtctgggccggtaccaccggatattggttcgtgannnnnnnnnnnnnnnantnnnnnnnncctaacgnantnnnnnnnnnnnnnntctaaaatttgtttgnnntcacagtttgaggactttgcaaaccacaatnnnnntacacttcttgnnnnnnnnnnnnnnnnnnnatcnnnnnnntaa

SEQ ID NO: 4390 - DNA, 630 bp, Zea mays
cagagattggtatcatgtcgcagtgttgcttggataaaaatgttagaagtgcaggccctgcatattttgctaatgttgctattaagatcaatgccaaggttaatctcaacttgatctcttcacaaaatttgttgagaagcatggtgctaatgtattcattctttgcagtttggaggaagaaacttagaatttgctaatcccaaagaaagcttaccgggtgttacaattgaaccaacaattatatttggtgctgatgtcactcaccctgccgctctagatgataccgccccttccattgcttctgtaagatcttttctgtttacagtagggatagtatcatatatcattataataacactttatggttctatgtaggttgttgcctcccaagactggcccaaggtggctaactataatgggattgtccgtgcacaaggtcatcgtaaagagctcatcaatggcctggaagacattgtcaagtacgatcatcgtaatctctgaaatttaaatgacaccccactgagagtttacacccgaataagagttcctcaatttacaaaatatctgcagggaactcctacttgcattcgaggagaggtctaagcggagacccaagcagctgatcttcta

SEQ ID NO: 4391 - DNA, 366 bp, Zea mays
cggatctggtgttcatagtagaagaacgggcgcaccccaggttcaggagagacgggaacgacctcatctacactcataagatctctctggtggaggcattgacaggctgcacagtccaagtgacgactctggacgggcggaccctgaccgttccggtgaagtcggtcgtcagccctacatacgaagaagtcgtgccgggcgaaggcatgccgatcacgagggagccgtctaggaaggggagcctgaggatcaagttccagatcaagttccccactagcctaacaggcgaccagaaggcggccatccaacagcttctgtcttgaagctctctctctctctctctctgtgtgtgtgtgtgtgtgtaca

SEQ ID NO: 4392 - DNA, 307 bp, Zea mays
  misc_feature (301)..(303): n is a, c, g, or t
tcgctgttgaacctccatatcggcacaggtgccactctgcccttcgaggcatgctgctgcctatgtgctttccgcgatcgaaagagagactggatgtcatcatggccttgctggtcagctagagctctcgccgaccagccattgttgtcctgcttgtcgatgtcagctccgtgttccagcaacaactcaaccatctggacgttcccgtcacagaccgcgcggtgcagcggcgtggttccatctttcattgagctgtttacgttgccgccgtaacggataatgttctcaagcagctcaatgnnngacg

SEQ ID NO: 4393 - DNA, 372 bp, Zea mays
cagccacataaatgataagtcataaactactagaatgatgctttttaagcagaaacatcttacagatttgctgcggttggcagaagagggatactcttataaaaaaatatagttcatcaaccaaattgtgatcacagtagttatgatcagattgaccattaaactttagtttgatgggtccattggtaaggtcaccaatcatagtaaaatgatgctttttaagcagaaacatcttacagatttgctgcagttggcagaaggatactcttataaaaatatgtagttcatcaaccaagttgtgatcacagtagtgatgattgaccattaatagaaacacactgagcattgcgttgcatatgtgtggatagagag

SEQ ID NO: 4394 - DNA, 663 bp, Zea mays
tagcagtctcatgatgtaatattctcctccatgttgattcatagtgcttacctattaccattgatgtgggaacaaataatgaagacctactgaaggatgaattctacattggcttaaagcaaagaagagcaactggccaggttccatgctacttgtattggctatgctcgttcaattatcatgattcatgttaacctttttgattgtggattccaattgcttatatccattttctgaatcaggaatactctgaatttctggatgagtttatggccgcagttaggcagaactatggacaaaaagttcttgtccaggtatggaaaataattgaaaataaactatttgtttcctaacgaactgtagcagaccactttctaaaatttgtttggcctcacagtttgaggactttgcaaaccacaatgcatttacacttcttgagaagtacaggacaaaccatcttgtatttaatgatgatatccaggtaatcaaatcagatgctagttagtttatcttgcttttcttaaaagccaatgaattttattccagacagcagtactaactctgaagccatgatatttacagggcacggctgctgtagttcttgcagggattattgctgctctgaagtctgttggtgggactctagctgatcatacattcttg

SEQ ID NO: 4395 - DNA, 357 bp, Zea mays
gtacgaggcgaggctgtccgtctgcaagtacctggccggggacgacatcagcgccgccgacctctgccacttcggcttcatgcgctacttcatggccacggagtacgccggcttggtggacgcgtacccgcacgtcaaggcctggtgggacgcgctgctggcgaggccctcggtgcagaaggtcatggcaggcatgccgccggattttgggtacgccagcgggaacataccataggctctagagcggtgggcgtccgtcattctgcagatctgaggtctctgaacctcagcgtttccgataaacatgcatcctttatctactgtttaaaaaaacaaacctggtcggtgcataggtat

SEQ ID NO: 4396 - DNA, 331 bp, Zea mays
cgtggacgacgacgacgacggtgggtcttcgagccaggccgcgttcccgctgcccgtctacatggccgcgtcgctccagtaccacagggcgaactactgccctaagctgctgaacctcggcgacaacgggctcaccggcgcggtgccgccggagatcggccgcctgaagggactcacgcagctcaacctgagcttgaacagcctgcgcggggaggttccacaggccgtcggcaacctcacaaacctggaggtgctggacctgtccagcaaccgcctgacgggcgagatccccagggcgctggagagcctccacttcctctcctacttcaac

SEQ ID NO: 4397 - DNA, 389 bp, Zea mays
ccgaagtgcggagactcgtgccgggacaaggcccgcgccgagggcagcagcaactacgcgtcagcatgcgagcctgccgtcgcgcccttcaagtgctgctgcaccgtcaaggacccacaccacccctggcctccaagctcctcctccaagaccaacgcctaataaatatgtccagtccaaacattatatttagatagcatgcatatagtgtgcctgctgctatatatatatgtcatcgaattaataatgaagatggggtggtttaattatattccactataccatgacataaaattagcgacaaacatttatcggtaaaaataggcttttggcgacagccagtctgtcgcaacataataccatcacagcatccgtcggcatatagtatt

SEQ ID NO: 4398 - DNA, 369 bp, Zea mays
agaaggtcttcagctctcatctaatgtcctcactaagagagatgtgtggaacgataccttcgaccacatcttcaccgagctcggccaaccacaacgcctggaagctgtcgagcttccctgccacccgcgtcatcgactaccggacttctcccagctagagttcactaacaaggtgtttgctacacaggaggtgttcgaggaattgcctcttagctcccttgctgcttgggttagtattgggaagctcttagcctatctgtgttggaaaattccttggcccccaccacatatgcatgttgggttggggtgtggcagtgaggctttacattcaattccatggctatctccatccatagctagtaccaacga

SEQ ID NO: 4399 - DNA, 411 bp, Zea mays
aaagggaacacctgcctccacatcgcggctctctgcggccaccagaacttctgcagcgaggtcctggcgcaggagtcgcgtctccgtcgtcccggcccgtcgtctctgctctccaccaccaacgacgacggcgagacgccgctgctcgtcgccgtgaagagcggccgtgtctctctggcccttcatctgctcgaccagcactactcgaggcacaatctgctggtggagcatcttcttaagcaagacactggcaaatgcaacgttctgcaccacgccatccgcaacggctacgtggacctggcgctggaactgatccagcagcagcccgcgctctcggagtcctgcaacgcgcgcgaggagtcacccatgttcatcgcggttctcaaaggtttcaggagcatctacatggag

SEQ ID NO: 4400 - DNA, 402 bp, Zea mays
ccttctacactggttcaatccttcgttccaatcctgctttccattccgtatatgcttttaacccgagaccgaaggtacctgttcatatgttacacttggaaaacattgttaaatcatgtttttaaggacattcggaggacgaaggcccccaacactatcctcgcattcctaaacgcgcttccctactttcggtacccctaggcaaaccaccatattttgatggtaaatattattgtatgtggagtgataaaatgaggcaccatctaacctcactccacgaaagcatttgggatattgttgagtttggagcgcaggcaccacaggtgggcgacaaagactacgactcggatgaggccacccaaattaggcattttaattcccaagcaacttctatactcctcg

SEQ ID NO: 4401 - DNA, 1220 bp, Zea mays
  misc_feature (445)..(453): n is a, c, g, or t
  misc_feature (717)..(727): n is a, c, g, or t
  misc_feature (732)..(736): n is a, c, g, or t
  misc_feature (746)..(755): n is a, c, g, or t
  misc_feature (764)..(764): n is a, c, g, or t
  misc_feature (769)..(774): n is a, c, g, or t
  misc_feature (786)..(1094): n is a, c, g, or t
  misc_feature (1100)..(1216): n is a, c, g, or t
tttcaaacacccacaactaatatcccaattatttgttagctaactcacagctaacaattagttcattagctgactcaacccagctaacaatttgttagctagctaactaatatctctaggggttccaaacaggaacctatgtacttaggtgtacactatgtctgttacgtacaacacattaatggatggcatttgcagtgatgttcttgatcgagctatgatacttactggcaggcttattaaaatggcttttaagccaaacactatcacactcaacgttttcctttctcatttctgcaagcaaggatttgggaatagagccctcatgtgggctgagaagctcagagaagattcttttgttttttatggtgctacaagaaatataattgactgggcacgaagggaaatggaggatgacccccaggctaacaacgaggacataggnnnnnnnnntgcatatcctcatgtgttttacttctgagcagccgcaatctgatgaggttgtttcttttctgtcagacagtaaagagtaaatgcttgtatggtaaagcctagaaccactcctaaggctattaccaactgatctcctatcccatcccctatctcaaactccactctacaaacagtgtcaaacaatatcatctatagttccacatctaaatgtgatatctttgctctgtttgggaaaagccttctccaggcacatggcaggggctnnnnnnnnnnntgctnnnnnatgaactgcnnnnnnnnnnatgaatatntcgtnnnnnngacatacctgannnnnnnnnnnnnnnnnnnnnnnnnnnnnnnnnnnnnnnnnnnnnnnnnnnnnnnnnnnnnnnnnnnnnnnnnnnnnnnnnnnnnnnnnnnnnnnnnnnnnnnnnnnnnnnnnnnnnnnnnnnnnnnnnnnnnnnnnnnnnnnnnnnnnnnnnnnnnnnnnnnnnnnnnnnnnnnnnnnnnnnnnnnnnnnnnnnnnnnnnnnnnnnnnnnnnnnnnnnnnnnnnnnnnnnnnnnnnnnnnnnnnnnnnnnnnnnnnnnnnnnnnnnnnnnnnnnnnnnnnnnnnnnnnnnnnnnnnnnnnnnnnnnnnaaaaannnnnnnnnnnnnnnnnnnnnnnnnnnnnnnnnnnnnnnnnnnnnnnnnnnnnnnnnnnnnnnnnnnnnnnnnnnnnnnnnnnnnnnnnnnnnnnnnnnnnnnnnnnnnnnnnnnnncccc

SEQ ID NO: 4402 - DNA, 404 bp, Zea mays
ttgtgtcctcttctaaattttggtgttgaaaacagtcaaactactgccaaatgctgctctctagtttccatgagttcctgaattaatgatccttgttttattagattacatgtcctttgaatttactttaggaaatttcaatttgaagtggagtaatcacaataaactgacatattctcctgttcagaaaaaagtgaaagaaaacaaagaagtggcttgtgcaatacatgctcactagatcagaattcagaactgtaggccgttctcttaagatattatctagctctagtgtcttgaacatctcatgaaagttgtttcttgggttcttttaggagatttcaagcactgtatgtcagtgagaacttagtaccatctggtggggagattgatgagcttggtggtca

SEQ ID NO: 4403 - DNA, 692 bp, Zea mays
  misc_feature (372)..(372): n is a, c, g, or t
  misc_feature (388)..(389): n is a, c, g, or t
  misc_feature (391)..(391): n is a, c, g, or t
  misc_feature (409)..(413): n is a, c, g, or t
  misc_feature (420)..(425): n is a, c, g, or t
  misc_feature (427)..(429): n is a, c, g, or t
  misc_feature (431)..(440): n is a, c, g, or t
  misc_feature (451)..(476): n is a, c, g, or t
  misc_feature (482)..(494): n is a, c, g, or t
  misc_feature (496)..(501): n is a, c, g, or t
  misc_feature (503)..(504): n is a, c, g, or t
  misc_feature (510)..(513): n is a, c, g, or t
  misc_feature (518)..(524): n is a, c, g, or t
  misc_feature (528)..(532): n is a, c, g, or t
  misc_feature (534)..(534): n is a, c, g, or t
  misc_feature (540)..(548): n is a, c, g, or t
  misc_feature (550)..(556): n is a, c, g, or t
  misc_feature (558)..(558): n is a, c, g, or t
  misc_feature (560)..(563): n is a, c, g, or t
  misc_feature (565)..(571): n is a, c, g, or t
  misc_feature (578)..(579): n is a, c, g, or t
  misc_feature (581)..(587): n is a, c, g, or t
  misc_feature (589)..(590): n is a, c, g, or t
  misc_feature (593)..(598): n is a, c, g, or t
  misc_feature (601)..(605): n is a, c, g, or t
  misc_feature (608)..(616): n is a, c, g, or t
  misc_feature (618)..(618): n is a, c, g, or t
  misc_feature (621)..(633): n is a, c, g, or t
  misc_feature (637)..(637): n is a, c, g, or t
  misc_feature (641)..(653): n is a, c, g, or t
  misc_feature (659)..(663): n is a, c, g, or t
  misc_feature (666)..(668): n is a, c, g, or t
  misc_feature (670)..(681): n is a, c, g, or t
  misc_feature (683)..(689): n is a, c, g, or t
tctcttctattcacaactcgtcttcgatctgtgctcgcacctcttctcttcctctccctgtcttccctgcccatctactccatccgcatggtgaggtccgacgccatgagctcggacgctgctcgctccagtgctagtgactcgacaagctcgcaggccgcacgccgtccatcgcagagggagattctgctgctgggtgcacaccgtccattcgatcagggatcttcacccgccggtgaacaccgctcattctgcaacatctccggcgaccatggggtcggcggcgccggtgtgcgcagccccttcgtggccccagggcgttggtttcatatgtgtatggttaatttatgtgacctgttctgcagcaaaacnaagtaccatctggagnngngattgatgaacttggtgnnnnncacttannnnnnannngnnnnnnnnnntctattctccnnnnnnnnnnnnnnnnnnnnnnnnnnccctcnnnnnnnnnnnnntnnnnnntnncccctnnnnccttnnnnnnntttnnnnntncccccnnnnnnnnnannnnnnnancnnnntnnnnnnntcccacnncnnnnnnncnnccnnnnnnccnnnnnccnnnnnnnnncnccnnnnnnnnnnnnntcgnctcnnnnnnnnnnnnnccctannnnnacnnncnnnnnnnnnnnncnnnnnnnccc

SEQ ID NO: 4404 - DNA, 220 bp, Zea mays
tctactttttcgtcacctacaattccatcgcttcatacaacatggtaagatgtacaaatcatgcaaggcatgaacacctccagtatttctggtgaaaaaactttgaaaccaggaaactagcagtttaaatactgtaatctaataccaaaaaaaactacaattcacaccagcttccgtcaaaaataaatgccacgtccaaacacctatagcagctcatcga

SEQ ID NO: 4405 - DNA, 1108 bp, Zea mays
gctgcgtgggagggggagcggcggcatcaacagccgcagaggaaggcttactctgaagcggaggggaagcaggctggcattgctactgggagcatggcgaggtgctaaggacgtgcaggttccgcaatcaccgcatcttggtgttcttatttcaggtcgtagtgggagatgaacctctcaccgcccaagatgtcggagccatcgcttgaaagtgacggtatgtcatggatcacaattttggcattgattcagttcagaacttctcaacttgtgttgatgtctgcatgggatagtggattatgcaatgttgtcattgtgcattgatgtttccaaacaaatgatgaaaaccagcttgctcttgtatatatgcacgattacattcgttcattcatattcttcattgatttgctcaaaaagaaaaggttcatgcattgctcggcttcactcatggttcacatgttctagtattattggtattcactgaacctcctcttgtctgtagccaagtacgaatagtagggttcacatgaactctgctttctggtggcttcctgttccactcatgtgtgtttggcattttgcaggggaacaaaggtgtctgaactcggagctatggcatgcatgcgcagggccccttgtgtcccttcctgtggttgggagccgggtcgtctactttccccagggccatagtgagcaggtcggtcactcggtcacaaagcagtttctttgaataaactagacatgaccgagtttgttgacttcagactatcaggttttgtgaatggggaatgaaaatgatcacttgagctgctacctttctggttcttttgattgtatatgtcaaatggatcgactgaacataacacttccgaagattcaactgaaaaattactttggccaactatacacataaagataatcttgtattcaaataatcaaatttgttcaaaggttgttatcacttgaaatcactttttaagtcaatctagttttgtacaggtttatttatagagaatcacttgctctcatgcctttgtgcttaagaggttcttttgtttgtttttattttcatgcaggttgctgcatcaactaataaagaagtgacgct

SEQ ID NO: 4406 - DNA, 447 bp, Zea mays
attgacggatcgccagcgacattcccagcagatgtatgctgatgggaaccagacccgccggcgggcatggcggccgacgaggaaggagcatccatggtagccgctgatggatcgtcggcgacatccccagcaggcgtatgccgatgggaaccagaccccccggcgggcattgcggccggtggggaaggaacgtccatggatgccgaagaagaggaggccctgacaggcaaagggtggattaaaacctgtcgacataaaagctacgctcgagcgaacattgggagggcctaagcttacttgggaccatgaaccttccagtggccttggaagcgaggcacacgttgtcgttgctgctgctgctacccctgctgctgccactgcccccgtggtgatggcggtcggtctggcacaagcggcggcggtggtggtatgtgatctgaagatggt

SEQ ID NO: 4407 - DNA, 442 bp, Zea mays
tctaacttgccgtggatgagcagcagcgtcgacccaatctgcgcagccgtgccggtccacagcagcaaccccgcagcaaccccgcgtcgcacgcgctctgacccgatctgcagcctcgaccacgatgtcgaaaaccccggtgagcctctcgctgtcccgcatgcattcttcgtttcaatgtaatgatcaaatctgtaattgtgtatatcgtttaatcgcagcctttatcgtcgtcgcgccttacgcatcgcttgatcgatggaagtctcactcgtgaacgacatgtgcgactcagtcgattcggccaggttatttgatgtgtgcgatttatagtttgtctaattatgttttggtcgatgcggtgtatattggtgtttgaatatgtatgtgtataaaatattttggttatatgcattggtagggtcgtatttgcgatttgaaa

SEQ ID NO: 4408 - DNA, 1221 bp, Zea mays
  misc_feature (1158)..(1161): n is a, c, g, or t
  misc_feature (1210)..(1214): n is a, c, g, or t
  misc_feature (1216)..(1218): n is a, c, g, or t
tttttgataactgagctaatagtttcatgatgacgtatagctgtatctttcaatcccaatattgatttagcatgattgcttagtttttgtggagtttctgaaacatgtgtacatgcttttgggtgcatagtctcactttgtctgacgcccaacagttctcactcttactagttcttaccgtatactattttccaataaatattgtaccctccagtaacctaaaatatataggctgtcttcatgttgaatgtatgtttcatcattttgcaacagggaactttacagtaacaacataagtgggccaataccacctgaactggggaacttgactaacctggtcagtttggacctgtacctcaacaacttcactggcggtattcctgacaccttgggccaactatcaaagttgcggtttctgtaagttaattcaattgccctggcaacagaagtgatatattcatgtggtactgtccatcaatacaggttgatcctgttagtataaattatctggttgttattcggtcttggtcatgatttatctgacaatgatgtggagaaatagaaaattcttacataacattaatatatgcatgatgtgcccattaataggtttgcacaaagttttcctccaaatgcactcttcagtttgtgttagtagacactaaggttttcataacttcagtcattcacttgtccgtttgtgtctccttctcttgattcttaaaatgaaaggcaaaaggcaaaatccattgtctagttcttgtcttgttacttattacattatctataagcttatctattgactattggagggattgtaacatttttatttccttggatatctacttgcaaggacagccgtcttaataacaacagtctttctggtcaaattccgaaaaccttgaccaatatcaacactctccaagttctgtaagttacctgttgcccttttatacatcattacagctgtccaggatggtagataacagcaaaagtgtttttgacaatcttgcagggatctatcaaacaacaatctctcgggaggggtgccatcaagcggttcgttttctctctttacacctataaggtaatctctggatgaattttggatgcttagttgcatcttctgatgcagctctcctgccagttgaaaacaannnnctgtgtcttatgatgttgacaactctgacccttttgtaacagtttgctnnnnncnnnaaa

SEQ ID NO: 4409 - DNA, 972 bp, Zea mays
  misc_feature (51)..(53): n is a, c, g, or t
  misc_feature (939)..(939): n is a, c, g, or t
  misc_feature (942)..(942): n is a, c, g, or t
acatggcttgcggtgttaacattctgggtgtcttttctttctgagtacctnnntaacgccattgaggtattcttctctaattcaacaagaaaggataaaaaagtcagcttttattaatctgtaaaagtgaaattcgttaaaggtagctttctaaagttgacagacaattatattttggtgatactgaagcactgccagggaaaatgttcatgttaaatttggaaatggttaaaagcagctatctctaggaaaaatgtaattacttactagttattattattaccatgatgtacatcagtagtattacaggtcatctgatacctctgcgatgatgtaactggtcactgttttgatctattgttgtcagggagcatctgattcattgaacctaccggtggcttttatcagtgttattttgcttcctattgtgggcaatgcagctgaacatgcaagcgcaataatgtttgccatgaaagataagcttgtaagtgttcaaatgagcttgagcttctctttcatggttctgttacttagttgttcagtattcatgcacgtgattatcctccctgcaggacataacacttggtgttgcaattggttcatcaacacagatatcaatgtttgtggtactttttttaacttcttattccattttccgacctctgcatccacattcccacttgttatgtcaagcataaaccttttgaaatgttagcattggtccactactccacaccttagtacttgtttatcatatcctttttttcattttatttttcttttcaaacattcagggaaaccccctgtctgaattttagttgtcaaggacacataagtacattactgaattacataaaatgccttaaattcttctgtctctgtgacgtttgacgtggtatatactttaatacagattccattttgtgttgttattggttngangatgggacaaaagatggacttgaattttca

SEQ ID NO: 4410 - DNA, 390 bp, Zea mays
gccatcatgggcaccactcggccacccttccgtggcgatgccaacaacgaaagatacaagggcacatgctataagaattacaagagtagtgtcttgcagtgcctcccacacgaactcccataagctgcgggcctcactctccgtgaacttgttcactccatacatgccctgcctttgattcaggctgagctcatccgtggtgatcccatcagccaacgacgtcgccaacttgtctgcgattccatccagctggccgagcagagtcaacttcccggtgtcacgattttcaacaagtgatgctaggtcgtcggcagagatctgaaacccagcagcagctttgacaccttgaggaacaacacgctcactctgaagtgaggcacctgagtagat

SEQ ID NO: 4411 - DNA, 370 bp, Zea mays
gacgtcctactatatagatccctcatccaaactcaactcgcacatgatgagcacggtcgagagcagagcgcgtccggccgtttccatggacaccatcagccttgacgactgggaggtcctgcctggccacaggactagctccttcctcatggacgcggcggagtgcaggcatggcgtcggcggcggtagtaaggaccagctctggctcggggccgagctggtcgtgatcgacatggaccacttcggccctacgtcgtcgtcgtcgtctcaccctcaccctcaccctcctccctgtgaccactgcgtcctagacgaggaagccaagcagaaaccgctcctgctaccaccgtcagaagacgcctatgcgtgt

SEQ ID NO: 4412 - DNA, 400 bp, Zea mays
cacaatggctgtcctcgtcctcctccttctcgccaccttcctcccgcccaccgccctggccgctttctccccgcccttctccttcttcctcgcctgcggcgccggctccaccgtacgcgacagctcagcgcgcaactttacaccggatgacggttacctgaccaccaaaagcgtcccggcggtgacgaactccaacgccaacagcgccgcctccccgctctacgccgccgcgcgcgcgtccagctccggcgccttctcctacaggttctctttccccaacttcgccgggcaggccgcgttcctcgtcctccgcctccacttcttccctttcaccccggccccgccgtccgccttcagcatctcctctgcgcgcttcgcagtctctgttcagcttcaggac

SEQ ID NO: 4413 - DNA, 396 bp, Zea mays
cactggtacctaggcatctggttcaacaagatcccagtcttcactccggtctggattgctaaccgggatgacccgttcaccgacccagacgcagaccccaataataagctcctccccaaacggactctgcaaatctctagagacgggaaccttgtagtagtccaggaggacaacaacgctcctcaaagaactgaaaccctagtcgtttggtccactggaataatcaccaacaacgcatcctccaagaccaccaccagcaccaacaccaacaacaccagcaccaacaccaccaacaccgtcgccgagctcacccacaatggcaacctggtggtgcgcgacgcctcggcctcggacgcgtccaaggtccggtggcagagcttcgactatccaacagac

SEQ ID NO: 4414 - DNA, 523 bp, Zea mays
gcagcagagaagccaaagccgccccgagccgtcagcgaagaagaggtgcgcgcctgcctgcagcgcctggacagtctcgagtcgctgtgcggccaccttgccaccaggcctgcgcagatcccggaggacaaagagcgcgttctgctgagctcgttcgagcggatccggtctgttgaggctgacctcgagaggaccaaaagagtaagctaagttgttgttatggtttatatatatatcacggaaacatcacagcatagtagcaatcggcgccatttgaaaaacctggcctggccttcctgcgtttcctgatccttctcactacttttgcttgcttgctggtcaggtgctgaacgcgaccgtggcgaagcagaaggcgctggtggaggaggtggctctggagtctgtgcaggagctgcctagagccaaggtacacaacagttcgccgattcaatgtcctccgccctcttccaatggtctgctggaatgaatttcgcccgccggtttcggtagttctgctaatgag

SEQ ID NO: 4415 - DNA, 797 bp, Zea mays
ctcgggttcggtgagtctagtggcttgcccagcgaaccatgacatctacagaaaaccagaaacacaactagttagcaagaaaaatggtggggttacattgcatggtcactacggaacactgaagaggacaacctacttactgaaaccgaaccaaagcaaaaagaataagttgtcctttttcagtattttctatgtaggtggactttgcaacttaaattatacatcaacgttgattttgctcatggatgtgatgaacctggacgctctttaagaaatgtgcttagtcaacagtacacctatcctcagccttcaacaggaggggtgtgtgcttggtgatgaacattactctctccagctcaaaatacatgtcactgccctcatttatacaacaccagaaaaatatgtgtcatttatttggcaagggcgaggaaggaaggggggaaatagatagttctaggatgacctgtattttgaaggaagttctgaatcagacggggtaacttgtaaagcaatatgccaaccacattcatcttcattctgtatagtgcctgagtcagaaatattatgaacatgtaactgatcctgaaaagagttccagacaaattccttcactctaccacacatagctcttctggatgcacagccaagggatgcacagaaatcaaatgatacgacagctgatcaactactgcataaatctcgcttgagctttcatgtctaatatcttcaactccaaattcatggatgctgttgtttatttcgattgaactaacacccatatcctttcttgttcctcg

SEQ ID NO: 4416 - DNA, 482 bp, Zea mays
  misc_feature (442)..(448): n is a, c, g, or t
  misc_feature (454)..(460): n is a, c, g, or t
  misc_feature (462)..(465): n is a, c, g, or t
  misc_feature (470)..(471): n is a, c, g, or t
  misc_feature (475)..(476): n is a, c, g, or t
  misc_feature (478)..(478): n is a, c, g, or t
tgcacctggactactgcccgagggtcatcttcgtgctccccttggactcatatatgtcgctgcctcagcttgagaccctagagatcatttgttgcggtgatcttagggagatctttcgctcatgggatcccaggctcgagaaccaagaggaggttgtcaagcatttccccaagctacgacgcatccacctccacaacctcccgacgctgcgcggcatttgtggccgcatgatgtcttcaccaatgctcgagactatcaatgtcacaggctgtccagcactcaggcgtttaccggcggtcggcggccgtctcgcgcagccacccacagtggtgtgcgagaaggactggtgggacgccctcgagtgggatgggttggaggccaagcaccacccttccctcttccgctccaagcactcatgccactacaggaagagtagttcagnnnnnnntaggtnnnnnnncnnnncgacnnaagnnantgaa

SEQ ID NO: 4417 - DNA, 435 bp, Zea mays
tctgcactggcaacatgttttttttatttaggcgccgttcggttgatagggattggagacccggattgattcctagccggattacttctctaatttatatagattttgataagctgaaataaatcctggtctattccggtgaaaccgaacagggccttaaagaaaaaaaggacgggcgatttggaccatcgattcgcgacgacgtgatgccgcccgtgatgcatgatggcccgatgggcgctggctcgcgcccatgccgccgctacgtcctcggacatgctattgctattgctgccgacgcggcctcctccgcaccgcgcaactcgcacgcttcttcccatcgacaaaattcgcggggggagtgcccggtcctgttcttccaggaaggtgcagtgcattgcagtgcacccacgacgcaaccagaaaatgctctca

SEQ ID NO: 4418 - DNA, 450 bp, Zea mays
gggggacacgacgacgaccacgagcagcaggcgtaccgaaagccgaagccctcgtacgggcacggggacggcgacgacgaccaccaggcgtacaggaagccgaagccgtcgtacggggacgagaggcccagctccggccggaagaagaagaatgtgagcgtaggctgccgaatggccgatgggccttgaactcgtaatctgggctgttttaaacatgcatggtgaaattacaggacgacgacgatgactctgatgacgacggcgcgaggaagccacgttacaaaaagaaagacgacgacgactcggatgacgatgacaggaagaagcgctacgagaagaacgaccgccgccgccgccacgactatgacgattgagctatatgcatgcagtctcgtatatacacatgtgctcgagtcacgcgttatgcaatgtatcatccccagtgcatct

SEQ ID NO: 4419 - DNA, 509 bp, Zea mays
  misc_feature (486)..(489): n is a, c, g, or t
  misc_feature (491)..(494): n is a, c, g, or t
ctatctttactcatgcatatatagacttctttgtttgccttcttgccaaggtgttgtttatgatattaaaaaaatggcagagagaaggacttgttacttgttccatactgcaaagatcgtgatatggatataatccaatggccaccattcctgcttgccagcaaggtatattattcttgtaacttgtttgccgtctatttctgtgctatctatttcgatgagttttttttccaatttttttatcgactgtatttcagattccaatagcattggatatggccgcagatagtggtggaaaagatcgtgatctaaagaagaggatgaaatcggatccatattttacttatgctatcaaggaatgctatgcttctttcaaaaacatcatatatgaactagtgatcgattcacgagagagagggtacatttgatattattatgctttcattcatattactacacccttgactgttaagggcttgtttgctnnnnannnnattcccctcaatccc

SEQ ID NO: 4420 - DNA, 382 bp, Zea mays
atgctatgacacatcttgatgaatttgaagtgagtttgtgcatgattggttagtggttatactttttttgttacttatcctattttaaatgcttgtgacagtgcaatctatatgccttggttattgaccttggcagacccaaattacatttcaaagttcatgatgccatcaaatgctgaatgttttaccattttatgtcacggtggtacctgattccagaagcaagattctgctggaaaagtaccagttttggttgtctaattgctgttcttttattctttaggtggattctgagtacattccggacctttcagcaaattctcctttgtgtgtgtctggaaaataccgaggaaaattcccagacacagtgaaagctaaaggt

SEQ ID NO: 4421 - DNA, 1203 bp, Zea mays
  misc_feature (1148)..(1149): n is a, c, g, or t
  misc_feature (1151)..(1153): n is a, c, g, or t
tgttgcagtattttgtatagcatcttggcattgtttttgagcactaatgttgtttggatgtcatgtatgcagcatgtgcaggaattccttaattatgctaaatttgtgtcgtggtgggtttcattaggtgtggcttcatcaattggactaggcaagttgtattttcgcacctctaaacactgagactctgaaataaaagcacattaataaaatgtcactggagtttgcttatgtcaccctttggtcctgtcctacaaatatttagttatcatgtcttaattgtatagtcttgaaggctttgaaacatatgtacttcaacaaattagttaggcagaaaaggcactttattttggttttcattgctgaactagtgtattaaaggattgatataaaccatcctattcctgcttagttcgtgtttgcaaccatatcagacttcataaagaaaacagttgaaggtgggcagggcaccaatcgcctgattacatatcaaatacagacaacaggtgaaataacgggcactagtttgcagtgaatagtggcttcactgtttaccttttttatgccataattatttgcttctcaatatctagctgtcacatgatccagatccttgccagttttttgtgaatggttcatgtttaactgattcttcatctatttcagtacactagatttagttaccctacaacaatttactgtacttgcacccttttttttgggctgcatgtacctagctgtctatgcagagcagcgacatcaataaagtatgcagaaagctgatgccttctttcccttatttggaaagttatttatggcctctgtatattcagttagtcttgagacattactctgtcatgcactcatgcttctataatgttatttggatctaccacattgaacagcctttttttccatatacagggcttgttaaagttggaaactgggacatgtaaatttggaatgctttattgctgcaactgcaatagagaagaaaactcattttctaagctgatgatttgaaatttaaatgcaggttctggtttgcatacatttgtgctgtatctgggtcctcatattgctctgttcactattaaggctgttcaatgtggtcgaattgatctaaaaattgctccatatgataccannannntaaaggttgggccatcatggcttgacaagaaatttcagaattggaccacc

SEQ ID NO: 4422 - DNA, 730 bp, Zea mays
tggagtgtttggtttgaggaatgatgtagttcatcatcttctctctcctcacttttttgtttggtttgtggaatgaagtgagttaatccatcaccaccttattcctcatagctagttgtttagtactaatatgtggaatggagtcatcccaccaaatttgaggaatagattcatgatgcaccacttcattttggatagagtgattcatcaaaccaaacacctcattacttctcggtccgatccgggcatgctctgtttcagttattgctgtagcctgtagggctgcctccacgagcaggcgcacgccaaggtttgcttcacgcggcagggcgtcgaacagcaagctcattatgaccacaggcatcgcagttcaacacttcacaggccgaaacgcctgctgcgtcgcttactattgtctgacactgacagaagttccatattgcacgggcggacgtctcgaaaccagccgagcctcgtggatttcgttgaggcccgacccccgctcgcgcagcgctggcgcacgttcacccgacccgattcaccttggccgttgcgcggagggcggcggggaacgggggcgatctcacatcggcgatgacgaagacgacggtgcagtgcggtcaggtgtcagcttgtcgctgtcagttggaactctggactcatcagagtttttactcctagtactgacgcattcgtcaggcaccgtcggttaaagttcgttacaacaacg

SEQ ID NO: 4423 - DNA, 519 bp, Zea mays
tcctgctgccggtcaaagtacaggcttttggaagctctttatgcaaggcactgattccctttgtttgtaggagagttaattgactgggatgcggcctccaaagctcctgaatggccttatgaactaatacctccaattttctatcttgggcagcagatgcctctgaaaattgaactgtaagtttgtggtgactaaatggataatcccctgtagcatcacctacagcaacccacctgaaacaacagaaggtataacattgtcatttccctgtagaactttcattcaggtatactcgtctatgtgaacagtcaaacactatggtacacaagtgacaaaattagtaacatgagtacagaaatacactcacctgttattgggatggtttgttacatattttattacttgcaacacataacgtgattgatgcttggtgacagaatcggctgaagtacttgccctaaattcttccagttctttagtgagaagttgtcctgctcttgtatttcttgctcccaaacg

SEQ ID NO: 4424 - DNA, 377 bp, Zea mays
gcccgtggccctccaccaggtgcggcacgcagcatgagaggagcggggagtgttgcggtcaggcccctacctgctctcaaggaaaacgtgaagcgtgtcatgttttactgctgagatgctgagctaccttcaccaagaaaatatcctgacttgttccatgtacccgcactgtttcggtgatactatctgacaccgaatttatgcattaagtcttccagtggtctggagattttaagtaacgcctgtttttattcgtgagttgtaacgctgcagttcgaggagctttagtgctgtatgatgtgtaaactatttgttgtaacttgtaagttgtaaccaattgttgtaagttgtaaccagccactatgttatggtcctgt

SEQ ID NO: 4425 - DNA, 393 bp, Zea mays
  misc_feature (382)..(387): n is a, c, g, or t
gtcgcaaatgagacaatgtgccggcctatacgccaactgactgaaatgaaggggcacgatacaaagaaccatgccctcgcatgctttggtggtgctggtccacaacatgcatgcgcaatggcaaggtctttgggcatgtctgaggtacttgtccaccggtactgtggaatactaagtgcatatgggatgggtcttgctgatgtcattgaggatttgcaagaaccatactctgctgtttataataccgattcttctgcagaagcatctagaagagaagcccttttagtaaaacatgtgaaagaaaagctgagggagcagggttttggagaggagagcatcaggacagattcatacttgaatttgaggtatgagggaactgatnnnnnnataatg

SEQ ID NO: 4426 - DNA, 370 bp, Zea mays
cccaattcgtcggtcaatttcgaggtcgagttccccatgaatccacacccatccccaccattctactgatgccgtgagggagaaacatggaggaggaggcatggcatacacctgaatcaaagagttcacacataatcactgcagacatagcattgccgccataaaacttcctcattccctattattttttttatcaaataaaccattttagataaaatcaatattctatatgcacctgcattctagctatagatgtagcatttcgtgggatgcttatttctgtgctgaatggaggctggctagagaaagaagccgcattgcaggaggacgcacctgggcgaccctgctgatgtagcactctcgtcaagct

SEQ ID NO: 4427 - DNA, 554 bp, Zea mays
tacaagctcaatcagaatcagtgcgggttccgcggatcatggcggccgttggggccagaccccgggtagtcctgagtctgcagcagccccgccctcctggccgccgtatccaccaccatcgtctcgtcccgctcggcttcagcgagctcagctcccagcacggcagcaccctcctccgccgccgccgtcgtcgtcgtcgtcggcaacaccacctgtccacgtccaccaccggcgtaggtgtcggctggctccctcggcagcagagccctccggttgcctgccgctgcaaggaggaggaagagaaaacacgaggcaaagatcagcagcgcgtggcctccggcgagagaggtccggcgggccgaacagctcgagcaggccgtacataccggagacgaggagcaggcaggagaggacggccagcgctagcaggatggcggggacggacacatgcttccttgtcgtcgccatgggcacgctgcagctgtgcacagcagtgagcaacgtgtgtgtatatatatggatcggaagctagctcagaagtcaagatttgcttg

SEQ ID NO: 4428 - DNA, 380 bp, Zea mays
  misc_feature (13)..(13): n is a, c, g, or t
  misc_feature (44)..(46): n is a, c, g, or t
  misc_feature (48)..(48): n is a, c, g, or t
ctgcatcccctcncccgatggtcacccaagacggtgaccaccannngnatggtggggagaagcaagccgggctgcggcctctgccccgccctcagcttcaaggatcttcatcatccttgctggggaggagggcgaggtgagccggggcctgccttcgcgtgggccggcgtcccgcttcttcctccagcttctgggggtggaaaccatcctccagctctgcggaggaggcgccctccagccatgccggggaaggcgaactgttgctgcccagccagggtgcaacattccgtcctttgtccgggcgacggtggccagccgcaccggggggtctcccaacacgtcctacgccgcgagggcggtactcgtgttctgggacggta

SEQ ID NO: 4429 - DNA, 374 bp, Zea mays
gcttgccaagtgcaagaaattctccacagtgatcagtgggtgttttgccttgctctgtgaggagtatggtggctctggtagtaaggcaaagaagagatttatggtatctcgagcagccttgtcgcttattgggtacccaaagttgggatttttggatgaggcagtagagaggtgtgcagagatcatggcactggatgttgttgatgggcttgatggagtgacaaaagacattggtgaagggtcacggccatctccagtcgtgatggagcagtgccaggaggccatgtcttgcatgtactacttgctgcagaggtacccgtataagtttattggccttgacaaggcgtcaagtgtcttcaagagtgctgtcagga

SEQ ID NO: 4430 - DNA, 679 bp, Zea mays
atggataaagcaaaactagatgagggattgtcacattgccatctgaataacttcaacaagacaccgccatttcgataacttcgaccggcttatttcgatgaaaaagtaattggcttacttgcgtctagaacaaggccaggatcaagggcgccttttgggttaacagcgccactgccacaatcgaacggtgtggcccgtgaaagtgtcatcatttctgatgcggtgtactgctgcgctctaagaggatggctccctttgtccagtgtattggccgttgtcatcagggcagattttattgctgaggggctccactttgggttcttctgctttatcagtgctgcaatgccggcaatatgcggcgcagccatgctagttccagaaaccattgcaaatccttcacctgcgaaaatattaccacaacaattttgaattggttcaagcacagaaagatatcctcaagaatcactagtccacaaaatatgcaaaaggacggcaaaagcgcagaactaaaatgctggcgataagccgataatcacatgggtgcttccttgaggaaaaagagatctacatacaaagcttaccagcataatttgattcatctgttccattaggcgcccatgcagcccatatgagattgccaggagcaagtatgtctggtttaaggacatcagcatcttga

SEQ ID NO: 4431 - DNA, 377 bp, Zea mays
tctcctcgcacagatcatcgtagcagtcgtcatcgctgtcttcgtcccagtcctcctcctcctcctcttcgtcagtgtactctgctgccagctcctccacgcccagctcttcttcgtcgcccttctcagaggtggcatggacctgaatggaccaggcagaggagctgtcgtcctcaggtgatgatgacttgtccacgtagctgccggtgctgctctcctggagggagaaggttgacgagacggatgatccactggactcttcacatttctcaggggagtcatcgaacaccagcgcacggttcagctggcagtccccgagcttctcctctgcctgatgaggtggatgtagggaagctgcaatgacctgaagcttagga

SEQ ID NO: 4432 - DNA, 538 bp, Zea mays
atcgttatcttcaatactggccactggtggacgcatgacaaaacttctctagggtgagcaaaacaatgccctgcctgactcactgaagacctgcatttcatttgccttctgattatttttaaattgccttctgattatttttaaattgtgccacaggaaagattactaccaggagggcaaccgcgtatacagtgagctggatgttcatgacgcctttcggagagctctcaacacctgggctaagtgggttgattccaatgtgaaccccaagaaaaccactgtgtttttcagaggctactctgcatcccatttcaggtatgaaaagctatttctgaacctctgcaagttcagcaagaatgtgctctatgagttactggtgtttactaactgtttctgttatgcagtgggggtcaatggaattcgggcggcagttgtgacagggaaacagagccaataacggatgaccagtacctcacgccatacccaacaaagatgagcattttggaggaggtgctccgggggatgaaaactcccgttg

SEQ ID NO: 4433 - DNA, 336 bp, Zea mays
tattgcctgcactggcaaaaaaggaaaataggaaataagattgcacaatttggatcgtgcacctttacgccgaggactggaaagacttcggcggaagtcgtggagatagtcccttgtgccaggaacaagtggggcaactggtgggacttttggttttatgtttcttgtggggaagtcgaagatctgcctgggctccctccggccattctgtgctctcactgctatgtggcgttccctcgattcgaggtggcggaggatgatgaggacgaaggggcccttcggtacgctgcccgcatgagtagcgggcgcgatttggttgaggaatttatcggctat

SEQ ID NO: 4434 - DNA, 507 bp, Zea mays
  misc_feature (500)..(500): n is a, c, g, or t
cagggcgcaagctcgccgtggattgcaccggcgagggcgtgctgttcaccgaagctgatgccgacgtgcgcctcgatcagtttggcggcggccagggccagctgctgccgccgttcccatgcttgccggagctcattttcgatgtgccaggctcttccgccatcctagactccccactgctactcttccaggtacgccgtacccttgcctgctcgatcaattgatcttcttctagtcaagatggaatggaatcgtatgcaactccgatgatccggaccatgcacgtgcgtgtaggtgacgcggctggcgtgcggtggcttcatcctaggcctgcggttgaaccacaccatggtggatgggcagggagtggtccagtttctgggtgcagtggcggagctggcgcggggtgcacaggcgcctacggtgcggcctgtgtggcgtcgcgaagtgcttgaggcacgcgacccgccacggccgcgtttcccgcaccacgagcttgnacgagac

SEQ ID NO: 4435 - DNA, 524 bp, Zea mays
agtgtcgaaggaaaacacacacaggcatgaggcatccctgtgagtttgttggtcttgaactcttgatgctgaaaatggagattaaagagcattattttgaggtaagtttgtaagaagaatgcattatttaattgtctaaagcagtcattattaattacaacttttacacaggtctgtgacattatagatgacttgtccgtatcaatattaaaccacttgactgaaaactgcaagaaagaactcgagacaataaacgggcagtatccattttgaacctctgaaggtaagcattctggcttgttttgtaatttgactatgcagttctctggttctgtagtctaagagattgacggatcactaataatcttatgcagtatctagacaaaaccttgaagatcacttacgacgaatgagttcaaatgttaaaggtacaaacttacagctgtctcttgctactgtaacggagtccttctgttagatattacgatcctaacaccttcctttgcattttcccatgctttgct

SEQ ID NO: 4436 - DNA, 664 bp, Zea mays
gccgttctctgtcaaaccctgtagtacagaagacaaagaggtaatcttttttttgtcctttttattaactaggcacccttttgaaacctttcatgtagttaaaacaattctagtctttcaatgaagcaaaatttgaccattctttaatacttagcatattaatactaataattatcgtaatcttctctctctctctctctctctgcaactgctcttgctcttccttctagcatcacttattattagttggatatttctgctatggttcgtgcactacatggatgtgacactatcaagctacctccagtcatatatatactaatccttccccttcttgacaaatgatcttttattgttacaggaaaccgcatgtgtacatcatgttcaagagggcaatgatgggctggaatctcattgcttacccaaaggaactccagagttacaagggttgattgcaagaatagaagcacttcaagtagttgtatcaaatgctaaagatcgtcaagatcaggagtcagctgagtctgcagctaaattggcggcagtaagtgcagaaattcaagaccttaaagcaagaggtggctcacgcatggagggaaaagaaatatattctgatcatgagaaacaagatgttgagatctccaaagggaagcaagtccagatc

SEQ ID NO: 4437 - DNA, 400 bp, Zea mays
cgcagcgaggctggatgcagccgtccaaggtgaagagcaagctgtgttggccgccaaagtagtccaaccggaaccggaggtcgctcaagtttctgcacgatcatacaaggggtctggaaccgaatcgagcaacagagcagtccaattggagacaggggaatcttctagacgagtgattgctgccgcggtgaaggaggggactgcacacggagtgaagggaaagggcgatgtggtcaaggtggatcagctacgagtggaaagaacaaaagcggtggttgtcgaggcgccaagagagactaccgctgccgtggttcaagctgtagcggagtccccttctcagagcaccgagtatttgatctcgccgtcgccaaataggcggtttaagagaactaatcacgtc

SEQ ID NO: 4438 - DNA, 396 bp, Zea mays
atcgtgcggttcagctgctgcagcgtgcgctacggggactgccgtcggaaccatgcagcgagtactggaggccacgcagttgatggatgccgagagttcatcgctgaaggggaggagggcaccagtggtgctctaaagtgcgccgcctgcggttgccaccgcagcttccaccgcagggttcaggtgtatgaggttgcatggggttatggatccgacacgtcgtcgactgagtagagaggggaggtgcaagccacttggagcttggatttgtgcttcctgcagcggcaaacgcccaacaatattggccccccttcttctctgtttccggtgacaacctgaccggccggtggatgtataggaggctaggagccttgtgattgtttgtagctccgtacg

SEQ ID NO: 4439 - DNA, 373 bp, Zea mays
  misc_feature (365)..(369): n is a, c, g, or t
gaggaggagaacggagggggctgggcgagcagagctccgtgcaaaaccccagggcgcagccatggaatccagggcgcggcgagctggaggagcagggacggcgcgacatgctggagaaattccgcgcgcacagagcagagaatcgcgcgtgaagagatggagcgtgcaggggagggagtaggaacagccgagcgccgtggagagaagcaaggaggagctcgacgagctggagccggcggtctggagagcgagcagagggagcgcgcaggaactccatggctcgggagcgagcaaggagaaatcagggagcaggggctcgcggctagcaggagaagcagagatcgagctgggcgagatccaagcannnnnattg

SEQ ID NO: 4440 - DNA, 536 bp, Zea mays
  misc_feature (477)..(483): n is a, c, g, or t
  misc_feature (529)..(532): n is a, c, g, or t
gggtttcctcttgggttttgttctgttggcaaggcctcaatttggctggatggaacaccacgagctgccgcagactaaccaacctcccaagtacaaagcgtaccagtatattttgtgggttgtggcactcgtcttgctgttagttgggtaagtaaatccagttcggtatatttcctgtagacatgtttttatgtgtttaaacatatattgcagaaaatgttgctgcaaagattcgtgattctggactaatgctacattttatacgagcaactagtctaagatgttacatgttttttttttgaaaacgtggaatggtactgatgtcaaagtccttgcgccgcaggtttgtgatttcacttgtgatgcttttcaaagggaagaacgggaacgacggctgccactggtgccactatctaaactgcgtgccaacatcaaagtggaagtgcaacacctagacacctcaggtttctgttactnnnnnnnaacatgtagtattcagattcagaagaccattttttttatgcgtgtnnnnctgt

SEQ ID NO: 4441 - DNA, 779 bp, Zea mays
gaagaggtaaactgtgtttttggataatcatctagtttatttatgaacattgcttttacacttccattttgtgggacagcattatggatcgtgagaagcggctaagtatattgtaccaaaagcagggaagggcgacccaattcgcaaacaaagctgctagagataagtggcttcaaaaggaaattgaagatctcaagcctgtacttttatcaaataaaaagcaggtaataatccagtgactggtttgcggccttactggttgctacctcactgtgggcattttttctgttgcactttttttgcttaaacttggaataatcctgcatttgtcacatatattagtttgatccgtttcatcttaaattctgctaataaagccatactatggcatgaacgaataatcttttctgattgtatcttgaattcattccatgaatcaagaatcttttttttgtctttcaccctccaattgtttgctgacatagttgaaatatctgttacattcttgcaaatatggcaggaaggtttacttcaagaagaaatccagaagcttaaagatgaaatcaatgatttaactaactacatcgagtctcggaaaagcgaatcaagtaagttagaggaaacacttgcgaaaagacataatgactataacgatttgaggaagcagagagatgtgcttcaagaagaaaggaagtatgtaaatttcttttgaatggtcatggcattgccattgaatggatgatgtgttgcattaaattttatatacttagtagaaggaa

SEQ ID NO: 4442 - DNA, 428 bp, Zea mays
tgctaatccttgtcgtccccttcctcgccgcatcgacgtcggcggacgggaaggccggagacatgcagcggcggcggcggcgacaggtcctgctgcgggacaaggcgactctgctggacctgaagcaggggctcaggctgtcatcttcagcggccctggcggactggaacgagtccaacggcgacgtctgcggcttcaccggcgtcacctgcgactggcggcgggagcacgttgttgggctctctctcgccaacttgggcatcagtgttgctattccacgggtcattggcaatctctcgcacctccggggcctcgacgtgtccaacaacacaatctctggccagataccgacgtccgtcggcaacctcacgcgactggagcgcctcttcatgaacaacaacgacatctcgggcaccatctcttcaatc

SEQ ID NO: 4443 - DNA, 717 bp, Zea mays
tttttggttctgcaggatcattgcgtctctgcgagctaatcaggttgggatactttgttatgtttggacagttctatgattgggaactgtgtagaatgtgacagcatttcttattttaatgtgcattgcagctctgtgagcgtctccctagccccaatggcgagtcaactgttgattgccatcagatctcaaagatgccaaatcttgcattcaccatagcaaataagactttcaccttaacaccagagcaggtaactccctacttacagtttcttcagtgtttgaattagtagtgaaacattgtctagggaaccatgatctcattttcaaagttacagtccatttattggatattctttggtgcaaacatatacttcttctatttctcttgaatccactgattgcctttgtgctgcagtacatagtgaagctggagcaagcaggacaaactatctgcatcagtgggtttatggcatttgacgtaccgcctcctcgtggtcctctctggtacgctgaacatatatgtacataagtggcagtaatccacactctacacagtctttgctttctctagcaagaatcaagcatgcaatctgacatctatcttgtaaacattcaggatacttggtgatgtttttatgagtgtctaccacactgtttttgacttcagcgagaacatgattgggtttgccaaatctgcatgaggactggagttct

SEQ ID NO: 4444 - DNA, 993 bp, Zea mays
  misc_feature (950)..(956): n is a, c, g, or t
ctttattatcagcttacctactgtccttcttgtcatgtcgaaattctcatcaatcattgtttttttttctattagatatgggactctgttcagaaaccagaagcttacaaggaagcagcgctcagtgatttcttcgatgtcggtgcatcagtttttttgaaattaaggctttcatgcatcgactaactcatattttccgcaacataaaggtggaggccactgctctatcgagttatgaagagaaagaagaactatttaaggagcaggtagattagacgtacaagtactaaatttttatctctccagtgcaccccatcctttttttctctattgtatgattgtatccaattgcatttgttatgaaatttccatcttcagtggaacttatgagttcatatttatgcatgccatatttcactttaatgatacaaaagaccttttattgtactatgtcatttttatgcaggttggacaactgaggcagaggttttatcattcaattgcaccaggtggtcttgcagccgatagaagaggtgtgatacctgcttcaggcttttctctcagtgcactgcagatttgggaagtaatacgtgaaaataaggacctcaaccttcctgctcacgaggttattctgccattatttgccatcaatgctaaaaaactaaatagtaataatttgtgtacgtggacatgttgacactatatttgaagtgtaacttttcttgtatgttgtgtaggtcatggttgctactgttcgatgtgaagagattgcaaatgaaaacctcaaacagtttttgtctgataaggtggaaatgttcttatgtcattctatattactccatccatcccaaattataatacattatgacttctctagatacattgcttttagtatgtttatagacataatatacatccatgtacatagagaaaaactgtgtatatagaannnnnnnaatgtcttataatgtggaatggagggagtatttgttg

SEQ ID NO: 4445 - DNA, 484 bp, Zea mays
cctggcctgctcccatggcgcgactgctccctgccgcgcgctcttttctgcaccgcgtccctggcccctctgcccgagctcatccatagtaagcttcgagctcgctggtgttcggaccgcgactccctcctccggcgcgctcaactccctcaagccgcgcctgctgccgcgctcggactgaagctcccctgcatcacgccctgctcgcccagccgcgccgagctctgcctttgctcctcccctgctcctatggaggcgccgatcggatctccctattgcctcaccctgctctttgtccgcccatggagtcacccagcccagccgcgtctgctccgtcgcgcccagctcctgtgcgccgcagttcaccccagcttggcgtctgcttctctgctccatattcgtgctccgagttccttgctgctactaccgtgtcgtgcgctgcaggccgccatccaagttctctacgcgtctgcttctctgctcc

SEQ ID NO: 4446 - DNA, 379 bp, Zea mays
ctaccaccactgggccagttaccaacactacaaaagctagttatgggaggaatggacagcactttgacagttgatgagggtttctgctgcgccggcccgggagcctttcctctattacaggaacttcaactatgccaaatggagaacctggaagtgtggaacacaacatactcctgtggccagagcaatgaggatgtgcaggaattcatgttcccaaaccttagggaactgttaattcgtgattgccccaagttgagactgaaaccatgcccacctaaaactgtgggatggaagatagagaacagcgacaatgtactgtcgtcatgggatgaggagggagatatcgaccttgcagcattgttcccatcaaggaaagagt

SEQ ID NO: 4447 - DNA, 419 bp, Zea mays
gcggagaggagctcgacggggcgcgccgcagggagatctctgggcgaggagaggacctcgacgaggcgttggcgtctcggtggccatgaagccgtggaggtctctgggagctggtagaggaggcgaggagctggcggcagggcgacgaggagctggcggctgggtggaatcgcgacgaggagctggtgaaggagcggcctagcggcggtgtggactggcggcgaggagctagtggtggagcctggcagtggggcggccgacgacgatgaaatggggatggggatcgatttctaggaacatagaagatggggatgttcgttgtgggctccacctgtagcaacaaacgtgggcccatgctgtcaggcacgttaactgtgatggagacggtgtgcgagtgtttctctgagcaaaggaacaaa

SEQ ID NO: 4448 - DNA, 762 bp, Zea mays
  misc_feature (452)..(452): n is a, c, g, or t
  misc_feature (698)..(701): n is a, c, g, or t
  misc_feature (703)..(709): n is a, c, g, or t
  misc_feature (754)..(756): n is a, c, g, or t
atctttctgatcagtgatttcatttgaggttccaagaggggttcttcgctgtcgtttgacggttttatttgggttgtttctgtttgctgtgccatccatgtcatatttctatgagacgagaggttgatgacttggtggtgattggtacatgcaactgtgcaaatctcttctgtttttaagtgcaggctactggggttctagggctgaggctagggtaggatttgactttttgattgtttttttgtcccccacttgctgtttgttttttttctttggagccccacgtttgttagaaaaggagataatgtgtggattatccgcactgttttacctttcatttcggtgagataacggacaagtcaagccagattcttgtacagcaaaagtgaggcatttccttttactatcttgatgtgtgcttgttgaatggcttctgtggcgtcgggatttgntccttcttttatatgggcctgtcgtagtgcatcctcctagtataaatatttgctccaaatactgcgttcttatggttcttgtgtgtggtcttgtgcagtgacttcgctaaaatgggtcatgtcctcatcatcaggaccacaatttcatgtcaaaattgaagataccatcttcccctattccactttcatgtcaaaactcaagatgacggaaatgaggcgtcgctctgtggatgtcccgctgtcaannnncnnnnnnngctcaagcgattgagatcgctgcgggatccagcgacaaactcaannncaagtc

SEQ ID NO: 4449 - DNA, 385 bp, Zea mays
actttgctgtattgcctctcgaagaatgatatggacaaagaggcagttgaacttgcgaagaagatgagcaaaaggggatatctccttggcagcacaacattcagcattgtgatcccttgcgctgtgaaagtcttggagtcaagtgatctgtgtgagttggtagatgatttcatcaagaaaggggggaatctgggatttgatatgtatattatgattattaaatcctttctgaggtgcaaggatatctcaaaggcaaataagtattttagtcagatggtttcagatgggcttttgtctagtgtggaatcttacaacattgtgatagattgctttgccaaggcaggtgaagtggaaagagcactggagaccatcaaagttatgcaag

SEQ ID NO: 4450 - DNA, 373 bp, Zea mays
tcagcgcggcgtcctcggcggcgtcgatgaggaggtggaaccctgccacgacgtcctctggcggcatgcagagcgaggagagcagcaccgacgccatttccttctcgcggctcttccggtccatggcggcgttcaccagcttctgcacgaagatggcattgaaggagggacaacacgagtagttctctgcttccaaccagctcatgacctcgatgatgtcgccggtcaagaagtactcctttatgatcaaaacggccttctccttgaactgccgcaccgcggcgtcgtcgacctcgctacccttcttcggctccggtggcaacggtttgaggcacgactcggacagccagccctccgacgaagccttatggat

SEQ ID NO: 4451 - DNA, 1049 bp, Zea mays
  misc_feature (989)..(992): n is a, c, g, or t
ggttgctcaagcaaagcgcaaaagcaagttcaggagcattgatcaactgaagggacatttatactgcgtgcataggttgcacatgtgcaatctttgtttggaggggaggaaggtgaaatacttgatgaatttgcacatttataccttagttgatttcatggattatgctgtcaaatttagcatcaaactttagacatgttttgaataatctagagctgatttttctttgtttctatttcatgcataatggtttctttttagtttataggcctttcattgtgcatgtacagttcagtgcagtttgtcttgtctatcagtatatgacgctggtacctatgctatagcttacctagtgagctgttatgttactgtacaatatatttcgaaattgaaaaatgttgtttccttcctgtagtttttttgcttagtataatgagcagaatttattcgtttatgtatataacatggtttaatttgaagatgttttccagagtatgcatctcaacccactacaggcaattgacatgaatagcctatttgaactatttaagctgaatacctaattattgcttgcaactagcatgcttgacattgtgctatcagttgctaattatgtgacttggccatacgagtgttcactaattttttattggtcattgttgtcctatagtcaacattgtagaactggggtcatgtaatttacactctaaattacacttgcggtttttatattcatgattatttattgaaatggtttcgtgtgttttgaaggtgttcatttgtgaacaaaagctttatttgaagtcacagttagctcagcatatgaagactggcgactctgaagtggatggctctgaggtagagcgcaatggttttgctgggcatccaatgtgtgagttctgcagaagttcattttatggagatagtgagctttacatgcatatgtctagggaacactattcttgccacatatgcaagaggtaggtatnnnncaacctttgtccttagctaagcttatgtagcgatttatctgatgtgtgaattgtgat

SEQ ID NO: 4452 - DNA, 625 bp, Zea mays
  misc_feature (593)..(593): n is a, c, g, or t
  misc_feature (601)..(605): n is a, c, g, or t
  misc_feature (619)..(620): n is a, c, g, or t
tcgcgtttggcacgacaatacacaagtgtccacgggagtagctggacctctcacaaccgcacggtaggaggacgtgcggcggtggctgcgcctgtgcatcggatttcgtttgttttctccatgaattttgcatcgcgtgttagtgctccctaatatttggggcaacacatatgtttagtagagggatatgggtcgactcagattaagtaattagcgagccaaatgtggtatcgtcgtccggttattgcattggtaatgtatctgctgtggtataaatgtatctgctgttggtatatatacattatgaaatcacattttaattttctatgtagagaccgacgggccattttatcctcttgtacatcacatgtgtgaaatgaaagtgtgggttctacatcgatagaaaattaaaatgtgatttcataatgtataccaacagcagatacatttataccacagcagatacattaccaataaccggacgacgataccacatttggctcgctaattacttaatctgagtcgaccatatccctctactaaacatatgttttgcccaaatattagggagcactaacacgcgatgcaaattnctggagannnnnaccaaatcgatgcnnggcgc

SEQ ID NO: 4453 - DNA, 413 bp, Zea mays
tctcctactcctacatacgttgatcaatggctctcctgcgtgtcgtcagcacggctgtactgcctgccgcctgctgcgtcgtcctcctcctcctgtccaccaccacggctccggtggccatggccggctcgttgcgggatgactgccgcgcgttctgccgcccaaggtgcgagggctacggtgcggatttgtgccatgccctcgtcaacggtttcccgctactgcagaacgtcctcgaggcgacatgcgcagagcgcttctacgaagtgtgtcaacccatctgcatgaacatctgcacggccaacaccctcactccggcagcggggccgggaactgccccgccgccgccgccgccgccgccaccatgcggcaagcaatactagctggctagctagttgatgcctccgtacgtt

SEQ ID NO: 4454 - DNA, 367 bp, Zea mays
tgtggtcgcggagttcgccggcgagaatctcgagtcctgcgacgtgttcgacggcgtctgggtgccggatcagaggcaccccttgtacaacagttcgcagtgcccatttgcagagagggggttcaattgcctggccaatgggcggaaggacaccgagtacctcaagtggcggtggaagcctcggggatgcgatttgccgcggttcagtgcccgggctctgttgcagtggctgagagggaagagggtcgtgtttgtgggggactccatgagtcgaacgcagtgggagtccttcatttgcatgctcatgacaggggtggatgatccagagacggtttatgaggttaatggcaaccagatctcaaagaca

SEQ ID NO: 4455 - DNA, 482 bp, Zea mays
cttgatgctaatctctcctcccatcagacgtacctgtgatcaagatcaacatagatcatcgaaaaaatgaacaggagatacatatatgtacatactcatagtacatatatttgagtggtaacttacaaaggattgcacgattccgagccccaagcccgtgccgccttggccattgttcacctgaacatagttttcgaacacggacatcctcttctcctgggggatcccaatgccagtgtcgaccacttcaaagtaaaactcaaccaaattggggtcattctgcacatgatcctggtcaccaggacgcttccttgccctgaacaagcatcccaagaagcctccgccgccgtgccgtgggtgcacaaaccttgacggagctctgacattgctcccggtgatcggtcgggtcgcccagctccgaaggacgacgtgaccttcatcggtgaacttgagggcgttgccgagtaggttgtctaggatct

SEQ ID NO: 4456 - DNA, 352 bp, Zea mays
ctcctttctgcatggaccttgagttaaaagatgctccagctcttcctaagttaaattcaatgaagctgatcgaaggatatttcatgagagctggttttgtatcagcatttaaagatatacatgagagacttggggaagtatggccaaaaaagttttccaggttagctctgttgtcagaagaatgtagggatgaggttatcaaggctgatatacaaggaaggaaagaaaaactggagagaatgaagaagaagggtattgtcacagcaagaaaatctaaaacaagagcacgacgaggaaaatttgttaggcagcagaaatagaacacgaaagtagtgttggagtagtcgtggcc

SEQ ID NO: 4457 - DNA, 912 bp, Zea mays
  misc_feature (844)..(851): n is a, c, g, or t
  misc_feature (881)..(895): n is a, c, g, or t
tgttgggatgaatgtaagcttgatgtggaactctgttggattctatcaggtgcagacagaaacttcgatattctataagtatatcggaatgaaacttgtatactgacgctgtctgtcttgccttttttttcagatcgcaaagctgtgtatcattccagtcttatgcattctggaaatcatgttcgacaaagtccgttactctagagatacaaagctcagtatagtgcttgtccttgtaggtgttgctgtatgcacagtcactgatgttagtgtgaactctcaagggttactagctgcagcaatagctgtttggagcacagcactacagcagcatgtgagtattgttgatgttgagacttggtactttgttgttcatatatctgtatatgacatcttttcctaattggagctatccttcttcagcacctattttatagcttggcttctaatttagaagttattggttataattttagatgaaagcaccttgcacagaattttagtaactttttggtgagtatcctgaaatctaaagtccctctttgtttgggtggacttgattcagtggagcctgtctacttgtggcctgaggtcttgagtttgaagttttaaccaggtttcttgcaaaatcatgcaagggtaggctttctagaaattcccttccacagacctcaccttgtgtgggagctctcaacttggcacactttttttcctgaagtaaagtaagcaaaataatccagtactctgctgctgctttgattacgacaactttggtaatagactaacagctcaacaaactttgaccttttggaccttgttaatctttacgtaactagtgttggcnnnnnnnncccccctgccatgatatccttattaggacnnnnnnnnnnnnnnntctatttggtttcctcc

SEQ ID NO: 4458 - DNA, 342 bp, Zea mays
gcacgcgccgcacccggtgccgttggtgtacagcgacgggcccacggccgccgtcagggtgccgtagtctttccccagctcgcccttgtagccgcacgcgccgctgtccgtggtgtcagttaacccgtcgcgcccgccgtagtacgtcgcgtgcccgtccgtccacggctccgccttaaacttgccgtggttgacgtggggcttctttttgccgccgccgtcctcctcctcctcggagcccgcggcgagcccgacgagcagcatcgacgccaggagaggcgccattattgtccacgaacgaccagacatgattgatgctatggtttgatttgtccttcctgg

SEQ ID NO: 4459 - DNA, 376 bp, Zea mays
  misc_feature (57)..(57): n is a, c, g, or t
  misc_feature (59)..(59): n is a, c, g, or t
ggcctcgcctcctcttccgtcctctgtatataacaataataacttgccaggcgcgcncnatctcgctccgtccatccctgtcgccagcgccaccaatccatcgcttccgcttcggcctcaacgacggccgccaccaccgctcccctccctcccatcctcctcgcccagcgggcagcggccattaccacagcctcccccatcaagccgggatggctgcacagcctgcactcaaggcgtcgttccgaggggagctcaacgccgtctccttcctcgactccagccggggacctttcggccagcacaaaggttggatcttttcctcttctggtgcctccttttttttcccccgaccggtgcatgagcctgtcttcttgct

SEQ ID NO: 4460 - DNA, 425 bp, Zea mays
ttgcggttctaacacaccttcaagtagtgatgtagatgtggacaatgtccctgagaaggagggcaatggtaatgagaaggcgaagcaagcctcctgcagcaactcttcagctggtgacactaaccaccgcagatttagaagcagtggaagcacgagtgattcatggaaggaagtttccgaagaggttgtaatctaccaacactatgccaattcactctgcccaaacctttgagcatgccgcactgcctttctaattcactttttttgttggcagggtcgtctggctttccatgcgctgttcagtagagaaaagcttccgcaaagcttttctcccccacaagcagaaggctcgaaggaagttggcaaggaggaggaagatgaagtcaccacagtggcagttgacctcaacaagagtaccacaagca

SEQ ID NO: 4461 - DNA, 689 bp, Zea mays
  misc_feature (401)..(409): n is a, c, g, or t
  misc_feature (416)..(419): n is a, c, g, or t
  misc_feature (447)..(447): n is a, c, g, or t
  misc_feature (449)..(451): n is a, c, g, or t
  misc_feature (514)..(515): n is a, c, g, or t
  misc_feature (577)..(579): n is a, c, g, or t
  misc_feature (585)..(592): n is a, c, g, or t
  misc_feature (603)..(608): n is a, c, g, or t
  misc_feature (614)..(618): n is a, c, g, or t
  misc_feature (633)..(647): n is a, c, g, or t
  misc_feature (654)..(660): n is a, c, g, or t
agttcaaagatcacagttgcactttgtcgaagatccacaaacaaagaggattaaaacttgcccagcttgcccagctggtgcgaaacaaaagaatcggatgtggaatgaggtaatttctcatgttgtaagtcaagctgcctctgaaaaggggagcgaggacaaccgaaagcgccataagtgtttgctgcgcaaccatggtttccatgttgagacaagtgatgatagtggtgggtcaaatccccaagaaagaggtgaagcggttccgcgacatccggctaatcaagagaaagctatgacgatggaaaatagtttgtcatccaccaaaagtcgacttcgggttcaggctccaaaatgtatccctatgctctggtccatagtcccagcaatggtcaacctaaaannnnnnnnncataacnnnnacaactatcctgatttgaagttatgtangnnnaatgattttaatcactgaaccacttcaaagcttacttgtggctcccgagcaacaatatattgnnaatgtagtcctttgtctttaaccatcgaatctccaagaaattcggcaagtctttttgctgtnnntacagnnnnnnnnttctgctctcnnnnnncaactnnnnntttactcattgtgcnnnnnnnnnnnnnnnaatcaannnnnnnactgtcagcaatatcaattccttgattct

SEQ ID NO: 4462 - DNA, 779 bp, Zea mays
atagcatgagagtaagtaaatgaacagtttgactgatgtagaaggtgcggttttcatgtaaaatggtaccaggatctgtctcgaatatagctaccggaacagcacgctcgctcactggagtgccctaaatattttaagaaaatcaagttaaccatactaaagacaaatacaaataattcaacttgcccaatattacaatttacatgggcaaactaatgccacaaaatatttgccaacaagaagaaagaactaattccaccaaaatgaatcaagggatgttcatgtagttccttgataggatcacattagggatgccaaaataggacaggggaaagaccacggaaacataacattgacaactatcctgatttgaagttatgtaagctgaatgattttaatcactgaaccacttcaaagcttacttgtggctcccgagcaacaatatattggcaatgtagtcctttgtctttaaccatcgaatctccaagaaattcggcaagtctttttgctgtagttacagcacaagacttctgctctccgtagtcaactaaagatttactcattgtgctcgactccgatatgaaatcaagcaattcactgtcagcaatatcaattccttgattctgtaacagaaaaatatttttatatgtattgatcaataacataagttggttggcttgttgaggatttagagaataagaatataagaatatagttcattatacagatcgcttacatccagtaggtccaaccaccggttagcaacagaggcaacagca

SEQ ID NO: 4463 - DNA, 323 bp, Zea mays
tcagcgcgcccgcttcactcgccgacatccccagggacgagcccaccatcgccgcgcacctcctcgcggcgctgcagtcgttcatggcgctcgacgcggccttccgcgcgcgccctctgttcctcgcaggagagagctacgccggcaagtacatccccgcggccgcgaggcacatcctcgacgcgaacgacaagctccccgcgggccagagggtgaacttgcagggcatcgtcatcggcaacggcatgactcaccccgtggcgcaggtgaccgttcacgccgaccaggcgtacttcgccggtctcatcaacgccaagcagaag

SEQ ID NO: 4464 - DNA, 493 bp, Zea mays
  misc_feature (52)..(56): n is a, c, g, or t
ccatcaattgattgtcatatcgataaaatagtgtcattaatcaggcaaatgnnnnnctaagtgtgtctaagaatcgaacatcatagtgtaatttgggacaggagtacatatacccatccatgcaccatgggttgatccctctaatgccctgttcgtttttatcaaacccatggggattgagagggattgaatccactacaagtcaaaatccccctcaatccaccccaatccccctcaatccccatggattagggatgaaacgaacaaagcctaaaaggatcatctgcccaagcatggcacattaactttcacttccttcgcgcatacaatatagcaacaacagctgatatcccaattacagctgctgggattgcccagtactgcaccacgttgtccataagcttgctggcaaatcccgtgtcctgctccttcctgaaaacctccatctcaggaatgtcaggagttaaacctccatctcaggaatgtcaggagt

SEQ ID NO: 4465 - DNA, 463 bp, Zea mays
tcgcgtctgatattctaaaaagcctatgtgaatccaaggaaggccgtgaaaccgtccaagcgctgagtcacctcatcaaaaggctgcgcaatctggtgcatgacctggaaaagaaggtagagcttgataagaggtaatgcaatacatcaattcgcaagattacgcccttgccaccgatgtcgggtctgctgaaacgggctcctcttgtcctgcaaggaatgggcgcaccggagccgtgaaggcgaccaacctgcggcggcttcgggaggccgccacactctatcatatcctcaccagtggtacttaacgcgtcggcagcatagctagaaaggctaatctgacgttttgttgtacaataatttagtctaagaaggttttcatgtaactggaggtgactacggtgcaattgtcgaaaaccttcctaggtaaccaggatcttctaagttctgttgctgcagttggt

SEQ ID NO: 4466 - DNA, 368 bp, Zea mays
cgctcggctgttcgtcgtcgtcacccggtcgcgcgacgaattgacagccctatcactcgtcctttgtccgtgtcatttaggtcatggtttccttgtccgagtttcaaatccatagtttgttgctcccgtcaactagctcgccaaaacgtttctcgccagggaagcatagtcgtcacgccctatgtccttgccgtgcccgtgaagacgttgtggaattgtcgtcattcgtctccacgccgtgggtacaacaatgttgtcgttcactccacggaactcgtcgtcgaccttatctcccggatcctggagttggatgaaaatgtgagagaagtccgtgcaacaattgccaggatctcgactggatgtctaaa

SEQ ID NO: 4467 - DNA, 393 bp, Zea mays
cgagagcgtgaagcaccgggtggtgaccaacagcctcaagtccagggtttccttcatctacttcgcgggaccggcgctggagcagcggatcgcgccgctggcgcagctgctggcggagggcgaggagagcctgtacagggagttcacgtggggcgagtacaagacggccgcgtacaagacgaggctcggcgacaacaggctggcccagtttcagaggtgtagcatctaagctagctgcttagctagcactctagcagggcggcccccggccggtcaagctgagcacacaccagctgctttacaggacgacaacagcaacaaccatgacgaacgaggacgagcgagtctgcttgcgagaaatgatggcgaagaagaagaagaagaagaaaaagc

SEQ ID NO: 4468 - DNA, 507 bp, Zea mays
ttctctctgtcattctcctcagatcaacggcttccagccgatacaaaatcaacctgaaatgtcgaaatcagttcagaacggtgtgccaaagagtaatctgaaaatatataaaaaaaattcccatcgaccaaagaggcagaaatatagctcacttgtaagtctggagcaggtcctcggcttctttcagcctccgactgtcccggctaatcataggaacctcaaccattgtgttgtaaggtccactgaactccttcagaccatcgacatggaacgggtttatcagacgggagtccagagtcgcctctctcctgtatttgggactccacatgtcccccacatactgcggagagattgcgctagtggaggagaacgacgacgacggtgaagaggacgagccgtggtgaaccaagggaggatctgcgagtctgcagtatatccccgccatgcatctcaccatctcctctgacaggttgtttggagtttcagggatgtggtcagctacattaa

SEQ ID NO: 4469 - DNA, 784 bp, Zea mays
acaatgaaataggatttgaatcgacacctggtccttcaaactggagcgggcctgggtttctgtagacatcttccaacaaaaagctggaagaattctgtctcaacacactgcaaaaatgcaagtattattgacaccaaaggccatatgtacaagatacttctagataagaagctaagacagatgtcgaagaccaagagtaactacgtaactcttggtacctaggaaagttgagctgaatcatcagattcgggatgtagtagtagctgcattagagaaacaaagatgttgaaacaactgaactctgatgtgaaatacaaacatcctagaattatcaaatgaaacaatacatacctgcttccttataaaagggggcaaaaactcagagtgcagatgcccatggtgaaagctgagaagagatattctcaacagaaacacctttggcatggaggccatggatttcctataaacaaatagctctagtgagtaaaattataaatgggtagtcataagacgtgtaaacgtacctaaagcagagcatatagttcaggaatattctccacaaggccctcaggaaagaataaccacatggttcttgtctaggaaaggtacaaggacgatcaataaattgtcattataaagataaaataacacatggaacatctcatcttctcatagacaagaaagatgtagaccaacctttttcagcccttgcctaaactacatcacaaatcagcttcgtaatatcaaaaattgtaagtttggaagcagccacctcctgtcctag

SEQ ID NO: 4470 - DNA, 359 bp, Zea mays
acataccacgattcatgatgcaaacttgaaggtaagcgcaggcatccactctgaaccactgctgtcaatgcaagcaaaaaacaacttacaagggcaatccacgccgtcttcagtgccgccaccatgttcctgcttggggggacatcaccaaatgatagcatcttgagttggctctcctgcaggcgatcttcggagagtatataattctggggaatggtgtgtgccttgtcgaggcatgtgtcggagtgttttactgggaccataatcttccatgaaaaaaaatgatataagccttcggtatgtaatcctgagttttcggtgtaattcaaaacgctggtcttgtgacaacatgtcgctag

SEQ ID NO: 4471 - DNA, 839 bp, Zea mays
  misc_feature (795)..(797): n is a, c, g, or t
  misc_feature (807)..(808): n is a, c, g, or t
  misc_feature (815)..(824): n is a, c, g, or t
  misc_feature (826)..(826): n is a, c, g, or t
  misc_feature (828)..(828): n is a, c, g, or t
caggtcatctaaaggatcttcaggaatttgtggcaaaataagcacatgtaccctaaacaacaaaatcaatagagtttaaagttattataaacaaaagtaaagcagcaaaaccactcatttaataaaataatagaattaaacaggtggtcatgaactacctgtttctcaagtaagaaagcaagaatttgtcatttgataactcacgatcttccaaaataactgcgctcacatcataccctcttagcaacaaagtttcatacgcagacaaagtggatgaaataccaccaagacggccatctccaacaagaatagcaggtaacctaaaaggcctgtcaagagttgaaagaaatcaataatagccagctgaaagatcaactcaacaaagagatgtttaaaatgttcaagctaacagttaacatcacaaggtgatttaagaggttaaacaacatcatctcctttttagtagctaagttttttacattggctcaccaagactaacacaaccctcctccttaatcaggacttgggacccgctatgctgaaacaccatagcaccccaacataggcggggctatttaagagattaaagcattttgaattttaatctaaaatgtttggtaacatcgcttgacctaacagttatttcacatgcaaaacttaaactgcaaaagagggaaaagaaataaaatatgcagattatgggcgtatgcctctaacacagatcatcacaagctttattcgacgaattcacaagctcaaaaactacgattcaggaatcaataattgccaatagtnnnctatccagannatatccnnnnnnnnnnancnggagtatataa

SEQ ID NO: 4472 - DNA, 544 bp, Zea mays
cacggcttccgggacctgctggggctcatgatcaatgccagcgacaagaaggaggagaagaagcaggaggaggcgcgggcgatgcccgtggaggacatgctggaggagtgcaagacgttcttcttcgccggcaagcagacgaccaccaacctgctcacctgggccacagtgctcctggccatgcacccggactggcaggagcgtgctcgccaggaagtcctcgccgtgtgcggcgccgacgagctcccgtccaaggagcacctccccaagctcaaaacggtacaccagctccccgttgcacattcattctttccaatccaaaccaccaaacatatgcaggggcatttcggtaactctgctgcgacaaaaagtctcactttgtttgttacttgctcccctctctctctctctctccttctcagctggggatgatcctgaacgagacgctccgcctgtacccgccggcggtggccacgatccgccgcgcgaagcgcgacgtgacgctcggcggcatgtccatcccgcgggacaccgagcctgctga

SEQ ID NO: 4473 - DNA, 629 bp, Zea mays
  misc_feature (458)..(471): n is a, c, g, or t
  misc_feature (478)..(480): n is a, c, g, or t
  misc_feature (566)..(566): n is a, c, g, or t
  misc_feature (568)..(569): n is a, c, g, or t
  misc_feature (587)..(588): n is a, c, g, or t
  misc_feature (607)..(610): n is a, c, g, or t
atttgctgatgtgttaatttagttactgcttgcacactaattaaaatcggctgtttgctttcgaagatgctcatcgcctccgcaccagagaacagttcgcccgcggtgctgctcggagtcggaggatggacgaaatcccagctggtccaccggtcagtggtgcctccgagagggcgttgccggcacaagaaaggagcaagcaagaggcggcaggacaggaacatcacatccctgtcttctccaaccccgatcttggccagcaagaacaggaggagcagccatcgtcatggccaacgcctgctgctcctccagctagagcgcccaaggatgaccacagtaagacgcaggcagtcaaggataggctgaaggacaagaattggggttggagaagacagggatgtgatgttcctgtcctgccgcctcttgcttgctcctttcttgtgccggcaacgccctcnnnnnnnnnnnnnntgaccgnnngaccagctgggatttcgtccatcctccgattccgagcagcagcgcgggctaactgttctctggtgcgaaggcgatgagcatcttcnanngcaaacagcattttaatnngtgtgcaagcagtaactannnnaacacatcacaaatggaat

SEQ ID NO: 4474 - DNA, 760 bp, Zea mays
ctactgtaacaaaggtcgaggttgttggtatgggtgatcgcgtttgtgtggatctttgcagtatcatgcgacctggtgaaggccttctggtttgtgtatatctctcacctgttcagtgttgctacacataggatttttttttgtaaaactgttaaattagttcaccacgttgaactagatcaatgcaccctcatagatttacctttctgcattactacctctattgacacgtggcattttctttattcctgttatcgacataagcatactatcctgcctctgaagtctcatgacatcctacttctaggttggatcctatgcgagaggaatgtttcttgtgcattctgaatgcttggagactaattacattgcaagcaggcctttcagagtcaatgcagtaagcttaaaacaaaatagatggccacaagctaaactattatatgtatgtagtgtattgcaacagacctagacctataagagtttgttctctcccacttttaggggcctgtacatgcatatgtcaccgttcctggtggcaagacaagctacctctcagagttggggtcaggaaaggaagtcatcgtgatcaatcagagtgggctatggcgtactgcaattgtcggtcgtgtgaagatcgaatcaaggcctctgatccttgtagaagcgaaggtaatacagaaaggacgttctttactgcacgtgtaatgtgtttatccatatacatgtccatttgatatccatatacttgcaggatcactct

SEQ ID NO: 4475 - DNA, 408 bp, Zea mays
atgcaggggtacctcgacatggcgcaagggatgctcattgatccgccaccgatggccggttcctccaccagtggcggcggcggcgacgacgatgacgacgacggtgaggtcaagctctggagctactgatggccgatcgcacgtgtgtctgaaggaagacaggttgcattgggcaaataacttccctgtacagccttgggaagaaccggtaccggtgaaatgtactggccgtggccctttcccttcggttcgtctatgctatgtaatgttatgtatcctgctcttctgatgattaagggtattcaggagaagcagaagactgggtttactcagttagatcgtttagtttaatttggagctagagatgtacctgcatgcatatataatgcatgcacggtaactgtgata

SEQ ID NO: 4476 - DNA, 369 bp, Zea mays
ctagccgtcacctgctcgtatttgatccgcgagaggaagaagctggccgacatcaagcagagatacttccgtcagcacgggggcctgctgcttctggagcagataggcagcagcgcgggcgcggggcaagcgttcacaatcttcacggaggcggagctcatggaggcgacgggccgattcggcgacgagaacgttctcgggcgtggcggccatgggaccgtgtaccgaggcgcgctcaaggacggcactgtggtggcgatcaagcggtgcgtatcgacgacgacgacggacgagcggcgcaggccggaaggagttcggcagggagatgctcatcctgtcccaggtcaaccacaagaacatcgtcaagct

SEQ ID NO: 4477 - DNA, 525 bp, Zea mays
tccgaagctgtccagcttctgcatcctgctcttcatggtgcagtccgtggaccggatcgtgcagtgcctcgcgtgcttctggatcaagatccgcggcatcaagccgcgtgtccccgcgtccggcggcaagccccgtggaactactggaaggaagagcgcggatgccgagaacggtttcgccgatggcgacgccgacggctacttccccatggtgctcgtccagatgcccatgtgcaacgagaaagaggtcagtagctagtagcacaagaaaactcacagttcgatacaccagtcgatcggtgcttcttacgacgtgacatgaaggagggacggatgaatcaaacatgttatgcatgcaggtgtacgagacgtccatctcgcacgtgtgccagatcgactggccgcgggatcggcttctgatccaggtgctggacgactcggacgacgaggtgtgccggatgctgatcaaggcggaggtgaccaagtggagccagcgcggcgtcaacgtcatctaccgccaccgag

SEQ ID NO: 4478 - DNA, 361 bp, Zea mays
atcgctccacttcccagcctctgcatagatgttcgacaagacagcgtagttccctgcacttgagggctgcaaattgctcagctcgttcactgccagttctgcatactccacattcttgtgcagtcggcatgcactgagcaaggacccccatatgacctcattaggctcccagggcatccttttgatcatgtcaacagcctccttaatgagccctccacggccaagaagatcgaccatacaaccataatgctctatctgaggcttaatgccatagtctgtctccatgttggcaaagaacctccgtccttcttccacaagccccatgtgcgtgcaagcgctgagaacattgatgagtgtcaca

SEQ ID NO: 4479 - DNA, 502 bp, Zea mays
  misc_feature (395)..(396): n is a, c, g, or t
aatcactctcctcctccccgtcagcgtcagcgtcagcgtcagcgtcacgctctgacgacgacggcttctttcttgcatggtcatcgatgagcgtatcgagcagttcgtcccacatcttgttcacccttcgtgccctcgcacacaccatcctcttgaccatgtccagcttcaccagcaccgggaagtagtcctctaggttgaaaccccctatgagcgacgagttggcctccaccagctcccggaagagcttgttccgcccttcctccctgaagaacttgccggacacagcgtggcaaacgatgtcgttggcgaaggagttgagctgctcgctcaggtcgaaggcggcgcctgcggtggccgcctcgcggatcttagacatcaccagcctcacctannatatcatttgtgggtgcttgttttcccaattgtttgggtcaccttacataaagaggaacaagttgccctagctaagccaataatcgcgcttctatcgaaagattac

SEQ ID NO: 4480 - DNA, 790 bp, Zea mays
tggagcagagatggcagacggagctgcactcgcctcttcactcggctgccgcctttttgagcccgggcatccagtacaacccggaagttaagttcttccgcactatcaaggaggagttctaccaggtcctggataaggttcttacgacccctgaccagaggcatgatatcaccgcacagttgcatgctttccgcaaggcacaagggctgtttggttcgaacattgctaaagaggcccgcaacaatacccctccaggtatgcatcgtgtcttatgtctgctgtactgttctggtattgttatgaatgctgcaaaattgttctagcattgttggattgtttttatgtgttgatgttgccatttttttcaacagaaaatcagtacattggtatcactggccatttatatcgttaatataataatatgcaatgtactgttgatttctagtcaaaataattgctgctatatgcctatatgtgaagttctctcttggtatctcactggggcttgattttacatttcaaaatatggctaagggcctgtttggtagagctgccactgattccgattctctgttagaagtgattctctgagagaagtgattctgtggctgaaagtggttctcaagtgaaaccatatgataaaccctatagaaagtctgactatatggtaggagtgaatcaggagattgtaaatggaggacctgggtcagaatgttactcgattcatctaaaacctccatccttgtaaatggcaaccctggccccttgttcccttgtaaatggggcctgc

SEQ ID NO: 4481 - DNA, 412 bp, Zea mays
ttggatacgatgagatcaagaaccatgtcatggacacggcaagcgtcggcgcgaccatcacactgaatgccaacaggctggatcatgctcctgttgataaggtcgttgaaatagcattctcctatctcctccatgtcttgtccaccttctgcggtgataaagccttcagcgacccaccttcttatcaaccggtccctcttgatctcatagtcttcaggaaacacgcctagatacaacaagcatgtcttcaagtggtaggggagatcgttgtagctaatcagaagaatcttcttcatctcttccacgtctgtatcttgaatctcaagtgctgaaccaatggacttgagcgtcttctcccattcctcttttgtgatacccttagtggccaataggctagcgactgtaacgattg

SEQ ID NO: 4482 - DNA, 493 bp, Zea mays
  misc_feature (403)..(407): n is a, c, g, or t
  misc_feature (411)..(424): n is a, c, g, or t
  misc_feature (427)..(427): n is a, c, g, or t
  misc_feature (430)..(432): n is a, c, g, or t
  misc_feature (441)..(441): n is a, c, g, or t
  misc_feature (455)..(455): n is a, c, g, or t
  misc_feature (464)..(464): n is a, c, g, or t
  misc_feature (467)..(474): n is a, c, g, or t
  misc_feature (483)..(490): n is a, c, g, or t
agcgggacgaacatgcccgacccgacgctggacgcctcctaccgagccttcctgacacagagatgccccaggaacggcgaccccacagccctgaacgacctggacccgacgaccccggacaccttcgacaacaactactacaccaacatcgaggtgaaccgaggcatcctcaactccgaccaggagctcaagtcgtcgcccctagcgcagggcaccacggcgcccatcgtcgaccagttcgcggccagccaagacgacttcttcgcgagcttcgcgcagtccatgatcaacatggggaacatcaagccgctcacggacccgtccagaggagaagtccgcaccaactgcagaagggtcaactgatccaattaagtcgatcggtcgtaattaatgtgtgcagaannnnntgtnnnnnnnnnnnnnngtntcnnntctttagtntgataatcctgatncaaaggganttnnnnnnnngcattttgnnnnnnnnggg

SEQ ID NO: 4483 - DNA, 380 bp, Zea mays
agcagagccatggacaaaaaggagcaggggcacgattcggcgacattgcggaataaggggcgctcggccgggcgcctgagctggaggagaggagcaccggcagagagagcggaggccggggagaactggcggctgggcgagctgctcggtagagcaggaaatggagacggagctagcagctgtgagcggatgaggctgagggagaagttcggctggggaaagaagtccgcacccgtgaaaaaaatcaagcgagggccggctggaggatagagccgactaggatttttttagatttttctgttttcttcttaatttttttaataaagaaaattgctgatatattggattaagatttttagtgatgtaaagtgggtctgcca

SEQ ID NO: 4484 - DNA, 550 bp, Zea mays
  misc_feature (446)..(447): n is a, c, g, or t
caaggagaactagacatttgcactgtgcaattgaactcgaatctagtcctcgtttactcgaatcccttactgtgtgtttaaatatatgagatgaatatcttgtaatgggatcgagttttggaggtaaaaaaaatcgtagatccgggccccgcgatatttctgttattttctgtgatgattttagtgcatctatgcacattcacgcggttttaaaaaaaattagggttctaaccctaattttattctgtgactttttcttatctgttcttgaccgtggttcaaaatcacgagtctctttttgtctctgttgacatatgtagcgattaaggttaggtcataaaaccctaactctaaacagttgtgagagctctctggtttgaggccgagacataatatgtcccttacagtggccgaacctaaatcttatggtaaaagatcccaatgtnncatatcatttgtgggtgcttgttttcccaattggttgggtcaccttacataaagaggaacaagttgccctagctaagccaataatcgcgcttctatcgaaaga

SEQ ID NO: 4485 - DNA, 526 bp, Zea mays
ggttgaagcaaggtcttgatctcgttttggcaatattagtagaaaatgaaccaattacacttgcagcaaattctgctcgagtaccaacgcttatgatagctgggcctgttccagatcgcatcaccatgccacagcaggttcctgatgctcaggaaagcatggatggtacaacactatcgtttgactctcttgctgcaaggcatgctcagttcttaaatgacgcgaacaagcttgtggtaatttcttgtgctctgatctatgtggtgcccacaatacctgtgtggctgcatattgtacattttaaatatttttagttaggtcaggtctgaatgtttgttctgaaatcatgtaggtggcagatatcatggctccattgaaggaacttgcatttgctgatcccaatgtcgcatatcatttgtgggtgcttgttttcccaattgtttgggtcaccttacataaagaggaacaagttgccctagctaagccaataatcgcgcttctatcgaaagattaccacaagaggcag

SEQ ID NO: 4486 - DNA, 524 bp, Zea mays
ttctcgccgcgctgctggtgagcgaggagttccaaggcatagtgtcatccgaaacaggaagctcgtcaagagaaggtgagcaggcaggcagtggaccagaaggcacagacagcgtcgctgtccctactagcgctgcggcggctgatacggaggcatccaccgtgccaaatagctccacaggtgaagctaatgttgtgtgggcttttatatcatgcatgatctgcttaccatagtgactagggggctcatgtgttgggcttcaaatctagcttacctaacttgcttggtactgaacggtatgacgttggttgggttggtggctttcgtgcagatacggctctggtgtggctggcggccataacgagtgtgatggtgctggtgtcctccaacctcggtggctcaggctacttcaacccgtgaccgtgagtgaaggcaacactggctgtaacttgtaagggtgacaacaagagagttctcttcttgttcttgtttttttttcttttcttttggaaggctagtgaaga

SEQ ID NO: 4487 - DNA, 389 bp, Zea mays
  misc_feature (381)..(381): n is a, c, g, or t
acagcttcagaaacccgatgattcattgcgagtaaatttaacatgcggccaaaagtagccatcgatggaacaaaacccttgcttatcatttctgcaagatgcgcatatgcacggtcaacatttgccgccttgcacaacccatcaactagaatgcgataagtatacaaatcaggtttatatcctttgctgatcatttcaccaaaaatcttttcagccatttgcatattcagcttactagaatacgcaccaatcagaatgttgaaagtatcagctgttgcagagtaccctttctcatccaacttctgaaagagtaggtatgctccatcaagatcaccattcctgcagaatccatgaatcagcgtgttgaaactaactgcatcnaggaacca

SEQ ID NO: 4488 - DNA, 381 bp, Zea mays
gttagcttttcttacacgcggtctgtgaagccacaaatcaccaataaacaaacacaagatcgacgctgcagaggaaggcatccggcgggtggagcgtggacatataatatactagtagggagacgtagctcgtggtcgtcgtcgtttaataagaagcacttaattaaccacggcttaaccttaatcaagcgatcgtgacaagtacctaaaacaaacagcctagggtagcaggtacatcatcatgctcgggtccggcacgtccgtccagcagctcccggcgttccagtacgccgccgcggccgacgcgtcctcgccgatctcgaacatcccagcggcgtccagggacgcgaacggtgccatgtcctcggatactgaggagta

SEQ ID NO: 4489 - DNA, 378 bp, Zea mays
tccagctagcagcccgtccgtcgtctctcgtccaagaagcatacaactactaatggggaggtcaccgtgctgcgaccaggacgcgggcgtcaagaaaggcccgtggacgccggaggaggacaagctgctggtggactacatcaacggcaacggccacgggagctggcgccgcctgcccaagcacgccggcctcaaccgctgcggcaagagctgccgcctccgctggaccaactacctccgcccggacatcaagcgcggccgcttcaccgacgacgaggagaagctcatcatccacctccactccctcctcggcaacaagtggtccgccatcgccaccaggctgcccggccggaccgacaacgagatcaagaactactg

SEQ ID NO: 4490 - DNA, 904 bp, Zea mays
agggcgagcagttggtgtcgaacatatcccagagttggttgctacttctactgaaaacatcaagaaaagtgcagcagccccacatctaaatgatggatccctcagtatacacgtttctggtaaatattagcttgttttgtgctaccataaaactcagccatgctggagcagcaaatttccaacaggtccgatgctgacttaggtgtgcacataacaacttagttgctgtgagctgagttatagttcagatgaatatatcattttaatagcacttatcctttttcttttattgactgaataaaggaacctgattcagctaatgaggttgtccaatactgctctactagcagggttttgttatattgcttgtcataccatgtggatctcccccatttgtgaggttcttgtcctcgtatgatgaaatttgctgcagctttagagcctgtttggttcgtggctaattgtgcacactttgcttaagtttagtcgtctaaattgaagaactaaccttagacagaaaagttagacaaaatgtggcaagttaggcagcaaaccaaacatacctttagtattccttagtttggcactctggccttatgtgcattcagcattgttggttgttctatatacccttaacacttgatgcaccaagagatgtttaaaatggatgcagatggcagggaaggttggccagaactggcaccctatgaagccatccatgttggagctgcagcaccgcagatccccgaggcgctgatcgagcagctgaagcccggcggcagaatggtgatccctgtcgggacagtcttccaggagctgaaggttgtggacaagaaattggatggcactgtcagcataagagacgaaacgtctgtgcgctatgtgccgctcactagcaaggacg

SEQ ID NO: 4491 - DNA, 378 bp, Zea mays
gatcatgcagctccgacgatcctctccatgcatgggaattgggagcacaagagctagccttctcgtacgtacatgagaccattctatttaattagctggctatatatttactatatcttgctacatacctagtaggctagtacaacataacacgccgccactgcaacaaggaccatgcatgcatgatgtgtatatgtggtacgtctggttattattaggaccagaaaagttatgttttacgatgtagaaagatgcatatgcatgtattcgaccaatattacacataagaatctacgcatgcctgtagctagctagggtcatgttaaagcaaaaggtaggcaggcttgtctatcattgactgtaaccttccgtgacaca

SEQ ID NO: 4492 - DNA, 501 bp, Zea mays
  misc_feature (492)..(495): n is a, c, g, or t
gtcaaggacctcaacaaggagcagcggctggagctggagagcggcaccttcgatgccgtgctctgcaccgtcagcgtgcagtacctgcagtcccctgaaaaggtacttaccaaattcatctttttggcctttgcagttcctctctactggcatcggcatcagcgcatttggcgattaatttggcatgaatccaggttttcgcggagatcttccgggtgctgaagccggggggcgtgtgcatcgtcagcttcagcaaccggatgttctacgagaaggccatcagcgcgtggcgggacgggaccgcgtacagccgcgtgcagctcgtcacgcagtacttccagtgcgtggaggggttcacgcagcccgaggtgatcaggaagctgccgtcggccggcggatcgccgtcctcgccgctggacgccgtgatgaggctgttcggcgtggcaggctccgacccgttctacgcagttatctcgtacaggaacttcaagnnnnatgtga

SEQ ID NO: 4493 - DNA, 450 bp, Zea mays
tccataacaaccaccaccgtgaccaaccaatcaataacattcccccgctcttcattttcgcaattttgtatggaagcaccaacaaggcaacaattccatcagatctatgaacaaaggcacaggccattcaactcgctgctactaattacaatgactattagcttctgtattcccacagtaggctttcttggcttccaacaacactagtgtgcactaagcccttgaagccatgtcaccccaaaaaaaaattctggaaagaataaatccatctatcaccttggccgtgtgttcagttcatacaacaggtgcaaaaatgcttgctcctgaagcagatgccaggaagtgctcgagacatggagagctcctcggcgcaaaatgagacaagctcaacgcttcaactgcgggaagtgaagcctcgtgctcggattctaccgctattgcttgcaagag

SEQ ID NO: 4494 - DNA, 1005 bp, Zea mays
  misc_feature (921)..(922): n is a, c, g, or t
  misc_feature (960)..(968): n is a, c, g, or t
ggaaaaaaaaggaacatgaggaacataaatatattgaaatttagaaattaataaaaataggcatttgaactgcttcacttattctaatggcagaacagtctgatccagaataaggttaaagtagtcctctaagaaaatcaactacaaaaaatggccgcaattaatacagaaactgagaaaccaaacaatgatagcaacaaataccataaaaagtagcacgaaacaatcctttcatgctcgtaagtagcaactggccgacaacaatcttttttttcttttgagtcctatgtttatgtggggaaaaactatacaattatcctaagaaaccttcaatagggtgcagattcgaaaagggaaaaaatgaagcaggttgtctaaggaatctagactacagttttctttaatgatgtcacaagtctttgttagtaatctgtaagaaaaaatgaactactaacgtgccttctttatccttgggtagcatcgtagaggaccactaaataatagagacaactactaatcatctaaaactttgtaacttaatacaccctcagagaagcaatgatgtctcaattaagtatcttaagcagtgatgtctcaaaaattgattttacaagatattaggatcactggcctctaatatacaaatcatagtagtctttgctgctacaagtacaactgttacaacctacaaacaggcaaaaagataataaataatttgaagaaagcattttatccttatccttactgaccgagaagaataggaagacagggcatctttccccactgtccattaaattttgagcttcatggtatgcagcatccagcttattgttcccatttggtgtacttgcccaaacgttgtatttgatacctttatgaatgtcatcttcactatatgactttatcataaaaaacttggcnngattatattgaactgaaaaatctgatctattatactgnnnnnnnnnatcaatggacttgtgatatctttcacagtggaggata

SEQ ID NO: 4495 - DNA, 395 bp, Zea mays
tctcaccgataaccaccaaaacttggttgtcattaacagcactgatcagctcctttttcagcctgaatattggaaggctttgtctctgctcctggatcgaaagcctcgacttctgcccatatgttccggccttcccatatgtcatcttccattccggcacactctgcgctgatagtcctgtgcccatcagctcctgcatcagataccgtccacttgaaatgggatcctcccatgagcggttaaggtcctcggggattgcatcaaccattcctctttgctcctgcgtgtgaatatcacgcctctccttagtaagtgcggattgtagcgctgccgcacggctcatcgacccctcaggattcatggaaatcctcactggagacatgtcagaatgagga

SEQ ID NO: 4496 - DNA, 477 bp, Zea mays
tgttgacgaaatctttcactagttccccgtcatcttccagcctgatgtctgcgatgtctccaaattgtgaggcaacaagtccatatagtgtccaagccactgggcaagcccacgagtaccatctccaccatattggtatcctctgcaagccagtcacatgtatgattcagcatcaacagtacaacgaaaagtgaggtttagcatagtacaagagtttctcttgggcacttaccgggcgggggataaggaagccggcaaagatgttccatattgcgtagaatgcagttgagactatagccgcaatgtcgctgtttggtgtcatggcgactgccatcattccataaaatgtgaagtacatgaaggtgaagaacatgaagaacatataccagaagaactttgcaactgtccaatcaaagccaatcaggctgtagacaatgagaccatacacaactgtctgaaggaagatgtgtgggatct

SEQ ID NO: 4497 - DNA, 330 bp, Zea mays
gcgggtggatcgagactgaggcaacgatggccagccattagagtgagtactcacgttgggcaggatcttgcagtcgtattttttggcacatttgttgttgtcccacacttctttgccctggccgtcgagggtgcccttgccggtgatgacgaggttgtcaacgtgcacggcccggagaagttgaggggaccagcaaggtagtcgcccttggggatcatgagcgtctgcttcccttccttgccgcacgccgcctcccacgcatcattcagcgctttggtgctgtccgtcttgccgtcgcccttggctcccagcttggatatgtcggaagac

SEQ ID NO: 4498 - DNA, 383 bp, Zea mays
acggtgctgaagaggattctttggctcacaaaatcaatcagacatggttatgcagataacattttgcaccagtgggcaggagttaatctgcagcctgctttaatggaacggttgtttgtggaagaacaccctaagtgcctttattataatctgaagatcatcttttcatggaacatggaattcccattcaacaatggagaagattctagcacacttttgtccttgtgggataggttagttcatttaaacagcaccatgtcacatgcaaaaacgagagaaatagttctatgttgcatgggtatgtgcatgaaattgttcactaaacaatctaggggtggtatttcaatggattgtcttaagaccagtgagatctctgcatcctt

SEQ ID NO: 4499 - DNA, 1181 bp, Zea mays
  misc_feature (837)..(837): n is a, c, g, or t
  misc_feature (880)..(880): n is a, c, g, or t
  misc_feature (897)..(897): n is a, c, g, or t
  misc_feature (958)..(959): n is a, c, g, or t
  misc_feature (1019)..(1021): n is a, c, g, or t
  misc_feature (1063)..(1063): n is a, c, g, or t
  misc_feature (1088)..(1091): n is a, c, g, or t
  misc_feature (1094)..(1095): n is a, c, g, or t
  misc_feature (1122)..(1126): n is a, c, g, or t
  misc_feature (1128)..(1132): n is a, c, g, or t
  misc_feature (1135)..(1138): n is a, c, g, or t
  misc_feature (1153)..(1155): n is a, c, g, or t
  misc_feature (1175)..(1175): n is a, c, g, or t
  misc_feature (1177)..(1178): n is a, c, g, or t
agtatgcattctagcagtatgtaatatgtgcaacttccaatatattactgttatagttttaatatattgttttctccgaacccctgtctgtccaatataaagcgacaccatcgtacatgtgagaacgaccatgactaggactgaaccttaaacatgtgctttgacgaatgatagatgagaggaccttttaaaccttagactgaaatttgctctcatggaaagtcgaacacaagaacctaaggagtgctactagagccatctaaccaacttgaggccctttcagaaatgatgtaaaaatattagtgaagacctgtttttggtgatgttattgaggtgacatacttattaatgcacttttcgtgtacaagtgaacacagttttaatataagttgtttagagacgatacatatctttctttggtagttgtgcatgctagtagttgttgttcttttgggtgatgtttattttggttaaagcttgcctatgttgccaacttgacatggggtccattactcggtggctgtgcattatatttcactaggaaagcattttttttcttacaggcagaacttatatggctcttaaactttaacctcttcaggttactcaagagaagaaatattgggctgtaactgcaaagtcttaaatgggccaggcactagcttggaggttttagaggaggtgcgggccaggattatatagcttgtatgaccacattctccataatatagcttaccttttaaaatttatattcaaaattggacgtacagataaatcagcatatttgttctgagcaggcatgcacggtggatctactgagttacaggtgcgttgctntgtgtttgtacttgtagctagtagctaccagctcaggttatgnggttatgcaaggaactnaacagaagttttgttgcctgtgctttctatcaggaaagatggaagttcattctgcgatcanntacatgtatctcctatccgagatacttcgggcgaaggttcgcttacatctttctcaggtnnntccctgaaagcaccgtctctcaaatgcattaaataatcgccncgcaattgctatgtttgtgtgctannnnaanntaaactacggaacagaatagatttgcnnnnngnnnnnaannnnatattgcgcttttannnaaccatcatggggaaaaagntnngcg

SEQ ID NO: 4500 - DNA, 402 bp, Zea mays
ttttgcaagtgtggcaacatggggctggctctgcaagttgtattggatatggaagcaaacaatgccaagccaaatgtcgttacatatagtacgcttatggatggattctccaaactggagaaatatgatgaggcactcaagttgcgtgaaaagatgaagtctttgagaatacaactggaccgagtttgctacaacaccttactggccatatatgtgaagacagggaaatatgatgaaattgctactgtatgtgaagaaatggagaaattgggcattgagaaggacactgttacttacaattccttgattaatggatatggaaagcaaggacgcttggacatggtcgctttccttgttcaagatatgcgggcgcaaggcgtagctcctagtgtgctgacataa

SEQ ID NO: 4501 - DNA, 542 bp, Zea mays
gacgcctccgagcgcttcctgttccggcaggtggtggagcccagggagttcagggtgttccgctgcgtggcgcggtacgggtaccgcgactccctcggcgacgaggcgcaggacttcgtcgccgcgctgctcgagagcctccagtgctacgtgcgagacgtcaacctctactcggtgcacgagatgcagaacgtcagctatccggtctctcgggaccagagcttgtctcgggagaagccttccggaaggcacgccgtctatgctgaggagatgatcacgcccatccagtccttctccgagctgtcccatggtgccagcagcaatcgtttaccgcagtttcagcaggtgatgacagaatctacgtgctaatcagtttagtttagctatgagctaagtttcagtgatctatctatattgtagtatatgtatatatgttcaagtttgcgatggttcatgagcaggagcaggcatcaaagatgaatattgaggagttggccaggatcgaggaggaacagatggtgattcagagagaagcagagaag

SEQ ID NO: 4502 - DNA, 627 bp, Zea mays
gcaagaataatggggatgatgaaccctgacgctgttcttcgcttccgctttcaggacgttctggggaggtcgagctccgtcgtgtacgccgtcgcgctgctggcgtccgggcagagcaccaccatcagctgcacgtttgccgggcaggttatcatgcaggtaattaaccagattgatccggtactactggtgaatcatatagtggatagagagaattgagcatagctgacgggattggcgacgtgttgcttaatttgcaggggttcctggacatgaggatgaagagctgggtgcggaacctgaccacgcgcgccatcgccatcgcccccagcctcgtcgtctccatcgtcagcggcccgtcgggcgctggcaagctcatcgtcttctcgtcggtgagcaaataaaatactcgttccagcctcgtcatctccattgcaagcagctgctagctgtctgccctgttctgacggcaggcaagcgggtgcttgattgaatgcttgattgtttgttgcgtgcagatggtgctgtcgttcgagctgccattcgcgctcatcccgctcctcaagttctgcaacagcagcaacaaagtcgggcccctcaaggagtccatctacgtgcgtaacactg

SEQ ID NO: 4503 - DNA, 370 bp, Zea mays
  misc_feature (361)..(362): n is a, c, g, or t
aaacacttctcctgttttccctcacttgtgacctggcttcacctctgttaattagagttgttgctcagatgccaatttgacacctttaaatttctgaatacactattcctactccctcaataacgtgcaattgtgcatttgatcaaccattagtttttatatatattgtgaattgaaaacaaaatataaaaggttcagtcttgctcctcaagcaagattgccacatggtgaaaatagctcaatccattgtacggcttggtatgggactatatatatataatgttttttttaaaaaaaacttgtgcacgaatttctttttattctttaaaaaatcgtgtacgatagtcagttggttctcatnntgtggacg

SEQ ID NO: 4504 - DNA, 705 bp, Zea mays
  misc_feature (697)..(697): n is a, c, g, or t
tcggtacttgattttcaagacagaatgtacccttttttcttctttttcttaacaaagttaatgtgaatatgtgattcgataatgcaaaaaaggctacattttaaagacttagagcctgtttgtttgggattataatctgaataatcccaaacaaacaccccattagtacaaacctcatcagcaagtataaccagaccttccttccgacaaaactctactatctcctcctggtttgtgacggatagcacctataactaaaggaatgagatgtgttgacgaagagaaactctggtacaacctgagctgaaacgagattaaattgaaaattttccaataaccagatcatcactggtaagaactaccctgaaaattttcatctggatgtccgttttctttattctctaacatgtaaaaggattcaggaaaacaatgtgccatatatacctgtccagtagggttgccgggatttattaccaccatagctctaacagtgaggccagccgaacgagcctcttccaagcacctcttgacttcaaagatctctaggccccaaccgttatcttcagtgagattgtacggcacctggtcacagttcagtattgtagttatcccaacccaagcatagagcacacacgtgtgttttgtcttctaatataagaaaccaaaaaaaaaaaaattgtttgaaaaaggaaaaaancaaggaat

SEQ ID NO: 4505 - DNA, 376 bp, Zea mays
cttcggcctggatctagggttgtgtggggaggggttctggaagccttggccgcgatgggcgagtcagacgatgacgcccgcaccttcaaggtcgttttcaccaccaccggagaggagcagttccgggagcttgtgagggagaagctgcgcggattcaggaggggtctggacgacaccctcgtggtacgatttacttctctcaccccggctcgctagattctggtcttagcatttgatttcggttgtttggggacttgggttctctgcagctgtagattctggtcttagcatttatcatttgatttagatggaacttaattggcacttaacagtatgtaaaggactagctagaattcaagatggttgcccaagtacg

SEQ ID NO: 4506 - DNA, 690 bp, Zea mays
cgactccgtcggaccaacagatcaccatggtatggttggtgacttgacatggtatgcggtatgccacaacatgaaaaatgctttgagccctggactgaagcacacgctgaattctacaggagagcgtagcgaaggagagggaagataggaaggagacccttggagaaggtgaagctgtgatgggtgatgagacgtcactgttctattcagacatcatgcctcttcttgtaagcatgccaatgcaaagaaattactggttaccagtgtgtcaatttgctctaagcagccaccaatctcgcaaaaataaaaataataataatattggttaacaggtgaatgaagagccaactgttggggaagaagcgtacgtgtggtttggatctgtgttccctttggcttgtgacgtggtcaatgctcgattcacattcgaagctctcactgccaccacagctaacaggctgcactaccctgcctatgacaggttcctgaaagagatggataagtatgcctgcctgctccatgattgcaccaacaattcttcatctgtcggcactatcgttagatgtattgatgagcattacaaactcaaaatatgtattgatgagcattacaaactcaaaattcatttctaggtccttcaagttcttccaagatttgccaactccgactggagttgaattcgcctgagga

SEQ ID NO: 4507 - DNA, 1443 bp, Zea mays
  misc_feature (1385)..(1389): n is a, c, g, or t
  misc_feature (1430)..(1430): n is a, c, g, or t
  misc_feature (1436)..(1440): n is a, c, g, or t
tcttcctgattattttcctatatgttgctccagaataaatggtaagtgttgatcggtaattcttgtgaacgtaggtaatactgaatctctgactgtttgtgacctatatcccctgaaaacctgaatctcagattgctttagcttagcgcctacatggcagtcctcttgtcgtgaacattttgatctgtgttccgtatatgcttgtaggatcatagtgcggtggtcatgggattgggatctgctccgtatttgcaggtatcatgattgttttgcctggttacttgccttgttgtctgcattgaactacctgctatatgattggatatggacaactctgtggagtgtggacatcatattcgttagaaatcatcaatattcagtacccgcctcagtttttgtaagcaattgtagtacatgtttgttttttaagttgtccatcccattttagatcacaaagccagaacgcaatcgagccaaacaagatcatcttttctcacggaactatcctgcttaggctgaatgttctcatgaaattgtgtgttttgtgtgccagaggtatacttttttatgaatgcatgatgcttatttggttagatttttcttctgagttcatatatttggtcgattggaatacaaattctaggaatttattggtattaaagaagacaatagtctaacaatagagaatcgtagttgaccatacacatattatagagtccatggaatatgtatttctgtttgtggtgcatgactgtacacagattgtattctcctggtaaccttcatggtgttttccctgttctttgacagggtgaagccttcgtgtctcctcgagggaaagtcactgacctttcttgggacgtggaccactgacggcccccgtcatcccccatgacggtgatcctagggtgaagccttcgtgtttcctcgagggaaatctaccagtgcgggattgatttagtcagcaccattggacacaggtttcactgaatctaaacaattacacctagagtgtctctacaattgtgacctttatttatctggtgtcctacaaagggcaaacgataaccattttcaatgaacatagctaggattattgccatgtgtctctccttgttatccaactctgaatcaacaatacttgaaactatctgcttgagtgtgataaatatgttgtcgctacctgcatgtctcatgtcaattcaccaatagctatgagggaccgagtattttatatttatgattgctttggtttcatgaatcagggtttagttccattgcctggacccatcaatgaatcatggtgccaaggtcttgatggttcgacttcaaggtgtgctgagtaatataagcaggggcacgcttcgcaaagtggttcgttcatnnnnnattatgcatgtgtcaactaatctaattgatgttttgtttantgatgnnnnntat

SEQ ID NO: 4508 - DNA, 879 bp, Zea mays
  misc_feature (42)..(43): n is a, c, g, or t
  misc_feature (573)..(573): n is a, c, g, or t
gaggttcggaccggttcatttcagtgtattcgttccagttgnnttttaatggatacaataacataataccacttttcctacttctatgattacacaaatatgtagtgcactttattagtgtgttggcttgtgtgttccctgatgaatgtagttttccaataattgtaagcctgaccaaacatataacactgaatattttgtttgacttgcacaaactgtcaggttaaatggagacaagtagctttgctggagcgggatatccttttgaaaaatctaaagtgtgtattagaatcactgagaggccgggtgacaggcaaaactaaggatgaaatcgaggagtctatatctatggttggtttcttcatattattttgccaatttattggattacctttccccttggcacacacatgcacgcgcgtgtgcagttccagcaacctgctgggatggtgctcccttttcatttggatatttgattggggtgtgacgttttgtaggtggagatccttgcggttcagctctccaaaagagaagccgagttgcttcaacaaaaagaagaggtcacaaaattancaaaatcattaaagcaggtgtgttttacattgctgtataacttatgtaaatgtgtgttactaatttgaggaacgagaatctatttacttgaaatattttaaagttcttactatcatgattcagtcatcttgcactgtttatagttccccaccaacttgtttagctgaaaggttgttgtctgataggtggtagctatgttttcagaggataccttgctcaacatgtgagagatctgcaacaagttgacttaacatttaaatctcaatatcttctacaaaatacttcaaccaggaatcttaatgttcc

SEQ ID NO: 4509 - DNA, 675 bp, Zea mays
ctgcgtgctcaagagccagccttaaagcaaaagcgtctgaactggaggtacgacggatccaggacaggaagctaccttttctccctaatctaatcagttcatgtccatgtccatgtccagtcatttatcccttttaatgaacaacggtgtgcaatggccgactccttggcttcttgctacaggatgtgaagaagacgatgcagcggcgcaacgcacctgtgcaaaggacgcagcatctgggtcctgacagagctgtgcagaccagggatggagatgtggtcgatgcggagcccgcttcggacgcatcgtctgcgaggagcatccagagggccgggaacgccagcaggaaacgagtgctgagatctcgatgtataataataacccccaatcctaagttagccgattatccacaagacctggtgtcgatttcatctgaatccctgaccgaatgcccaatgtttttcagctctaggacctacggcatcttcgaaaccgatgctttcgaaggataggaatgcctctcagagacggtaaacactaaaaagcttaaaaccttgctaaagttttcacggttgagttttgctaagatcattggccttcctctgcaggaagtccatgagaacacccgagttgagcagccgcacggaggacttgttcgagatagaggacgtccag

SEQ ID NO: 4510 - DNA, 568 bp, Zea mays
  misc_feature (244)..(244): n is a, c, g, or t
  misc_feature (269)..(269): n is a, c, g, or t
  misc_feature (536)..(538): n is a, c, g, or t
  misc_feature (556)..(556): n is a, c, g, or t
aggctactcctgggggccgggacaccaactctttcttaggtatgctggtatctagccttgacgcgtcgagcctacatcccaggggggccgagtaccaggagaggggttgataaaaccacacacagcaagaacaagcaccatacagataagagatgtttaattgatacttcccaaaagtatcttacaaaaacaaaagttattacatccgccttcaagcggggccctagcctcatttctacaggantgaggtactccacattaataagggngcgctggaagcgcgcggcccccgtctccacaacatcttgtatgacctcccggggggggtcttcagtattggcaaccggaccaacggtcaccattggaggggacgtcgaggccattaaagccaaagagatggaggcgcgaaagatggagccgcaactcagctcgcttcccccctcatggagttggagctaaaccagttcatggaggggtaccatgggatgctggggaagctcacacaaaagatggagccgcagctcagctcgctttcnnnccccggaaggtcgctgcncaacacccttcc

SEQ ID NO: 4511 - DNA, 775 bp, Zea mays
ctgtggccatctgtatggtaatgtttttatcttgttaggaaaaaagattgtagcctactagcctttcttgctttattacctctgaagcttcatacggtccaccagataacaggaaaggctctgcaacacggcttgagttcaaacaaaggctctcaatagctattggggcagctaaaggtacggaaactttgagattttcctctttgtgtccttgtgggtcactggctcgagcagaacttagtgtgagtgaaaatgttgttgtaggtttgaatcatctgcacagtcttgatcctcctttgatacacaaggacttcaagacaaacaatgtgctggttgatgaaaatttcattgcaaaggtggctgatgctggacttgttaggttaattagaggatctgacgatgccggcccatcgcgtgggttcagtaacagtgtttaccaagatccagagtaagtccagttataacatttatcagacaagtatgtaggtcacttcacagtaacatgtccagttgagttttcagtgaaagcgacatttttttggtattttagtgttatggatttgtaatgctattgagtcttaaatctctgcagtcatggacgattttctttgctcatcctgtgataataatttgcaacccattctgcatgcttatatgcagggtacagtcgatgactcagttctctgaaagcagtgatgtttacagctttggagtttttcttttggagctaattactggcagggaagcagcttccttgatacctacagagtccaga

SEQ ID NO: 4512 - DNA, 584 bp, Zea mays
agcaagaacatactgggaaaaggtggctttggatacgtctacagagggcagttccctgacggaactcttgtggccgtcaagcgactcaaggacggcaacgccgcgggcggcgaggcccagtttcaaaccgaggtcgagatgatcagcctggcactgcacagaaaccttctcaggctctatgggttctgcatgaccgccacagagaggttgctggtctatccatacatggctaatggaagcgtcgcgtcccgcctcagaggtaagcttttttttttcttcttcttcttctcaagattccaatgtgaacttgcagtagtgcagaacagattctctcttcttcttcggaaagtgactggaatcggattctagctagcacttccttattcttccttccagttgacaaatgttggcacagctagcagtaccacaagcatacgattcctatcctcactttattccacaatgatcactacgcctacagggaagccacctctggactgggtgacgaggaagaggatagctctcggggcagggagggggctgctgtacctgcacgagcagtgcgaccccaagatcatacacag

SEQ ID NO: 4513 - DNA, 673 bp, Zea mays
cagtccaaggaagataagcttaggagagtaacacttcagattgatagttcagatatcacatttgcttttaaggtgaggacggtagttcttgatcctttactattggagtacaggcaattgttttgtttccaggtttatttattatttcaatccatgttgcagggaaatcgcttctttcaaaaatgtctggagcagccaagatgctaactagacccatagcagagagtagatcaatacacttactgttgtaatacattacagtattagtttattgacattatcaagtaccagcaatttcaacccctggatgtgctgctcaggtgactcactaaacaacaatccatttatgttacctcggttcttatttttttaatcaaatatacaagtgagaataaagcaggctgcatcatctgtttttttggccatgtattcaacaaactgcacttttttgcttcatgctgggattccttacaaaagttttcctctttgcaggtggtttcattcaacatggtcaaacgtaccttggttacatcatgaagctctttcttgcagtgcagggataagtgtacatgggacgagttatgatagtattatgtgacacaattctcccaaagatggctgagtgttgttatgatttctcaatttttggttcttccagaactgattgatcaaa

SEQ ID NO: 4514 - DNA, 376 bp, Zea mays
ataccatcaagtatcggggagttaagttaccttatcagcttggatttgagtaggaatcgccttggtggtgtaattcctacttctgtgaagaacttgctgcatttacagcgcctctctttggatcagaaccttctgaatggcacaattccacctgatattaatcagttgcatgctctcaaggttttggacctgtcatcaaacctcctcatggggatgatccctgatgcccttgctgacttgagaaatctcactgctctcctccttgataacaataaacttactgggaagattccttcaggatttgctaactcggcatcccttaccacgtttaatgtgtcattcaacaatttgtctggtccagtgccaacgaatggta

SEQ ID NO: 4515 - DNA, 352 bp, Zea mays
gctgggtatttttatttatattatttaccagctattaaaatatacgtgacaccgtggtttcaatccgtaccgtatatacacgtgcagcgaagtaccttggccttcccctcctcaacccgtacctcgacaaggcggcggatttcacgcacggcgtcaacttcgcggtcgccggagccaccgccctcggcgcgacggcgctcgccgagagaggggtcaccatgccccacaccaacagctccctcgatcgacgttcagctccagtggttcagggacttcatggcctccgccaccacaaactctagccaaggcacgtcacgtcactgaccatcagctctttatattagcagtataa

SEQ ID NO: 4516 - DNA, 1020 bp, Zea mays
  misc_feature (756)..(758): n is a, c, g, or t
  misc_feature (762)..(762): n is a, c, g, or t
  misc_feature (764)..(855): n is a, c, g, or t
  misc_feature (857)..(864): n is a, c, g, or t
  misc_feature (867)..(867): n is a, c, g, or t
  misc_feature (869)..(875): n is a, c, g, or t
  misc_feature (877)..(885): n is a, c, g, or t
  misc_feature (887)..(894): n is a, c, g, or t
  misc_feature (898)..(900): n is a, c, g, or t
  misc_feature (902)..(906): n is a, c, g, or t
  misc_feature (909)..(1002): n is a, c, g, or t
  misc_feature (1009)..(1012): n is a, c, g, or t
agtgcttgtagcgcccaaggttgcaggaaccagcaatgttgtgtccctcaagctgatgggtggtgcccttactgggagacgctatgaatcgagtgcggcagcagttgactccacggacccgccagctgagaagcatgagtaccaggctgaggtacttgtggggtgttatcttcttctgtggtttggttataagatgtcatggtgtttccgctacgttctatgcaggtcaacaggctcatggatttgatcgtacacagcttgtatagtaacaaggaagttttccttcgagaactggtcaggtgggtcacagttacggacacaatcttttttcagttaacgtagcctctttatagagactccgggttccttgttaatgtatttggttaaaacttgtgaaaatgctatgtaatgactgtatcatgttttttatttaatccctaacttagtttgctgtttcatttcctcttgtttgtgcttacagcaatgctagtgatgctcttgataagttgcgttacctgagtgttacggatcctgagcttctgaaggatggtccccaacttgatattcgcatccaaactgacaaggataatggaataataacaattacgtaagtattagttacttgcagcaggccatttacttaccatactttttaattaaaagtgatttttattctcgtcttcatttgcttcatcttcagtgattctgggattggtatgacgaaacaagagcttattgattctcttgggactattnnnagcngnnnnnnnnnnnnnnnnnnnnnnnnnnnnnnnnnnnnnnnnnnnnnnnnnnnnnnnnnnnnnnnnnnnnnnnnnnnnnnnnnnnnnnnnnnnntnnnnnnnnttntnnnnnnntnnnnnnnnntnnnnnnnntttnnntnnnnnttnnnnnnnnnnnnnnnnnnnnnnnnnnnnnnnnnnnnnnnnnnnnnnnnnnnnnnnnnnnnnnnnnnnnnnnnnnnnnnnnnnnnnnnnnnnnnnctcctcnnnnccccccct

SEQ ID NO: 4517 - DNA, 686 bp, Zea mays
cacaattaccgcaccccggaaccattccgagatcaggtacatgtcctctgcctccttctcttgctcttgcagcttgtcatcactcctcaccagttccagactgacaaactctccttgcagagtgttgtagtcgtaggattgggagccagcggaatcgacatcgctagagaaatctcacacgtggccaaggaggtgcacatctcagctagatactcggagggcaggctcggaaagattgaactctaccataacgcctggatgcacagcgaggttcagctctgaacttccttagcttctctgcttcataatttattcttcaaggctaagatacgtctatgttaatggactaatatgatgaatgtatatatatgataagcagatagagtgcatccaagacgacggccaggtgcgctttgccgagggctcatctgtggctgcagacaccattctttactgcacagggtacgtactacgaattcgattgcagttgcacacaaaatggtgctctatcttttctcctttgtgagcacatttaccactcctgaatgaactgaacctgcaatcaccttcaggtaccgctaccattttccgttcctggacctggatgggttcaccgtcgacgacaaccgcgtcgggccactgtacaagcacgtcttcccacccaagtatgcacccaatctctcttt

SEQ ID NO: 4518 - DNA, 539 bp, Zea mays
tgcagcccaccttcgtgcaggagcgccgcgccatgaaggtactcgatcgatctagtctgtctgtgcatcgattcacagatcggtcggtgggtggtgccggctgattgatcttgcgcaactggcagagagagtatgaggagttcaaggtccggatcaacgcgctggtggccaaggccatgaaggtgccggcagaggggtggatcatgaaggacggcacgccgtggcccgggaacaacacccgcgaccaccccggcatgatccaggtgttcctgggccacagcggcggccacgacaccgagggcaacgagctgccccgcctcgtgtacgtctcccgtgagaagcgcccgggattccagcaccacaagaaggccggcgccatgaacgctctggtactgaactgaacaactgggcagtgaagacgagatcctctgaactgaactgaactgacttctcgtttgccgaattcccgacagattcgcgtctccgccgtgctgaccaacgcgccattcatgctcaacttggactgtgatcactacatc

SEQ ID NO: 4519 - DNA, 400 bp, Zea mays
gctattcccaactctttctcgacgttgtccttgtcggagatcaacctttcaaataatcagttgaatggttcaattccagagctcggttcgctgttcacattcccgaagatttcatatgagaataactctggtctttgtggcttcccactgttgccatgcgggcacaatgctggctcaagttcttccgatggccaccgatcccaccggaaccaggcttcactcgcgggtagtgttgctatgggactcttgttctcgctgttctgtatagttggaattgtcatcatagccgttgagtgcaagaagcggaagcagatcaatgaagaggcaagtacctctcgtgacatatacattgatagtcggtcacattctgggactatgaattccaattggagactctctg

SEQ ID NO: 4520 - DNA, 380 bp, Zea mays
gtcccagaatgtgaccggctatcaatgtatatgtcacgggaggtacttgcctcttcattgatctgcttccgcttcttgcactcaatggctatgatgacaataccaactatacagaacagcgagaacaagagtcccatagcaacactacctgcgagcgaagcctgggtccggtgggatcgatggtcacctgaagaacttgagccagcattgtgcccacatggcaacagtgggaagccacaaagaccagagttattctcatatgaaatcctcgggaatgtgaacagcgaacccagctctggaattgaaccattcagctgattatttgaaaggttgatctccgacaaggacaacgttgagaaggagttgggaataggcccttg

SEQ ID NO: 4521 - DNA, 661 bp, Zea mays
  misc_feature (396)..(396): n is a, c, g, or t
  misc_feature (398)..(402): n is a, c, g, or t
  misc_feature (404)..(404): n is a, c, g, or t
  misc_feature (409)..(410): n is a, c, g, or t
  misc_feature (412)..(414): n is a, c, g, or t
  misc_feature (417)..(418): n is a, c, g, or t
  misc_feature (421)..(425): n is a, c, g, or t
  misc_feature (512)..(513): n is a, c, g, or t
  misc_feature (538)..(538): n is a, c, g, or t
  misc_feature (540)..(541): n is a, c, g, or t
  misc_feature (555)..(555): n is a, c, g, or t
  misc_feature (558)..(560): n is a, c, g, or t
  misc_feature (580)..(583): n is a, c, g, or t
  misc_feature (594)..(595): n is a, c, g, or t
  misc_feature (597)..(597): n is a, c, g, or t
  misc_feature (599)..(599): n is a, c, g, or t
  misc_feature (609)..(612): n is a, c, g, or t
  misc_feature (614)..(624): n is a, c, g, or t
  misc_feature (630)..(635): n is a, c, g, or t
  misc_feature (637)..(639): n is a, c, g, or t
  misc_feature (646)..(646): n is a, c, g, or t
  misc_feature (649)..(652): n is a, c, g, or t
gaggctgatgtcttgaacaaagagctttcattagacaaagcagtagagaaaaacgaggagaaaggaaatgatgtcgccccacaggacctgaaatcatcagctgagaagtcggcaagcccaaatggctgttaaattttttttttggttagctcggccattgacagtggtatggggcgggaacctgaggctgggggttgtttgaggaaatcctgagatcccattgagcttgtttcttgcccttgttttctatagttcataggagcttgaggattagttagttgcttgtgtgtttgggtgataggtgaggtcagtgtcctggcatggcaggtatttaggaatagaaggacgattaactgggttttacaatgggggttcatgggtttgaggttgtgtttncnnnnntntgccnncnnngtnnggnnnnngacctcacctatcacccaaacacacaggcaactaattaatcctcaggctcctatgaactacagaaaacaagggcaagaaacagctcnngggatctcaggatttctcaaacaancnnacctcaggttccgnccnnnccactgtcatggccaagctnnnnaaaaaaatttnncncntttgggcttnnnncnnnnnnnnnnnaatctnnnnnntnnnggggcgnctnnnntctatctct

SEQ ID NO: 4522 - DNA, 796 bp, Zea mays
ctgtcattcccttaatttactactacgacgagaggttagatatggataatggaatgctttttttaatttgattccatacagttcactttttgtttatctaatttcaaatatgttcattttgttttaatctcacatttaacaatttatctttttgtttgtttgttttgagtcctctgcttaatggacagttactttacaatccatttgccttctttatttgattttaaaggattcacaattttgaagtttactgtttgatttggttcaggcacgcgaatttgccaatgaacttcgtgcaagtacaaaagcaccgaagaatcctgctgtttggcttgaaggttctggcggctctggtcataatggaagcagttctgatacttcacaggtctcagatgcatactcaaagatgcttacaatatttatcccgcttcttgtggacgaggttgctcctttcctttcattaaatgtagctacgtgactacctttgtttttatttgatagacaaactaatagctattacctttgcagagttccttttttgcacattttatgtgctttgaagtacctgcacttgttccagctggttctcctaatgctaataagagcaaatccggaggaaatgacccggatgatgatctgggtcttatggatccagatggcaacgatctgaaacctggtaccttttcttgtactcactaatatgtgttcgtggatgtaatgttaatgctctatttcttattttttttatgtgttgctatcctgtttacagacagtacctctgctgaactgggtacat

SEQ ID NO: 4523 - DNA, 633 bp, Zea mays
gacatgccttcacagctcaccttggagtctgtctgctgaaaaatatcaaaactataggtatctgattgatcatcataagtagccaccaaggagcgtatgttactctttgagatcttcacatgagatacaacatgtttgtggcccatcaaaccagttccaatttgtcttcctgctggattaactagatgagaggactgaacaccatttgcacaggtaatgctcggtgcaacaaaatgataagtgtcttttgtgacctttgtgcttgtgttgttactcctgccctccacttctttgaggaggaaattgatatctccaataatatgttgatggtctacaggagtatttttcttaaatacagatgtgctatttctataatttcctggcgagtttaaaatttccccttccatgccttttctcccagatggttcactatgctcacacgatgtagacctctcaatttgttcaattgttgaactacccatcattatttcctgtatctttccaaaattttcttgagtcttctcaacctgcaaacagaattatgttaaaaaaacattgccgaacagtagcagcgaaattgaggttactacagaataaaatgacacttaccctagcatcggaatcaagtggaac

SEQ ID NO: 4524 - DNA, 389 bp, Zea mays
ggttgtcgtctgcttcaactctaggccgcctcctgttctaacaactcctaggcctcgtgtacagaggagcatatctgcagaaggcctgagagagctgcagagcttccttgatagtttggccgattgacatggggttctagcagccccactataagttttgaccttttccatagcttagcttggaaaataggtttagcatgtgctgtctcataacttcgctgagatggctgctgttgagtaatctagagttgtaaaatatgctgcggctaactgtgtcagcagttgagagcgtttatcagttgagagtatttatcagcatgttgactttgtgagtcctgaatgattagtcggcatttcttaggtctccataaaaaaaattggagactctc

SEQ ID NO: 4525 - DNA, 362 bp, Zea mays
gtcggattcaaggcgctggttttcgagttcatgcccaacggcagtctggacgactggctgcatccggcatctggagcacacccgctggcgctgaacaacacgctcagcctggcccagagactggacatcgctgtggacgtctcggatgccctggaataccttcacaaccagtgtcagccaccgattatccattgcgatctcaagccgagcaacatcctgcttgcggaagacatgagcgctcgggttggagatttcggcatatcgaagatcctttccgacgacactagtaaagctctgctaaactcaatcagcttcactggactaaggggctcgattggttatgttcctccagagtatggcga

SEQ ID NO: 4526 - DNA, 507 bp, Zea mays
ggccgaggagctagaatcagaacttgatcatgaaatcccatcctttgtgaaggcaatgttgcattcacatgtggttcgaggtttctggctggtgagtactcagctctcctttgctctccctagcaacttttagcgcatggtcatggtcatggtcatggtcatggtcatgtactgtttttttttctctgtactaatcacatcctttgctctccctagcaactccccagccatttctgtgacacttacatgccaaagcaagactccattatcaccttggtggatgagaaggatgaagaattcgacaccaaatatcttgcctacaagaaggggctaagcggcggatgggctggttttgcactatgccatgggatgcaggatggagattcagctgtttttcagttgattaagcccacgaccttcaaggtactactatgctttcagcgaatactgaataacgcggagctcaaagcacgctccccccccctgtctctctctctctctctctct

SEQ ID NO: 4527 - DNA, 544 bp, Zea mays
  misc_feature (513)..(515): n is a, c, g, or t
gtatggcggctcagtaggtgccatgccataggagcgggcgacgagctgctcctgctgggcacatggtcgagcccatgggtgatccgagcgagggtggcgatggggctcaagggcctgagctacgagtacctcgaggaggacctcggcaacaagagcggcctcctgctccggtccaacccggcgcacaagaaggtgcccgtcctcatccacggcggccgcccagtgtgcgagtcgctcgtgatcctgcagtacctcgacgaggcatggccgacggccggtcctccgctcctcccggccgacccctacgaccgcgccacggcacggttctgggcggcctacatcaacgacacggtatggtaacgataccattgctggagcaggaggaggagcaggatgcaggcccggaagtcagaatcacagtttccttctttttttttcttcttcttctccctgtttgtagtttttcccggcgttcagggcgctgttcaaatcgctgacggacaagaaaaaagnnntcttctcaacctgcaaacagggttattgt

SEQ ID NO: 4528 - DNA, 407 bp, Zea mays
tatgtagctcgactgtcaaggagattccatccatgcatgtattcagcattcacatgcacatatatgtctttgtaaagaaaatgatgcgtgagagaaaacacccatgcatacactgtaattctcataatccaatctgaaccgcccatgtactgtacgctctcttatatatgttgcaaggacatatgtgtacgtacttgcttgaggtgcaatatacatatattgttcttggtagctaacttttcttctcgaaggactgtatatgaatgatggacaatatcatttgcgtgcaaaaggacccaccttgattgatcatgaactgcgtcccatctgaatatccagtagagaccggccggcagagagactgcgctacaatctaactaggtgcgggcagttttaagttggccttg

SEQ ID NO: 4529 - DNA, 432 bp, Zea mays
agctgcgttcagtgaaaacacggataaaaatcttctcgtccgtacccagccttttctcaccagctttgtacaaatcctttgcatcatgtgtcacaatggtaggatcaacctcgggaccttcgtagcgtggaatccccatatatgcaagtaaaagctgaaatatacattatatcataaattatttctggcagaaaaaagtgcaatttaaatttgaacagatattaactactaacttataaaaagtattgattggaatacatcacatgaagttcatgctacagatatctgtgtgcattaggtaaaaggcataaatgactacagaaaagcaattgaaccaacttcacatcagtaattgcaatatgttaatgaagaatgggcattcccttagtcttatacaatacagacatcagattagatgtgaggatatctcat

SEQ ID NO: 4530 - DNA, 420 bp, Zea mays
  misc_feature (7)..(14): n is a, c, g, or t
tctagcnnnnnnnntcacgcttcggcctcccctgcttctcctctagcatgctcccctccatatatacatatcccacagatgttgcttgcttccacgaaccagctaattaataaccacgtccttgtatatatagtagtacctgcagtctctggtcgacgatggcgtgtccgaggcacggaagtacacagcagaagctagcaaacagcatgagtggtgccatggacatggcgcgagccgcgtgacccagcaaactacatacatacatacacctagcactagcagagaccagagattcagagctcaggagctcaggatgtgtcgttgagtgcgaagctgccgatcgaaggagggagagaaggtcctcgaccgtcgtcttgctgcttgccggtcgcggtcgtctcagtcatcgaccatgtggag

SEQ ID NO: 4531 - DNA, 703 bp, Zea mays
  misc_feature (612)..(612): n is a, c, g, or t
  misc_feature (680)..(681): n is a, c, g, or t
catatatgttagtaagatagtcaatgtattttaccaaatacggcacaacctgcaggagtaattatatcaaatgatcataacacagaaagatcttacaagggaactaatatccagaaaaaactgtgaaagcattcaaccgtgtaaagccgatatgcatccatctcctggtgaacaaagctaactagactttcagttgcagagtttatccagtgatccaacacattggatgacttcagaagtaccacttgttccatcggagaaaatgaggcaagaccctcaacttccagtctctttgcattttggacaaaaaatctatatgcgttataccatgggaggaagacatctttcacctgataaattaaagcatgtcaaattgtgggtcagattgggggccatgccctattcctcaagatagcaaaaaatgatagctttgggtaaataatatcatgtgatctatgtataccagtagcctgaccaaaagataataaggaaacacggaactttcaataaattaacttacaacagcaaagacaccagtacgtttgaatcgtagagactctgcacgtacaactggggagtttaccaaatatagtcgcagagcatcctgaaacnagaacagatttcattctaactacaaattctaacaccgagtctgttgcatgtatctttcagaaatagcnnttggcttattcaaagcaagcag

SEQ ID NO: 4532 - DNA, 600 bp, Zea mays
  misc_feature (371)..(372): n is a, c, g, or t
  misc_feature (375)..(376): n is a, c, g, or t
  misc_feature (385)..(385): n is a, c, g, or t
  misc_feature (413)..(414): n is a, c, g, or t
  misc_feature (428)..(431): n is a, c, g, or t
  misc_feature (445)..(449): n is a, c, g, or t
  misc_feature (454)..(454): n is a, c, g, or t
  misc_feature (456)..(462): n is a, c, g, or t
  misc_feature (468)..(470): n is a, c, g, or t
  misc_feature (480)..(481): n is a, c, g, or t
  misc_feature (490)..(492): n is a, c, g, or t
  misc_feature (496)..(498): n is a, c, g, or t
  misc_feature (503)..(507): n is a, c, g, or t
ttcctcataccaaatgacacaatttattcctcagtctactagatattgtccctttattcacattcctccaattttgccacaaactaatgcaattcacatgcatctacccttgccactcccacctatcacatacatgaccaaggatcttgtgttctttggaaaacgcattagcagcaatgatgatgctatagatcttgtgactcctccacaattacttccagaagcactatccaatattccaaataagtgctacatgtgtaacattgcttctgctgatacatattgtgttggtagtgctaagacttgtaattttgttgctgaagatggagacatggcgttccatttcccatatgttccttcaaagcctaaannaanntatcccgtngtacctcgcggggtggaagacactcttnncgagtactttcccnnnngagaagtggtgagnnnnncaatntnnnnnnnccaggnnnaatcagaagnnatctccagnnngacnnnccgannnnnaccagacttccattgatcatttattacggaagattgtaggagcatccgagtgtaaaggaaggatgtgcataggatagcgaaagggacctaatt

SEQ ID NO: 4533 - DNA, 890 bp, Zea mays
gcgatgtttccttttccacgccacatattgctgcaaaaactgtttcttccatttattagtgcttctattttgttggtgaagctagtcaacttcctttttttctgaaatcagttgtggcaagctaagcaattactttcctgtgttatatcgataatggtctgtacctaagttgttgaagttcctgttacataacgctctttacattatcatagtaaccagtgcagaacattacgataccgaaaacaaacacagcgcaccacctgcttgtatgttgtatccaattgttgtttctttgtggtgatgtggtctcaaccaggatcactttgtttagctgcaaatgtgattcctgagtcagttttgagatctttactacctggcctaaaattttgttcttttggactaggtttatgcaccagcatgccaccggagaggatgctaccttttgctgcacgagtggtaaggcacctttcataaatgtactctgttgcaacttgcaaaatacttagaggaagatgccacgtgtaattgcacatcagaatgcatgggttgctcgccttgttctcttatagatggaagtgtttgtgtgcaatacgcaggctggttgtggttgcagaggtctgggggctcgaaccagccttccccatcgcgcagacccacgcctggctggctattgatccgaattcagaagggctgcatcctccatgaccacctgcctgcaccccgtccaatggttgtgaatattccagtcccgatcagatcaaataagtcatcaactattagcagcacatcaagactatcattgtgatagctattattttgcgatgattatgcaactatatggttccaacttgctagctccaggcataccaggcctgtgcaccttttacggg

SEQ ID NO: 4534 - DNA, 519 bp, Zea mays
attctgtcaagcatagcaggtagtgcagtcctatatagcatctaggatcagctactttagtatagttatcaggggctgctacctacggtattcaggatctaatagccaggatgccacaccttccctagtgttgcacccttctggctgtatattgtactcccttcttcatctaatgaagcattctattcagccccatttaacttgtctaacagccctaatatatgcataaaaatgtcttatcgtttagcacaacttaaatctataacaatttaactttataggggactgcgatgtacgctgaagttcctcaagaagctatatatacacttcaaccacaactacaggaaagcatgattttaatcatgagaaaaatttatgttgacaatgcaaagctgtcctacaaacctgtgcatggaaagtatatgatcaggctacatccaaagactttgcttgaggaagtaaatgaggatccacaagattttccaaaatatacattccatctaacaccattcccagaac

SEQ ID NO: 4535 - DNA, 434 bp, Zea mays
ccttcttccttctctatcctttccctgttcatagcgctgaagtctccccatccgagctccatccatggtgccctcctttcttccttctctgttccagaccagcatcaggcgctgggagtagtgtctctcccacgctgtcttccccttcccccttgttgtcttcaccagcgctcgtcctcacatggaaaccagctgcgcgcaggagtgcggcaaggcttggccgatgccctctgttgccgccatggcatctcccttccccaagctccagcgcgcatacggcagcagatcgtggtgcccctccctgcaagctcgagtttccccatggcgcctgtccccgggcatgggcgagctcctctctgccctatgatttttccatggctgtgagctccccctggctgccattttccccaaccgtcgtcctcttgctctaaaaa

SEQ ID NO: 4536 - DNA, 619 bp, Zea mays
  misc_feature (381)..(382): n is a, c, g, or t
  misc_feature (390)..(393): n is a, c, g, or t
  misc_feature (396)..(400): n is a, c, g, or t
  misc_feature (404)..(404): n is a, c, g, or t
  misc_feature (407)..(408): n is a, c, g, or t
  misc_feature (429)..(436): n is a, c, g, or t
  misc_feature (464)..(464): n is a, c, g, or t
  misc_feature (466)..(466): n is a, c, g, or t
  misc_feature (468)..(468): n is a, c, g, or t
  misc_feature (471)..(472): n is a, c, g, or t
  misc_feature (475)..(475): n is a, c, g, or t
  misc_feature (485)..(485): n is a, c, g, or t
  misc_feature (495)..(496): n is a, c, g, or t
  misc_feature (500)..(500): n is a, c, g, or t
  misc_feature (502)..(503): n is a, c, g, or t
  misc_feature (505)..(506): n is a, c, g, or t
  misc_feature (558)..(562): n is a, c, g, or t
gtgcgtgctgcaggaacaattcttttcccgcccttctgcgatccgaaacatgataagcctgaaaagcagccagcccatctactttgctgtttatagtagaagcacatgttagtccaagcaaataacttagttgtcacctcagaaataaaaaggaagcacgtgacaaagagatttcaaaggacaagttatctatagttctatacttgctatgcaaaaaaatatatatttttagttttttaccatcattatggggagaacaattatatgacaataagcataaaaggcaatcatgcaaaagaacatacgaaatgttagtgtttctcaaatccaaaggtattcaaaaggggaaaatatcataaagcaaggattatcccaggaacnnggtaagannnnccnnnnnatancgnncggggtgtgcaccactcaccnnnnnnnnttgcccataccggaagtgatcaaatccncnangtnnatngtccagacantcggatgtgnnacangnngnntgacctcaaacgggcaaccagacttccattgatctattattaaggaagcttnnnnnagcatccgagtgtaaaggaaggttgtgtatagtatagcgaaagggacctaattgttt

SEQ ID NO: 4537 - DNA, 423 bp, Zea mays
gaatacagatcaacttaccctgactaattcgacgcgatagtcgcaagcacgactacgggttccggttgacgtcacccaggggccttcttttcttcgataatcatttgctgaagatcttttcctcgactaaataattttgacgaatcgaacttgagtcgcgcaggatgtccgagctttttgtcgcgcacttggtgaacaccatgctgctggctccatcttcactcgactcttggaatttcttgacgacacgtggaacgacgatgacacaggagagtgacgtatatagagctacacacgcgacgcgacgacgaatgacgctaacaggtggaatcgacgacacgattgggaattaaagccgagcgagccgagagggcgcgctggcgaacaggaaacaggacgcacggtaagactgagcatctataa

SEQ ID NO: 4538 - DNA, 606 bp, Zea mays
gcagaaggttagtctatttttatcttcagccactgtaatgggcatgaggcactggttgaaatggctttacctgtgttggttttacgggtgatgaaccttattttaatttggtcatgacatgccacagatcaagtcccattttaaggacataggagtccattctgatgtcaagtatattgatccaacatacatgctccgcgctgtgcgagccaatgcatccgatgccatcctgtgcaccgtgcttggtcagaatgctgtaagacatcatttctccttgctgcatctctgcctcttgacaaaatcctttagttttcatgcctaaccgtttgttgttctgtgtaaaccctacaggttcatggtgcctttgcgggttttagcggcatcacaaccggggtgtgcaacacacacaatgtgtacttgccgataccggaagtgatcaaatccacgaggtttattgatccaaacagtcggatgtggcaccggtgcctgacctcaaccgggcaaccagacttccattgatcaattattaaggaagcttgtagtagcatccgagtgtaaaggaaggttgtgtatagtatagcgaaagggacctaattgctttgtcag

SEQ ID NO: 4539 - DNA, 498 bp, Zea mays
  misc_feature (491)..(492): n is a, c, g, or t
atgcgcaaaactcgatgaacaagttagacaactgagacgctgatacgcatcgatcttcgctgggatacagagtggggatgatacctttcgcaatgcctctgatgatggagactcttgtaggccaatcaagaacggtagcaccggaagaaccatccttgacgtccagataccgcgacaggcagccattaaccatgaagtcatacacgaggaagcattcccctctccccctggagcagcagaatcccctcaggctcacaagattgtcgtgctgtaggagggtgagcatcttcagaccacgcaggaaatccgactcctcttgcttgcagctcgtcttgctgaggcttttgacagcgactaccgatccatcccgaaggatccctttgtacgtcgcggcggcgaagccactcttcccgagcaagttcacgtcggagaagtactgcgtcgcgcactctacctcctctaggttgaatctgaagctatcaccaactacnntgaccg

SEQ ID NO: 4540 - DNA, 514 bp, Zea mays
  misc_feature (427)..(436): n is a, c, g, or t
  misc_feature (504)..(505): n is a, c, g, or t
tggctgagccgcctctccttgaagctgaggatgacgttgacgaagaggcggcggaagatgaggaagaagtcgtaggcgcgagcctccacgctcttgcgggtgtccagcaggcgcgtgttcatgtgcttctccatctcctcgtgcgccagcttggcctcgccgttggctatggtgatctcgacgctgatgccggccttcttcttggagtcgaactcggtcatgagcttggcgtagttggggccggggtccgcggggtccaggatgttgctgcggaagccgtcgacgctgccggagtagagggagtaggtgcgctcggcgtacttgatgacgccgacgacgaacatgagcacggtggcggggatcatggggttgccgcgcagggagcagaagaagatgacgcagaggcagaggagacgaggggaccccnnnnnnnnnnctacgccgagctcatgaccgagttcgactccaagaagaaggccggcatcagcgtcgagatcccatagnnaacggcgag

SEQ ID NO: 4541 - DNA, 381 bp, Zea mays
  misc_feature (372)..(372): n is a, c, g, or t
cgcatgctggggcagtggatattgggcgggagatcttccggagcatgctgtcggagcatgggactgaggcagcaattgagcactacgggtgtatggtggatttatttggaagatctggtctccttgaagaggcacacgtattgattcaggggatgccaatgaagcctaatgctgcgatatggggagcacttttaagtgcgtgtcgggctcatgctgggcttggccttgctgaggtggctctgaaagagcttatcaatcttgaaccatggaactcggggaactatgtgctgttggccaatctttatgtggaaacagagcggtgggaggaggcaggggaagtgaggagattgatgaggaggatgagtgtgaatnaggctccag

SEQ ID NO: 4542 - DNA, 411 bp, Zea mays
tcctcgctttggttcagcttgctggttcgttgttgttcatctccgtgtcgggtgtaccacaatattgtagatctatccttgatgcttgtcgtcgatccgtcgcctcgcctcgatgctggctcctacatgacgtctcgaacttgtgtttacactaaaaatccgagaagattaggcgtagaaggaaaaaaatcagtacgcagccggaaaattcttgatgtggatcgagaaggcagtgaagtccgtgtggtgctcaccacgtgctcgacgtaatggcgaaattggaaatcgtagttgtgctcgtggctgtcaagacggattaaattattagtgagctgtcgtcgctctcgctcttcgttttaatatttctcatcagtttagtatacttgcggtgttaatgtggaccgatgatgt

SEQ ID NO: 4543 - DNA, 833 bp, Zea mays
  misc_feature (774)..(807): n is a, c, g, or t
  misc_feature (812)..(827): n is a, c, g, or t
acatctatgcatatttaatgtcgtgttaagttaaatattgttatttgatgccattggccatcatattctttttcatactaattctacaatagtctgattgactgtgtctacctgtgcttttcctttagtaagtgcttgtgattgtttctttttcttcgagtcatgtctatatggaaagcactattacttatctgtcattaactaatcttataatgttcattatttgggtaggaagagcaagacgttgctttaaaacaactaaggaagtcattggtgattagagcgaaacccatgccaagcttctatcaagaagggcccccaccaaaggctgaactgaagaaggtaattccagtttcatgtttctaattctcaacaagtgtagctgtgagcctgcgacttttatcaatttttgcataagtcatggttattgttgagggtatagtaattccaagaatggaatgtacacaccattctaaaatgaaggagaaggacagattttgtgcccccctttttttgaacaacacatgatgtcactaataccaagttgattgtccaataatgacgtgggtataattagtttgagccttgagcaaacagtatttgagaacatttttgtcttgacaaaatcacaaaaaccgaaatacatgtttatttctcgcggcatgaatacattgtgcaaagtattagtatacctttcgatagctttgatggtgaatttaatttttgtcttctgttctgtcaaggtgcctcctacccgtgccaaatcgccaaagnnnnnnnnnnnnnnnnnnnnnnnnnnnnnnnnnnttttnnnnnnnnnnnnnnnnaaaaac

SEQ ID NO: 4544 - DNA, 854 bp, Zea mays
cgtcggcggccatgttcgacgagtgcgtggcgccgctggtcgacggcctcttccagggctacaacgctacggtgctggcatacggccaggttggcatcctgctgcttcctctatcctcttcgtcggccaccaccacgcatgcctgctctcctcggtcggggtcggtcctcccctccctcaatcatttggctcgcatcccatgtgccattgatgccgtgcagccaaggagctgaaaaagcttggaccaccaagttgggggcctagccacacggaaaagtccagcagcacaacatgtggtctggggctgggatggaacacaaattacctgctttttattttttttggctccagctgtttgtgacacgatgatgatggggtcgactgtgtctccgtgctcccagaaccaccaaatgctcatcggtttcagtttcagcttcatgatgcatatatagctttaatagatcttttcttcttcttttttgtccccaccagaccggatcagggaagacgtacaccatgggcactgcctgcaaggaggggtcgcatatcgggatcatcccacgagccatggctgcgctgtttgacaaaattgagaacctgaaaacccaagtggagttccagttacgagtatcgttcatcgaggtgcaagaactgttccagatacttgcgtgcgaatgaaatgccagatcagttcttctgatgagatcttacatgtggaaccaattgctgcgcatttgcttttcgcagattctgaaagaagaggtgagggatctacttgaccccactgctgctaccgtgggcaaagcagagaatggcaatggccacgcaaaactgcctgtgccagggaaaccccc

SEQ ID NO: 4545 - DNA, 447 bp, Zea mays
gcagaggtacttccagagcgtgcagaagccgacgtacctcaagggccgctacgatgtggtcacctccgtcgccgtcccgctcgccctcgcagtctccagcatgtacctcgttgtaagttcccgacctcgcctctcattattatttatctagacggaaaggaaaatccgttttgtattttaaaagtactcgtgcatggatctgtgctgattgcctgattgtttgcaggggcgcgggatctacaacatgtctcacggcatagggaagaaggagtgaactcttccttcgtacatgaacatgactcgtcgatcggtggactcttgtctcatatgtactgtatatattctgtaaatacagtgaggactcgaatgtggtggattggatatggggaaaacaaatccgtccaaggccgtgtgtattgtgtaagtccatgtttaggctgtctccag

SEQ ID NO: 4546 - DNA, 784 bp, Zea mays
  misc_feature (392)..(401): n is a, c, g, or t
  misc_feature (404)..(407): n is a, c, g, or t
  misc_feature (476)..(476): n is a, c, g, or t
  misc_feature (548)..(550): n is a, c, g, or t
  misc_feature (675)..(678): n is a, c, g, or t
  misc_feature (708)..(709): n is a, c, g, or t
  misc_feature (719)..(722): n is a, c, g, or t
  misc_feature (737)..(739): n is a, c, g, or t
  misc_feature (755)..(758): n is a, c, g, or t
  misc_feature (762)..(781): n is a, c, g, or t
tgatggacgccatcttgccccgggacaacggcaggaggctgctgttcgagcgggaggtcctcgcgcgctgcgccgtgaacgccatagcctgcgagggagccggccgtgcgcaccatactcggagctacaagcagtggcaggccaggagccggcgggcagggctgcggcagctgcctctggacggtgacgttgtccggacgctcagggacaaggtgagcagggaataccacgagggtttcgtgatcaccgaggatcagcagtggcttctccagggatggaaagggagggtgctctacgccatttccacgtggacggcagacgatggattggcagggaattgacgatctttgtttgtgcattgagcttgtcatagaccgtgaagttgaaaaccnnnnnnnnnnttnnnnatatacaatacagacatcagatgagatgtgaggatatctcaaacattactcataatggcagattatgcntacattttgcagcacatggaagttgttccaaaggaattatatccaaatattcaccttcctaatgccggacannntaatactaaaagttgaataaaaagtgattaatttaaacatctttcatgtatcacgatgcatgagatcaagtagaacaaatgtaaggcagatacaccaagtaataaggatcaggaccttctggtgnnnnccggatgtgtggtgagcaatgacatgctcnngataagtacnnnnatctagcataataannntgtttcattatttgcnnnngtgnnnnnnnnnnnnnnnnnnnnaat

SEQ ID NO: 4547 - DNA, 449 bp, Zea mays
  misc_feature (413)..(413): n is a, c, g, or t
  misc_feature (427)..(437): n is a, c, g, or t
  misc_feature (439)..(442): n is a, c, g, or t
  misc_feature (444)..(445): n is a, c, g, or t
aacacgttctcttggagttgctcttatatggtaaaatacccaaggacatgttcattcggagataatgaccaacaatcaacgaagctacacgcttgagatccacatcatacatgtgtgacgaaggagctggcaagagcgggatgggaccctcaacttgttctgcaagactaccaaggaaaaagacaacaatgtctttgatcaccttttgtagctcatatgtataggcttgagggcatgattataatttttaagaagttgtacctctcgactataaacagagagaaaatgtcatgcatgaggtacgttttttactagagataactgatttgctccgcctacgaaactgtttttctcttcttaccttcgtatcacagcttgtaaaggccgaaggtaacattgtaccaatacttccntgatacctgcgggnnnnnnnnnnntnnnnanngtag

SEQ ID NO: 4548 - DNA, 474 bp, Zea mays
gcacttccccggacaggctcacctacagggagctctggtcgatgacggaggggttccgcgacgccttcgacctctacggctggtgagcgtccttctcctcctcctccaggctgcatgcctgcctgctctggcttactttgcgatctcgccgccgtcacaggattgcggcgaagctggagtggacgatcctgtacgtgctggcgcgggacgacgaggggtacctgtcgcgggaggccatgcggcgcgtgtacgacggcagcctcttcgagtacgtggagaggcagcgcgcgcagcacgccaagatgtcctagctagagggaagaggatgcgacgtgggcacgtggcctcgatcgcgcgcgcgtgaatgaaatggaagccaagcgaacctgtctcggctggtatgtagatagtgagaagggtgtcggccggaaaacaagcagccgtgtgtactactccctcagctcccatcaataa

SEQ ID NO: 4549 - DNA, 552 bp, Zea mays
gctccggagagaggggtcctccttccaccccgcagctgctaaacctcatccgagacgagagagaatggacggtgaccagagaggtagtggaagacggaggagcggggtcggcatcagcaacagcaacggccgcaagcccagaccaccccgaggaggaggactacgactccaagcttgagctgaggctcggcctccccggagcccaagacgacgagagaacgccgccgccgccgccgccgccgccgccgggagagaaggggacctgcacggcgctctccctcggctctggttgcttcccgtcgcatccgaagctcgccgccagcgctggtgctagtgctactgctactgctgccaccggggcaaagagagggttcttggcaaccgttggtgccaaagcgcaaggtatgtaagtgcaaaggcaattggaaattggaatatacacctgcagtccattagtgagttcaccgagctgcaggaatcccgttttttagtttctgacattttgtttttgtctggttttatttgtaaggttattgtaggcaggaggaggac

SEQ ID NO: 4550 - DNA, 436 bp, Zea mays
acggtggaggaagtaccggtggtgatgggtatgagattggtggtgacagccaagaggagcatgaaattggagagagtgacgaggatgtggagagtgggtgggatgaacgtgcccgcaagaacaggaggctgatgccaatcactatggcaaacgggaacggggctgggttgggggctgtgaatgccaatagcagagggaagtttgaaactgagaagggaaaggatgcttacccctacctttgggagactgtggaggatctgtcaaaggagcacccgaacggggtagcattcaagaaggccttcgagtcgatcgaaggcgccagagcgcgtgggatggaggaaaagctacgaaaattcaggctgacagagatcagacaccagctgcgacgtatggaattgatgaaggagacagtgaaaccttcttgccaatctcatag

SEQ ID NO: 4551 - DNA, 407 bp, Zea mays
aacggggtgttaatatgctcctgtcgctatcaagtgcttgtacagactgcagagttttgaatttgtatataaaatataaagatcgattaaacttgccgaacctttttattaggaagccatcgtaggggtcaaaacaaccgataccaaatttaggtattgaaaataaatatactttttaggtactgaagaacaagtattagcatgcaaccattgaagggttgaggtgaataggagttgaataaattttcttcacaagaagctggccaaaaaaatgagaccggccgattttgtagattagccggccttctagctgattttgtagtattctttttatagcattagtgctgctatttgtaatagttaaatattattactatttttagtgataagtgatgtcggatgaatcg

SEQ ID NO: 4552 - DNA, 444 bp, Zea mays
  misc_feature (440)..(440): n is a, c, g, or t
acatgaagtacggtaactataaaatgacaccagtggaaatagcatacaacgccatttccttcgtcatcgctatcgccctcacggtcgccttcacggtgtacgcgaagagagctctgggtgacataaaaagtccggacgatggcatcggtaaagaagaagaagatcacggcccaaatggctcagggggggtgcgtatgaatcgtcgtcaggagcgtgcgcgtgccgatgcacgttacatagaactagatgatatgtgatggtgtgttgacccggatcttgcttggaaggaggcaccagtaggtcattaggtgcacggctacggtaggtagctagctatagtttacaagaggaggctacaataatccacacccagctgacgtggtttgcgtgattcgtttcgtactttcgtgtgctttgcctactgcactgccatactgtcngaat

SEQ ID NO: 4553 - DNA, 442 bp, Zea mays
acaagcgataccagaagttacagtgattataatgacaactacatgcatgtacacgaggcaatgtcgactctgatcctgctcacctaactttgcatacatgtccttaaaaaagtcacggatcatagtccagcttacgtacggcagtggaatgcccacgcaataaattctatttacccttctatgagcacataggttagctagccaaactttaaatggtgcgaggaggcagctgctaatctccgttgcacctatatatctacatctgtggggggttctcttcttccccattcattaagtgctgtatcaaatggcttctggtagtagaatgcctttggtggggtaaaaaatgagcatatgcatggccgtctactagtagtttgacagctctggaaatcatgtgcctggaagaggtccaccggagctagagaggattatgaacgca

SEQ ID NO: 4554 - DNA, 481 bp, Zea mays
cgagaacgatggcgtccatgtacgaggcatcagtcgcggggttcttcactgccgtccacctgcactcgccttcgcctccatcgccggctgccgtgaacgccagcagaccattggagaagatagcaacggcgaggtaaccagcgtgcgccggcgtccggcacagcgcgacctcgaggatcttgtgagtgttgttaaagatgtaggcactaggggtgcagacgcggagatcgccgaccaccttgactctgctgatggtggcgaatgatggcaggcgaacccacgcgccggttaggggattcaacagctcgacgtcgcaccccttattaatggtcgtcagccacccgtgattgccgccgacccaggtccggcccttcagtccctcggccttgccgagaaaggacttgcgaccgccgccgccggcagacacgtcgtgcaggccgaatgtgcccgcctcgacgtcgtactcgatctcgtagccgtc

SEQ ID NO: 4555 - DNA, 370 bp, Zea mays
gctcttttgagtcctcacttgtatgcatatacggcaaaagagaaagagaaacaccacatgagcagagtttatgcctaattgcatgatcccaaagtcctggtgcttttcaggccgcaacatgttgttttcccttttagattaggcacatagaggttgcagctgatctttgcaatatgaattcacaaggctattactccagttattctgtaagtagcaagtagtctcttctgctgagttctggaacatatatcatgagagttcgctgattaagtgttacacacttaaccactcaaattattgtctgaagtttactaatccaagatgtgaagcatgttttaacacgtcaagtgttagcaagggtgtcacaatg

SEQ ID NO: 4556 - DNA, 527 bp, Zea mays
  misc_feature (447)..(447): n is a, c, g, or t
caggaagaggaagttctgaaagaacagaagcgtcgtgaaaaggaagaagctgaaatgaagaaacaacagaaaaaacagcaagatgaagctgagaaagaacagaagcgccttgagaaggaagctgcacaactcaagaagcaactggtcattcaaaaacaagcttctatgatggaacgctttttcaaaagtaagaaagacaatggaaaacatcaaaaacctggagagaacaactcagctgaagatccatgcaatgacaacaaagagacaataccagcaaccacatcaaaaattgattcttcattgtatcaacaagagggatgggttttagatgatcttcggaggttagcaacatttcctgagctctattgtttctttcaccttcacacttactaaaaataaagtgatttaatgaacattggttacaggttgcaggtcactggttggaanaagctatacacacttactaaaaatgaagtgatttaatgaacattggttacaggttgcaggtcactggttggaagaagcta

SEQ ID NO: 4557 - DNA, 526 bp, Zea mays
  misc_feature (369)..(369): n is a, c, g, or t
  misc_feature (373)..(373): n is a, c, g, or t
tggtgctgctcaatcctttacggctgtagttctgaatctagtgatcggctatggttgaagctttagtgccttgtagatgtcaaatagagatcaagcaaacatgcttccgcggggatcagatttaccagatctggtattagtctaacttactgaggtagtcgattggagaagagggccacatcacactctagacagatccgaagcgaaagaccagtatcaatctcttcccccgagccagccctgcgggtatccttttctccgccgctcttcagataagataggctacactcgaaaagcgtaggcccggcagttggtacgaaaacagaaccattagtggagtggagtaagatcccgatcaaagcagagaanaganatggacatcagagggctgctgagcctgcacgacatgtctcacctggacatgggaggggaggagttgctctgcaaggcaagagtgttctcgcgccaccacctcgcttctgccgtcaggtacctggagccaagccttggcgagtacgtgagacag

SEQ ID NO: 4558 - DNA, 520 bp, Zea mays
gcagggacatgatggtcaccgtcgacaacctcaagcgcctctgcatcgaccactacttccaggaagagatcgagcgcgccatgggtgcctgctgcatgggtctcatccacagcgacgatctcttcgacgcgacgcttgccttcaggctcctcagagaggccggccatggcgtttcagcaggtcatcgatccaacacactaattattaaacacaaattcatccatccatgatgatgtctacggtcgatcgacgacgactgaacatgcatggctgcacggcactgcacataccagcagatgatgttttacggaggttcactgacgacgacgacagcggcggcgagttcaggctcgatctcagcaaggacatcagagggctgctgagcctgcacgacatgtctcacctggacatgggaggggaggagttgctctgcaaggcaagagtgttctcgcgccaccacctcgcttctgccgtcaggtacctggagccaagccttggcgagtacgtgagacagtcgctt

SEQ ID NO: 4559 - DNA, 762 bp, Zea mays
ctgataacccctactcttgtgaatccttgttggatgatcagtcaagtggatattgcacccagaattctgtgcatgaaccccatttgtactggactggggcagttgaagggtctgcagtatcctatactccccaaacactccctggtgctttgcaaagtcagctgatgccatgtaacaagctcagtgaaccaaaagattacgtgcctactgagcaaaatgtatgtatgctttgtgttgccattaaaagttctgtgcatattgcatattgactttagtaatgctttgtgactaagtgctaattggcctaatctaatttgaaaactatcgcaatatatctgtacatacaaactaatattagcttggatactatatgtagtagaatggattcagcaggctcatgtttattagcagttatccattcatgtgccttgtgcactgcattgctctcaattgcatagtcttgtgtccacatgttaacaagattgccatcagtattcagctctctttactttatagcatttactttcctgtaactctagttttatgtagtctgtgctaatttggctgaactaccaatgttttttttcttatgaaaagacatgttttctgctatttcaggccttgtcacagcacttacgtggcatgcgtaggcgcagccttttcaatgaaaaggctggaattagtaataaaggtgtagacaaaacttcggatcatcatcctgtaaattcaactacccccaaatgcaaaactatttctggtgac

SEQ ID NO: 4560 - DNA, 478 bp, Zea mays
gcaggacgacatgatcctagcagtgccggaaggcgcatgcgccgtgcgtctgggcaacgacgcgaccatccggcagaagctagaagtgatccggaagacgacctactccatcaccttctgcgcggcgcgcacctgcgcccaggccgagaggctcaacgtgtccgtcgccgccgagtccggcgtcctcccgatccagaccgtgtacaccagcagcgggtgggactcctacgcctacgccttcagagccaggcacagcaccgcgtggttcagcatccacaaccccggccacgaggacaacccggcgtgcggccccctcatcgacttcattgccatcaaggccctgaaccctccgcctctcgctcagggtacggtctgtaacatacgaagtattgtcttgctttgtttcacaaaggcacacggccggtttaacccagtgtagcgagcatgcaggtaacatgctgaggaacggagacttatt

SEQ ID NO: 4561 - DNA, 703 bp, Zea mays
  misc_feature (549)..(550): n is a, c, g, or t
  misc_feature (554)..(554): n is a, c, g, or t
  misc_feature (585)..(585): n is a, c, g, or t
  misc_feature (597)..(597): n is a, c, g, or t
tcgcacagtcctacgctagtagcaacaaggcagccagctgagctcccactcccagtccagtcgagcgccgcagcaggggcaggtcaggcagctcggtctcgccatgagcaaggagaagcaccaccgcgactggatcctccgccgctgctgcggctccgtcgccgcctgcatcctcacgctcgccgccgtcgtcggcttcatcgtgctggtcatctacctcgcgctgcgcccctccaagccgtccttctacctccaggacgtgcagctccgctccatcgacctcagcgacccggcgctctccctcgacctccaggtacgtacgtctcgtcagtagtacgtgcgtaagtctggcgcatttgtttatttggaccccccgctttggtgacggaggacgaactacctgtgtcgggctgccggccggccggccgggccggcacgatcgacgtaacgcgcgcaggtcacgatcgcttcgcggaacccgaacgagcgggtgggcgtgtactacaagaccctggaacgcgttacgtcgtgccggcccggccggccggnnggcngccgacacaggtagttcgtcctccgtcaccnaagcggggggtncaaataaacaaatgcgccagacttacgcacgtactactgacgagacgtacgtacctggaggtcgagggagagcgccgggtcgctgaggtcgatggagcggagctgc

SEQ ID NO: 4562 - DNA, 406 bp, Zea mays
tgagagggaaagagaaaatgtgagacaaagggaacaagaggagcagaggaggcgtgaaaaagaaagagtggccaggcaggctgtagataaggctatacgggaggcacgcgaaagagcagctgctgaagcacgcatgcaagctgagaaggaggctcgtcaaagagcagagcgagctgcagtatggaaagcagcaaaagaagctcgtgagagagctgcagtggaggcaaaggaaagagctgcgaagtctgctgcagaagctaaggaaagagaagcagcagaggctagagaaagggctgcaacagaatcaagggaaagggatgccaaagttgccgcagatgcaagggaaagagctgctagggctgctgctgaagctagggaaaaggaaacagcagaatttcaggagaaa

SEQ ID NO: 4563 - DNA, 385 bp, Zea mays
tagccgctaagggcctgaggccaaacccaaaaacccagacggccaaggacaaaaaaggacgccgcgccttccaagcacccacggccccgaggacggaacctctgggtgctcgtcgtactcacccggtgaagctgccgcacaaggaggcgctccggcctccgtacggccacgagaagcgctgcatcaccatggctcctgagaaccctagcgcgagcgagctactactagctagcagcgccggcgccctcgacgccgacgagacgaccgaccaaaccctagccccgcgagaccgagcccatccgcggggactcagctgacggggcgcgacgcaaagaggaaatttttggtgtgaagggggctctgctctagctgtctcagctgctaa

SEQ ID NO: 4564 - DNA, 373 bp, Zea mays
gtcttcgacgtcgatggcgacggcttcatctccgccgctgagctgcaggaggtgctcaagaagctcggcctccccgaggccagcagcatggccaacgtccgggagatgatctgcaacgtcgaccgcgacagcgacggccgcgtcgacttcaacgagttcaagtgcatgatgcaggggatcaccgtctggggcgcctgactgacctcatcgtcgtactcgtaccgtacgttctgagtgtgtggcaactggcatggttgtccccgcatttcgtcgagacagtcctgcgtctgcgtctgtaattgaattcatctttagtatcgtccttcacatcactggtctagtggtgatgagaatgccctgtcctgtgtgtgtg

SEQ ID NO: 4565 - DNA, 763 bp, Zea mays
  misc_feature (437)..(437): n is a, c, g, or t
  misc_feature (445)..(451): n is a, c, g, or t
  misc_feature (453)..(461): n is a, c, g, or t
  misc_feature (463)..(470): n is a, c, g, or t
  misc_feature (472)..(478): n is a, c, g, or t
  misc_feature (480)..(491): n is a, c, g, or t
  misc_feature (499)..(510): n is a, c, g, or t
  misc_feature (512)..(526): n is a, c, g, or t
  misc_feature (528)..(530): n is a, c, g, or t
  misc_feature (532)..(574): n is a, c, g, or t
  misc_feature (576)..(585): n is a, c, g, or t
  misc_feature (587)..(588): n is a, c, g, or t
  misc_feature (593)..(604): n is a, c, g, or t
  misc_feature (606)..(624): n is a, c, g, or t
  misc_feature (626)..(639): n is a, c, g, or t
  misc_feature (641)..(643): n is a, c, g, or t
  misc_feature (645)..(645): n is a, c, g, or t
  misc_feature (647)..(660): n is a, c, g, or t
  misc_feature (662)..(665): n is a, c, g, or t
  misc_feature (668)..(674): n is a, c, g, or t
  misc_feature (676)..(685): n is a, c, g, or t
  misc_feature (687)..(687): n is a, c, g, or t
  misc_feature (693)..(695): n is a, c, g, or t
  misc_feature (697)..(722): n is a, c, g, or t
  misc_feature (725)..(725): n is a, c, g, or t
  misc_feature (727)..(730): n is a, c, g, or t
  misc_feature (735)..(752): n is a, c, g, or t
  misc_feature (754)..(757): n is a, c, g, or t
ttatggatcttcttgtcccgtcatttatccgcatttgaaagtaaacaggattgcttggaattgtagattgattgatcaaggtacagggaatagatgtatatatagtccggagatcttgggtttatagaagtatattcaaacaagatctcctcgttattccctatccataaagtcctatacctatccataataaatacaggagagagctggctggctataggaaacacaacatcattgaaatcgtttgacaaaacttatctgtgttgacaaattcatgcttctattctatgtttatttaaactctggtggatagaggttgcaagttgccaacttgccactgtgttggtttatattttgcgggcgacccaaaacttgctaaaataaactagcatagtaacatggcattgccacctgttagcacctctgtgttgttactntgttgttnnnnnnngnnnnnnnnngnnnnnnnncnnnnnnngnnnnnnnnnnnnaattttcnnnnnnnnnnnnannnnnnnnnnnnnnntnnnannnnnnnnnnnnnnnnnnnnnnnnnnnnnnnnnnnnnnnnnnncnnnnnnnnnngnnatttnnnnnnnnnnnncnnnnnnnnnnnnnnnnnnnannnnnnnnnnnnnntnnntnannnnnnnnnnnnnntnnnncannnnnnnannnnnnnnnnanacttgnnnannnnnnnnnnnnnnnnnnnnnnnnnnacncnnnnaaatnnnnnnnnnnnnnnnnnncnnnngtctgt

SEQ ID NO: 4566 - DNA, 742 bp, Zea mays
ctctatctatcatgctcggcgttctggtcctctgcctgcgcaactacatcagctacttgttcacggagggcgaggtggtgtccaacgcggtggccgatctctgcccgctgcttgccgtcacgctcgttctcaacggcatccagcctgtgctgtcaggttagagttcggagactttctcctaataaagataattaggacgtttctgatcacgatgtgtgggagtagttcgcggtgtgatttgggcagtttttttttttaacaagcaaatacttcacacaggtgtcgccgttgggtgcgggtggcagcagttcgtggcctacgtgaacattggctgctactacatagtcggcgtccccctcggcgccgtgctcgggttcgtcttcaagctcggtgtgaaggtactgagctcgaatagatgcatgcatgcatatggttgttggagagatgttttagattttctctgcattccgaatgaatgaatgatcagcagtaacgttaacgacgtatgtaattgtacgcgcatatgtctcgtggcatgcatgcagggcatttgggctgggatgatcggagggacctgcatgcagacggctattctagtgtgggtcaccttgagaactgactggaacaaggaggtagagattgctaaaacttgcagagtaaaaattaatgataacagactggcacgcagctaataaaagaggttgcttccgtcgtctgtctgtttttggttcaggtagaggaa

SEQ ID NO: 4567 - DNA, 698 bp, Zea mays
tatgtagaataacggttaaagttatagttggtttaaaggtcacagtggggcccattagatctacccccatttggggaaataaaatatttctcaaatttgtgcttggcatatagttcttatctttattttttgtcacactgtgaaaagtcttggatatcaacaattatatctgacactgttttctagccatgtaaatataaagtacttttatatgcagaagaatctttatcttccattttcagtgattcattgcagttgctagtcagcatgaataatttgttatgtgacaattcataatgcatatcaatcaggtcctgttgaggtatggcactaaggagcaacagaagcaatggttagttcctttattggaagggacaattcgttctggatttgcaatgacagaaccacaagttgcatcttcagacgcgacaaatatagaatgctcaatatccaggtaatgaaagggggagaaaatgtttactggcctgtcaatggtactccgtttggatgttaatatttcattgcccgtagttgcttctctgttcccttctctcttgcttgcctcattctgaccctactgtagctaacattttattttcccacttttatccaggaaaaagctaaatgaaagctctaaataatatatatttgcatgatatgctgttctcttgtaatttaaatagatgcgctgtcttttt

SEQ ID NO: 4568 - DNA, 373 bp, Zea mays
ctttccatgggagggcttgtgacgcttagagaaaggggagagcatgttattagcttctgatgggcctctgctgccagtctgggaagcgggcaattgctgctgacgagtccattgttaactgaaaacatcatcaactttggtgatcctatctcacagcaaaacaaaattagctactgtgccttgctgcttctggggtttgttgtagattccccgaagacgccagtgccgtatccatttttttttggggttgtacagagaaatattagcggctgactgacggggcggtgtgattggacagaagattgtgtagttggaataaccagtaactaagcagcacaacatggtgcggttgtagtaaaggcagcctctgaaa

SEQ ID NO: 4569 - DNA, 911 bp, Zea mays
  misc_feature (61)..(62): n is a, c, g, or t
cgaagctcacggcgtacaacgacacaagctacctgactccaacccatgtgtacaccaaatnntacagggctgacgacggcaagtacaacgtcactcttgctgcaacaaaagcctccgtgctgcctccgatgatcaatgcgctggagatctacattcgtgtcccttatgagagtccgacgacactccctcaagactgtaagctagcccagctctcttttccctttccctcgatcggaattggatgttcagttagctgttagccttcttcgtacgcacacggcacactacaagtacagcatttctattacgactgcgagtgcagtccaactgtccaacacacagctgtgcttgtgcgcgcctataaacaatgcagcccctgtgcggtgtgccccaggtgctcgattgaatgtcgcttgacgctatggcactgaactgcgtctgaactctgaacccaggatattaaaatggtttgtcaaagactctactttgaattgaccctactttttccgtcttcctcacttgttcttgtacacgcaatggtttttctaagtcagtatgtatctgggtgattacacccagttgtcaaacatagtcatgactactattcttctttgcatgctagttgacgccatcgtggctatcaaaactgagtatggactcagcagaaactggatgggtgatccatgttttccaatcaaatatgcttgggacggtgtgaaatgcagcaacgcaagtggtaacacatcgaggataacatcactgtgagcatctgatacatcattgaggagatcctacatcatgatctcgtatgtgctgctttattattggtagattaaataactgatttatgttcaattacaaactctcatgcagagacctctccaacagctctttgcatggcacaatttcta

SEQ ID NO: 4570 - DNA, 882 bp, Zea mays
gctcttgctaatgtctggttcattttggtgtatatgcaacaataacttgtggataagttcataaacatcataatttatttcagcatcagcagaagcatccggaccagagcaatattttgatgaaagcaattgggaatttatcttgagaatatcagcaatctgaaaaatattattgcgatatgtaatgattaaccatgatggagaaagcttgaggagatgaatatatagcacagtttaaaatcacaaacagggagatagaacagaaaccaatgtcccgtgccaacattaatgaagttgtcaaagtaataaaactgacattaatgatataaacatgaaataaaaacatgtttaatatgtgggtcaatataatttgtggaaaacggttactttgacattggatcagcaatatgattaattgtaaatacacaaacaaacaacatcatgtggtgcaaccagacataaaagatatgaagacacatcatgcaaatcggttcattgtaataagttcaataatatatgatggacaaatatagtaagcagttacaaaatattcacctgctctaggtataggactttgcgctgaaaaatgcttgtatgtggactgcagggaatggcaatcacttcaaccctttcgcctctccctaggtctctaaaatattctttatatctagtaatgtcagcagtggcagacatcaaaactaacctgccaagggtaacacggtgacataccaacagcagatagtagacaactatttatttatacacaaagggaacaattactgctaaaagacaaacacggtgtaccatccactagtggaaattactctattgcttaccttaagtcactctttttcatcaaaaactgcttgatactagcaagga

SEQ ID NO: 4571 - DNA, 856 bp, Zea mays
  misc_feature (411)..(414): n is a, c, g, or t
  misc_feature (801)..(803): n is a, c, g, or t
  misc_feature (810)..(810): n is a, c, g, or t
  misc_feature (818)..(818): n is a, c, g, or t
  misc_feature (842)..(845): n is a, c, g, or t
cccgacgggccgtttcttccgtccttccttggcggctgcgagtccctgcgcagtttgcttccgagcctttcgagattccgcggagatctgctcagttcgtgccgctcttgtctggttctgatgcgcggacggctgctgcctgtgaggcgttgcgaggagctgaggcccgtctgaggtgactaggtgggagaggagaggagctcgtggctcgacggcagaacagtcctttcgttcgttgcccacgcctgcgggccgcggcctgtttctctccattccaggcttcttccagttccagccatggaggaggtggaggtggccaaccgggccgcggtggagagctgccacagggtgctggccctgctctcgcagcagctggacccggccctgctcaagagtgtagcgtcagagagnnnnaattgtaaatacacaaacaaacaacatcatgtggtgcaaccagacataaaagatatgaagacacatcatgcaaatcggttcattgtaataagttcaataatatatgatggacaaatatagtaagcagttacaaaatattcacctgctctaggtataggactttgcgctgaaaaatgcttgtatgtggactgcaaggaatggcaatcacttcaaccctttcgcctctccctaggtctctaaaatattctttatatctagtaatgtcagcagtggcagacatcaaaactaacctgccaagggtaacacggtgacataccaacagcagatagtagacaactatttatttatacacaaagggaacaattactgctaaaagacaaaacactnnntaccatncactagtngaaattactctattgcttaccttnnnncactctttttt

SEQ ID NO: 4572 - DNA, 405 bp, Zea mays
ttgttaaagaggcaccaaatgatccccgataaactaatataatgctgaattctgtttttctcgccctttgtttcatattgttagcctctgtccatctaatctaattacacaggctcgtcgttaaatttaagtctatgatggtaatcatggaagttaatttggcaatggaatatacaagccaatggagtgacggatagcatactctggagacagtggtgggtctagaaattatttagagcctgggtgatcgtcactgctctaggtaattatctagaaaaatactatgcttacccttttcgacaaataaaagtcctctacgctttgccggtggacaaataattcccattttattttgaactgtaaatgtgggattatgagcattgtgatgttatccaatgatgcctg

SEQ ID NO: 4573 - DNA, 1427 bp, Zea mays
  misc_feature (1081)..(1083): n is a, c, g, or t
  misc_feature (1109)..(1111): n is a, c, g, or t
  misc_feature (1187)..(1187): n is a, c, g, or t
  misc_feature (1189)..(1189): n is a, c, g, or t
  misc_feature (1191)..(1194): n is a, c, g, or t
  misc_feature (1386)..(1392): n is a, c, g, or t
ggtgtcaggtaaagacgcttcctcttatcatattctgctatatgctttggtttggctgataatatgctggtcaatgcagcagcagtaatggcaggcacttctaaaactccatcttgtcaatacctgtttgtagactagtttttatactattgaaatacttaacttaaagctaaagtgaatactacagttatatctgatatgttgtctggactaaataggaatcttttaatatgcctcagatctcaattgacctttgcattgcatatttgtaccttatgactttctagttaataattttgataatattaaaattgcacttttctctttttaaggcaaacagccaaacaccatatttcaagtagtaaatgactgtcacaccattgacataaaccaagcttatttgaggtgttactagctagttcattgataagctgaagttgaacctttgtcagcttgtctctgctattcataatggttcttggttcactactattgtcgtgactattatagctcccgaatcaggaagctatccagttcttcttgataatcattattttctcttacaaatgcagtttatagtcaagcatgattatatatggctttatgttgatatcttgtttaacttataaaacttgtcttaatggaaaaatataaagggatgcatttgttgatgtatgctgtgctttcaactttgtttgtcttgtacctcatgttccatatttggtagtatttcctatcagcacattcattcagatctgtgagaccagaccacttgtgttacctctatgctattttcctgtatagcatgtttgcccccaagagaagactggtactttgtaccttgttgctttaaatgcttatagttgatgacataactaacttaattgatgtagtggtgtctgaaaggagtttggaactaagtttagacctgcatgcagtagattgttcccaaggattgtattggaataggctgtttgtgtgatcgaatgctggtaatgttactaaaggtcagaatatatatcgagcacgtcaacagagtactgtttttttttcttttgtggctacaaatgtggaagttgtnnnagtgtcgcacataagccacttaaagnnnttgtccttcttgggaaaatcggatcgtcaaccgggctggctgcatagacggcgacatctcctcatcgagacacttntncnnnngcgcagggcgaacgctcagcagccaaagctgtttgtgggcatgatcctcatcctcatcttcgcggaagcgctcgccctatacggtctcatcgtcggcatcatcctctcatcccgcgccggccagtctcgtgcggactaggcacgttccacatgtctccgccacctggtcgtaaccgggtcgtgttttgtatnnnnnnngagccgacaagctggagcacttaattttttttatg

SEQ ID NO: 4574 - DNA, 388 bp, Zea mays
ttgagcggtataaggcacgttgggtccttcgcgggttcactcaacgccctggcatcgatttctctgagacttttagtcctgtggtcaaacctgctacagtttggacagtcctctcattggctctctcacgtggttggcctattcatcagttggatgtcaataatgcctttcttcacggcacactgtctgaaactgtcatttgtgctcagcccactgatttcaaagactccactcattccagattatgtatgctgtctcaaccgctctctttatggactcaagcaagcccctcgtgcatggtacaacagatttgcttctcacctcctacagctcagtttcattgaggccaaaacagacacgtcattgtttgtctatcacaagggtgcaa

SEQ ID NO: 4575 - DNA, 710 bp, Zea mays
  misc_feature (466)..(471): n is a, c, g, or t
  misc_feature (479)..(483): n is a, c, g, or t
  misc_feature (487)..(496): n is a, c, g, or t
  misc_feature (500)..(501): n is a, c, g, or t
  misc_feature (504)..(505): n is a, c, g, or t
  misc_feature (507)..(515): n is a, c, g, or t
  misc_feature (523)..(529): n is a, c, g, or t
  misc_feature (532)..(538): n is a, c, g, or t
  misc_feature (545)..(550): n is a, c, g, or t
  misc_feature (559)..(568): n is a, c, g, or t
  misc_feature (574)..(574): n is a, c, g, or t
  misc_feature (578)..(586): n is a, c, g, or t
  misc_feature (588)..(589): n is a, c, g, or t
  misc_feature (591)..(593): n is a, c, g, or t
  misc_feature (596)..(597): n is a, c, g, or t
  misc_feature (604)..(606): n is a, c, g, or t
  misc_feature (609)..(613): n is a, c, g, or t
  misc_feature (616)..(620): n is a, c, g, or t
  misc_feature (622)..(622): n is a, c, g, or t
  misc_feature (624)..(631): n is a, c, g, or t
  misc_feature (633)..(637): n is a, c, g, or t
  misc_feature (639)..(642): n is a, c, g, or t
  misc_feature (645)..(650): n is a, c, g, or t
  misc_feature (655)..(662): n is a, c, g, or t
  misc_feature (667)..(675): n is a, c, g, or t
  misc_feature (677)..(693): n is a, c, g, or t
  misc_feature (698)..(708): n is a, c, g, or t
cggtcaccgtgcgccagcagctcttcttcgactacacggaggcgcagcccagcgccgcggtgctcctcggtggagcgcgaggcgccgtgctgccggcgggtcactccgtcagcgtgtccatggcgttgctccttcctgattcctaccacaaccgtgaggttggcatgttccaggtaacacatgcttgttacttgttagcaaaccgatgtgtgcatgtgcatgtgcatctcacggatcacggcggtggagttgaactggtcgtcttccgcgcagataaaagcagaggcggtctcggcaagtggagtcaccatggcatcagcgacacagccgcacatgcttcggtacaagagcggcccagtccggctggcgcagaccgcgctgctgtgcgtgccgctcactctgggcatgcgcagcgaggcccaggccgccagccttagggtgctgcagtacagggaagaaaattttnnnnnnttaatctnnnnntaannnnnnnnnnaaanntanntnnnnnnnnntaataatnnnnnnngtnnnnnnntgattgnnnnnntaatattannnnnnnnnnaaaatntgtnnnnnnnnntnnannntgnntatgttnnnagnnnnnttnnnnnanannnnnnnncnnnnnannnnagnnnnnnggacnnnnnnnnactcnnnnnnnnnannnnnnnnnnnnnnnnntcttnnnnnnnnnnnaa

SEQ ID NO: 4576 - DNA, 1109 bp, Zea mays
  misc_feature (1061)..(1066): n is a, c, g, or t
gtcagcagttcatcaagaccttttagtctctgcttcccttcactaatcaaaaacctaatcttttgtttgtcatcacaatggcgatatttctcaaactcggcccttgcggtctgcctcaactcatctggacaaaccatgttaatgaataattagttgcaccttgtcgctttgaaatatagcagcacacagcagaggtaagagagagcaaggagcctaacctcgagcatgtaccggggctcggtgagtgatacgcaatgcctgtctataaagcttcaagacatgtgtacgcaggatgaaagcccgtaaatccatgaaatacgccattgaagaacaacttaatgccaagtaatggtcaatccatgtgaaacctcccagcaagctggaaattgtacaatcatataatggtcatgaagtaagagcatctttgatatctttatagcacacaagtatactatgcatacataactgctctagccaaaattcaacaaaccacagagagtgcattggtactgcaataacttatgcatatccatgcattactcactggatatatactaaaaaatctattgcatagactcaataaaagtatctcattagtttaatatatactaaaaaaatctattgcgttggtacttcctctcttgcacctgcccaagctctaataccaagtatgccagatgtgtgttcgtatgatctgagctatttttaaaatgaaaaatagctgtctttataaatccatgtgcacatagagaggattttgccaagttcattcaacttcggaacaatcagtgtaagttgctatctactaatacactgaaagtaatgcaagattcatatgtatatacggtatatgaatgtgtcatctcatctgatgcattccaacaaacacctaatgctcacaccgtcacacgtatagatccggccgtttcctttaccatcaaaatgggcatggaaaactgatctcatggcgcccaaattaccatttcaaaattcccgcattcagctactgaagctagctccaaatcaataggaattcgaaaaactggagggagccgcagtcnnnnnncaacttactaccgcaccaccgctgggatgtgcgtctgctccgc

SEQ ID NO: 4577 - DNA, 861 bp, Zea mays
  misc_feature (385)..(388): n is a, c, g, or t
  misc_feature (390)..(391): n is a, c, g, or t
  misc_feature (399)..(399): n is a, c, g, or t
  misc_feature (404)..(405): n is a, c, g, or t
  misc_feature (803)..(803): n is a, c, g, or t
  misc_feature (858)..(858): n is a, c, g, or t
cttcgctggcgcgcggacgtccgacaggatcgggcgccgcttgaccgtcgtgttcgccgctgtcatcttcttcgtgggctcgttgctcatgggtttcgccgtcaactacggcatgctcatggcgggccgcttcgtggccggagtcggtgtgggctacgggggcatgatcgcgcccgtgtacacggccgagatctcgccggcggcgtcccgtggcttcctgaccaccttcccggaggtgttcatcaacatcggcatcctgcttggctacctgtccaacttcgcgttcgcgcgcctcccgctccacctcggctggcgcgtcatgctcgccattggcgcagttccgtccggcctgctcgcgctcctggtgttctgcatgccccgagtnnnnannagtccttngaatnnggatcaacaatatgattaattgtaaatacacaaacaaacaacatcatgtggtgcaaccagacataaaagatatgaagacacatcatgcaaatcggttcattgtaataagttcaataatatatgatggacaaatatagtaagcagttacaaaatattcacctgctctaggtataggactttgcgctgaaaaatgcttgtatgtggactgcagggaatggcaatcacttcaaccctttcgcctctccctaggtctctaaaatattctttatatctagtaatgtcagcagtggcagacatcaaaactaacctgccaagggtaacacggtgacataccaacagcagatagtagacaactatttatttatacacaaagggaacaattactgctaaaagacaancactgtgtaccatccactagtggaaattacttctattgcttaccttaagtcactnttt

SEQ ID NO: 4578 - DNA, 399 bp, Zea mays
gcgctgcccagggagatggaggccgcccgcgtggccttcgagaccggcgccgcgccgatcgccaacaggatcaaggagagccggtcgtacccgctgtaccgcttcatccgccaggacctcggcgccgtgtacctgaccggcgagaagctcaagtcccccggcgaggagtgcaacaaggtgttcctggccctcagcgagggcaagctcatcgaccccatgctcgactgcctcaaggagtgggacggcaagcccctgcccatctgctgaggagtgaggaggaggacgccaccggtgccaagaggcaagacccgcaagaggaggagttgacatgacaccgtacgcgcgcgaggaagaaataaagaagggagtatttcggtattctcaagcaggcttcatata

SEQ ID NO: 4579 - DNA, 374 bp, Zea mays
gtcctatcgcagccttgtataagagaacagataatggatgcagctgttacagcctcggctgggagtgcctcccttcgctacacaaaatcaaggcgcgtgtcgactatgacggcacctacactgctgatttcgagaagccagtggctgagatgatgcaggcagcaaaactccatcccaaccaacccataattgagatggttactcaattctaagaagcctggaaaactgccatttaatactggttttagcaaccggatgaaaaggccgctaatttcccactagatatattccatttccttgcttttcgacagcttggtgttgtatgtcaaattattaagcagctttgtaataagactgtgtggtgccactttagg

SEQ ID NO: 4580 - DNA, 393 bp, Zea mays
ctgcatctctgatgcaaagaaggtgtttgacttctccactgaaaagaacattgtgatgtggaatgctatcctttatgggtttgttcaaaatgagctccaagaagagaccattcagatgtttcagtatatgaggagagctgatcttgaggctgatgattttacatttgtgagtgtccttggcgcgtgcattaacttgtattcacttgatttaggtaggcaggtacactgtataacaatcaagaacggcatggatgcagacttgtttgttgctaatgcaatgctagatatgtactcaaaacttggagcaattgacgttgcaaaagcactattcagtctcattccagttaaggatagcgtatcctggaatgctcttatagttggacttgcacatat

SEQ ID NO: 4581 - DNA, 419 bp, Zea mays
  misc_feature (329)..(329): n is a, c, g, or t
  misc_feature (335)..(335): n is a, c, g, or t
gctgttgttgtatcgacagtgatggagaaggatcgtcaagatgtggcacggaagcgccgggcggtcactagggtcggggaccctttccgcgaggcgaagaaggcgtggggaggcgcgaagtctgccgcccctagcagtagcaaaccaccattggctgtgaagtcagccgcccccaggcctagcaagtcttcgacgggtgcaaaggctgctgcttctggtgcgggcaagcttccctcagccgagcccgcgaaggagcgaaggctaccgttgccggcgcgcactgacgtggcggcggcgcgtgttgctgactttgacacggacttctgcgngggggnttatctcgttggtaagtttttttttcttttctccctgttttttttaagggggaggagatcttaaacaagatcatggtgcagggt

SEQ ID NO: 4582 - DNA, 562 bp, Zea mays
  misc_feature (533)..(536): n is a, c, g, or t
  misc_feature (543)..(545): n is a, c, g, or t
attttccggaaatcaagttttgagaagctacatgttatccaacattttaagcattgcaaccttcaagcatttgagatgccagtgtaattgttccacaattgtcatcggggctgctaggagctgtgatgtagcacttcgtttttattctgctgttgtgtgactgtgtctttacatttctgttgttggacaagactccaaaacgcttgtaattgttctggctaagggcccgttcggttattcaggaatctactccagaaaggatttcagctggaataattgtataatttgtataacaattagtaacctggaatagttcctagtcttgttccagcctaaccgaacggggcttaaatcagaatctgtttcacacgatcatttctcgagtgagggaaacagattctgatttaagccccgttcggttaggctggaacaagactaggaactattccaggttactaattgttatacaaattatacaattattccgctgaaatctttctggagtagattcctgaataacgaacggccttagnnnnacattannncgttttggagtcttgtc

SEQ ID NO: 4583 - DNA, 666 bp, Zea mays
tattgaatggttggctggctagccgatcttccttaccggcgaacgaatctgaatgggatctccatggcaatacgtttgctgaatggggtctctgctgtcgaacgaatctgctatggtcttggtgccaaccaaccacacatgttcatggataatcgtgatgtgtggtggtggtaactaatagcagaagtagtagtggttaagttagcatttttttgctctttttgttcgtacttaaatggtagtaatcaaaagaaagtatagtgttacctaaacaaacccatcaacgttatctatagtgcttactaactcaagtagatactacaaacaagaaccatatttttaaatagcattagacacgaaacattacaaccattttgaagtatataatcttctgagaacaagaggagcaaaagttatggtactttatttcactgacgcaagaatactgagctattactttttagaagaaaaatatatgcaagtgatcaaagattctaagctattcctcctctcttgctttctatactttatatatttgacatatgcttattttgctcgctagaaaatcaggaagaccccaatggttgtgtcaaatccgaaagaagttttagactctagagtatgaactgaacccacttgaactggagtttccaagaggagaggagg

SEQ ID NO: 4584 - DNA, 959 bp, Zea mays
atagtacttgaacctggtgccttggctcagattcgttatagtaggagtacgagcagggacatcgggaagaaaagaattctgttgaatgcgaaagatgagctggagttgcctccacaacctgaggttctcttagaaagcagtacaacaattttgtcccctgcaagactcaattttaagccatttggtagcaataaggggcagatattgccaaagactccaaagactcctgatgcatctgcgtttgatggtgattcaaatcttgaatcacttccacttgatttgctggtatgaaactgaaacaactacctttttcttaacttcaatatgcattatatctgtggtaaacctgattgcatttgttttgttggaaaaggtaaagatcatgtgttgcttacaccacgacgaacttaaggtggtttttcatgtttcaaaaaggattcgaaaagcagtaagtatcatcttaactgttgcattctttatttgtaaagtagataaaagtctcttttttccccatttctttgttctcatacaatttcagtcatttaaagaatgacattttgaagtaccctgtcttatgtcagctaggtgtggaaacaaatagtgttgtcttactttttgcacatagctgatgtatgctcatctcatcctcataaaaactgatttatctgacattccaaaatgcaaaaaatgttgttttctcttctgttaagaaatgacatagtgttacatggcctacttcttccattagtggtttctcattttgagattatgcactatcaattcattacattcttgtcaattctatctctgtttttgcatgctcaactatctatttattcagttaatttacatccttaacattaatgacgtttatttttcattcctatcagtcagcatgtgctttaatctcttatttatttccaaactcacttttaacggtaatataaactaggtgaact

SEQ ID NO: 4585 - DNA, 380 bp, Zea mays
ccctatctgctgagtgtccacaagcttaaaccgtcgccatgatgtgcatgtccctggcactcactgtcgtgctgtacgtgcagccgtgcaggcggctcgccaaacatgaggggggagggcaaatgccgcggcattccgaagaagagcggcagcgaggaggaggctcaagaaaggctcggtaccatattgggaaaagaatattccatatcatcaaacagttaagagatacaacaatatatgcacagaacctaaagggcgtagtgggctggagctctctgatgcacccttctccatagtccagacgtatatagtaagaagagaggctcctcattgttggagctgaatcgccgaagtgtctttggtattacttgccctttgga

SEQ ID NO: 4586 - DNA, 713 bp, Zea mays
  misc_feature (683)..(685): n is a, c, g, or t
  misc_feature (697)..(697): n is a, c, g, or t
gcatcaattgacgcacctgcatagggccaaactattctaaatcacttgcagattcagtgtcataccttttctagctgctaggaacttgtagtgttagtgcaacagtgtgctctgatatttgtgtatgtctgtttctggcctccataaggagtgctttgtacctgggtttttactgccctttttccccctctactttaatatatgggtgcgcagttctcctgcgctcttttcgggaaaaaatgcacccgtttgccattggtcatagtttgtgtagcatgttgcagagatctgcttgcacctgttttgcatttcaacttcagcttattggacatgatagttattgaagatgccaaattttgtttttttttaaaaaaaaaaatctcatgttctgtggatgatctgcagattctgcctaatcctacatggctgagcaagtttccttagcttactaaactggcgtgctaacaagtgacacgtgtcaattgatgggactgactgaatcacgggatgacccaaagaagtaactctccatctgtatacccctcaccccaatatgtacagaaggaatctcaactaggaacctagaatttgcacaggaaaaaaaaacaggtgtgctagccatttggcaatcagtgccagtttatctgttcctccacagttacatatcccacccatggttgagnnngagctgcaaagnccgttggaattatctt

SEQ ID NO: 4587 - DNA, 848 bp, Zea mays
  misc_feature (841)..(844): n is a, c, g, or t
gagccgaggccggagcggtctactggtgcagcaccggccatctggtgcacgaagcagtgcagcacgtaaagcgccgttccattcgctttgcttctttttttcttcttcttcttcttcttcttcttcttcttcttcttcttcttcttcttcttcttcttcttcttcttcttcttcttcttcttcttcttcttcttcccccactaccactaccacgatattgattgcggtgtggctgacactgtagatggcggcacacaacgttggagctctcgtggttctcaagtcgggggacatgaaccagctcgcaggaattgtgaccgagagaggtaggctagctagctaaggccagcagccgttacaaagacagttcgttcctctaccaaataaaatgctcagactggatatactctgctgcagattttgccagaaagatcctcttgccagggcgaccttcacagcaaacaagggtagaggatatcatgacagaagaggtgaatagacgtagacggtagaccctatgcaagaaatcaggctaactgaacaacccatctcatagtcctcaccgttttccttatcgttgcaggacaaggtgatcacggtgtccagtcgtaccaatattctgcgtgcaatggaggtaatgacaggtaatggaccgtttctgcagcttgtggatttaaataaatgtgtcgtttctgaaggctacatgaaacctcacagcttcgtatgttgctctctttttttcttcttcttttcttctattaacagacaagcgtatcaggcatgttcctgttttcgacgacaaggtagttggaatgatatccatcggtgatgttgttaaaannnnatcg

SEQ ID NO: 4588 - DNA, 356 bp, Zea mays
gatgagactaccaattgtgaattcaagaacatggcgaggaagctcttactttcagacatcactgggactccaacggcatactcctacaaacgcaaattgttggtgcagatgctccgtaaggatcaggagagttgattctgcttcttttatggaatgtgaaaaggctgcagcctgcagcggcgcttttatggagtgaagctgttctagcttcccgggagagcagcaatacatcacatcagttataaaccgactgcatacacaatgaatacatggtaatggactggagtcagggaatattcttatcagttgcagtctagtaggctgtgatttgtacctcttgatctggtttgttcttg

SEQ ID NO: 4589 - DNA, 591 bp, Zea mays
  misc_feature (411)..(415): n is a, c, g, or t
  misc_feature (453)..(454): n is a, c, g, or t
  misc_feature (457)..(458): n is a, c, g, or t
  misc_feature (463)..(466): n is a, c, g, or t
  misc_feature (482)..(493): n is a, c, g, or t
  misc_feature (500)..(503): n is a, c, g, or t
  misc_feature (505)..(505): n is a, c, g, or t
  misc_feature (508)..(509): n is a, c, g, or t
  misc_feature (512)..(513): n is a, c, g, or t
  misc_feature (536)..(538): n is a, c, g, or t
  misc_feature (540)..(542): n is a, c, g, or t
  misc_feature (552)..(552): n is a, c, g, or t
  misc_feature (556)..(557): n is a, c, g, or t
  misc_feature (559)..(560): n is a, c, g, or t
  misc_feature (582)..(586): n is a, c, g, or t
gacggtgctaagcacggcgagcagccagaagaagaggtcgaggtggttgcggttgatgttctctccggcgagccatccgccgctcgccgttttcttcttggtggccttgttgacggccttcacgatgacggtgctcatgaagtagcccagcgacagggagcaccagaggaacgaggacgacatggacttgagcgcctgcggcgcctgcgagtagaagaactccatgaggccgacgtaggtgaacatgtcggcgatgccgaacacggcgaactgcggcgccagccagaagcaggacatgggcaggtgctggaacccggggatcatgtccagcatgccgtgcctctcggccaccttcttgcgctgcacctccacgacggcggccatgaccatggagacgatggagagcaaaannnnntgaccgagaggcacgggatgctggacatgatccccggnntcnnctgcnnnncctgcttctggctggnnnnnnnnnnnngtgttcnnnntncannctnntcacctacgtcggctcatgggannncnnntactcgcagncgcnnanncgctcaagtccatgtcatcctnnnnnctctg

SEQ ID NO: 4590 - DNA, 829 bp, Zea mays
  misc_feature (396)..(400): n is a, c, g, or t
  misc_feature (417)..(417): n is a, c, g, or t
  misc_feature (693)..(693): n is a, c, g, or t
  misc_feature (713)..(716): n is a, c, g, or t
  misc_feature (746)..(748): n is a, c, g, or t
  misc_feature (750)..(750): n is a, c, g, or t
  misc_feature (771)..(772): n is a, c, g, or t
  misc_feature (782)..(783): n is a, c, g, or t
  misc_feature (792)..(798): n is a, c, g, or t
  misc_feature (812)..(814): n is a, c, g, or t
gaactacagtgcacgcaaaaaatacatatcagaaaatgcctcagatctcatttgattgtaggactccaagtaggttctccctggagagcagcgacttggagtttgtctgcacctcacaattaagcaacacatcatcaaaagcaagaaaattttaagcacattttttccatctacgatctgccagatatataaatattgaaaattgaagtcaagaacaataaatcacaatctagttcaaaatgttgtaaaatcactcatgtggaaccccaagtaggtcatctatgatctacatctaagatcgtgtttgggcaggctccgtgcaggcaatcctaccaagccagaagggcggcggagcaccaagagtggctccgcttacataaacctaaggctaataannnnnaatatgattaattagtnaatacacaaacagacaacatcatgtggtgcaaccagacataaaagatatgaagacacatcatgcaaatcggttcattgtaataagttcaataatatatgatggacaaatatagtaagcagttacaaaatattcacctgctctaggtataggactttgcgctgaaaaatgcttgtatgtggactgcagggaatggcaatcacttcaaccctttcgcctctccctaggtctctaaaatattctttatatctaggaatgtcagcagtggcagacatcanaactaacctgccaagggtannnnggtgacataccaacagcagatagtagacannnanttatttatacacaaagggaannattactgctnnaagaccaannnnnnntaccatccactatnnnaaattactctattgc

SEQ ID NO: 4591 - DNA, 677 bp, Zea mays
ttggtactgactatagcggtgaagggaactgcggagggataattcctcaagttatggatacaatatttagaaaagttgacacctcaaaggatggctcagagtttttaattagagtatcttttattgaggtgagatacctagtggcacttgtctctttcttatttgtaccagcatctcttagcttgttatcattgcgtgctgtgctgctatggatttcagatattcaaggaagatgtttttgatttgctcgatgcaaatcaagctgctgtaagacttgatgcaggttctatggcaaaagcatcagcacctggcagagtgccgattcaaatccgagagactgcaactggaggcataacccttgctggtgtcacagaggctgaggtgaagtcaaaagaagaaatggcatcatatttgacacgtgggtcgtcgtcgcgtgcaacagcaagcacaaacatgaataggcagtcgaggtacactgtacatacatcatacatgtgttttctttcttcaagaaccattagtgcatattacaaatgccgttctgttatttcactatctttgatgtgcattctaataatgttcttatttggatggtgttgcttatctgtagtcgctctcatgccatctttacaatatgcgttgaacaaaagagaacatctggtacatccgacaagtca

SEQ ID NO: 4592 - DNA, 467 bp, Zea mays
cggcgtagtcgtgcccgctgccggctacgatctccggcgccacgtagtcctccgtgcccacgaacgagttcgacttggctggcgtccgaacgcccggcggcgagcagcatgacgacgaagacgcggacggggcagtcatggaagtgaacaacggggactggggcgaagctacgtggcggcgggagaagcacgcgaaaaccgtagatgccttcgtgttcttgttcctgcgcctgtggcgatgtgaggaaggtaaaagcgagctggcgcgtgctggggccgcgtccggcggcggcgggggcagaggcggcggcaacgtggtagagaggtcgaagtcgacgagcatgacgtggcctgattcctggatgaggacgttctccggcttgaggtcgcggtacacgacgccgaggccgtgaaggtgctcgagcgcgagcaccagctccgccgcgtagaaccggatgacggattcc

SEQ ID NO: 4593 - DNA, 593 bp, Zea mays
gcctagcagaagcattctcacgttacggacaagtaatagaaggtctatcctcgtcgcttgccagaacacacccttactgatacctaatagttattctgcctgctgctgttagctgttaccaaagccgggcttctttcttgagtgcagctaccgtcgtcagggataaggtgaccgacgtaccgaaaggattcggcttcgtgaagtttgcttccccggaggaagccaataacgcgagggaagagatgaacggcaaggcaagatttgctccttggaaattactcgttgttatttttttttctctcccttcttctttgtgccatgtggagaggagcgctgagcaatgcggctcactggcaggcattgaacggtcgggtcatatacgtggacattgcaaaggccagacaggaccgtgctgcagatgccctcccaatagcgagaggccctcctaagcctatcagcaacgactgatagaggaaggccttggtgtgcgctcccaatagcgagaggtcctcctaaaccaattagcaacggctgttcaaggaatgcctggtgtgtagttccctcccgtcctcagctggcatactagttcgatt

SEQ ID NO: 4594 - DNA, 1006 bp, Zea mays
  misc_feature (987)..(987): n is a, c, g, or t
gtggagtagttagaatattcacagtggctgtaggtattctgttctctgtttatgcatactgctttagtgcttacagtttttggctcaccatcttgaggtgtaaataggtcactattgtggtcgtggctgttccagaaggactaccattagctgtcacactgacgtaagcatggtttgtgtgttattttctgccagccctttcgtcccttgccactcaacatactttatttttgtcaggcttgctttctcaatgcgcaaaatgatgaaggacaaggctctggtatgttcccaactttctataccttggttttgtcatactacttgatccgacattgaatgctttgcacgctcacttcctatggaatgtaggtcaggaggctttctgcatgtgaaacgatgggttctgccacaacaatctgcagtgacaagactggcaccttaactttaaatcaggtgcaatggtgtttattcactttatacatactgacatacatgtttcagataattctgtttgttgaatctgattggccctgatttttaaattctcttcttcctggttgattttaagatgactgttgttgaggcatattttggtggaaagaagatggactcaccagataatgcacaaatgttatctgctgatgtcacatcactgattgttgaaggaattgcacagaacacttctggaagcatatttgagcccgaggttagtcatctccattcgtggagaaagaaaaagcatatgtggttgcatatgcatttgagatttcaggttttagtaaagatatagcttcgtagtgatccctatgcgccatcactcagtggttagataaaatgtgcacccttacaatttttttattggaatttattgcacatgcatgcctgtgtagtgatcttcagaggaaattttatgtttggttctcaagttcaattgattttttctggcttgacaattatcaggagagcatgaacagacatgtactttcnggggccatgaattctgact

SEQ ID NO: 4595 - DNA, 409 bp, Zea mays
  misc_feature (401)..(401): n is a, c, g, or t
ctacatccattgtttcatctgcaccagatagtgggcagcctagaaacaatacacctgatctgccaaggcgctcttcaagcccatttccctcagaagggatggatttattgcgacagattgcctttgctggtcttgaagactcagagaggtttgcgactgctgtcagtgaacttaggcgaatcgctaggccaagccactacggggcatcaacttcatcaaacccaccaacaaatcctgagcctattgatggaactcatattgccatggcactggctgcagatcaagcttctaattcgagcaccatggctgtcattcaggaagatgcagcttttgctgaaagtgctggagaacctagtaatgccgggtcttcaagatccctgagaagaagaagaggaagtggngccttaag

SEQ ID NO: 4596 - DNA, 550 bp, Zea mays
  misc_feature (381)..(381): n is a, c, g, or t
  misc_feature (383)..(385): n is a, c, g, or t
  misc_feature (390)..(390): n is a, c, g, or t
ccggtgccacaacgccgtgctgctcgacttcagcgagggcgaccagcgccgcccgcgtcagcgccggtgaaatggaaccaccacgagcgatcgagcacaagcacatctgagttcgtcgttgccttcaagaagtcgtcgtcgtagcttcattttcccattcgcggccggagtttgtttcgattacccaaggaattattgcatagacctgtttcttccgagcggcacggtgccaaagggatcggtctaggtaataatttcatgctttgttagacaataataataagaataataatttcgtcttcttactagtactacgcgatgtgctagtgtacaagcattgttctatttttgctaataactgaagttgcgctcttgttccancnnnggtanaattttctcgaactgtcgcaatggagatttcctcgaacagtcgcaattgctggatcatatattttaattgtcatatatcatatataaaaccacagttctcttctctttattatcacaatgcaattaacaccactcccttacttacctgtaatgcgaggga

SEQ ID NO: 4597 - DNA, 854 bp, Zea mays
  misc_feature (475)..(475): n is a, c, g, or t
  misc_feature (676)..(677): n is a, c, g, or t
  misc_feature (736)..(736): n is a, c, g, or t
  misc_feature (746)..(748): n is a, c, g, or t
  misc_feature (771)..(773): n is a, c, g, or t
  misc_feature (781)..(786): n is a, c, g, or t
  misc_feature (794)..(805): n is a, c, g, or t
  misc_feature (809)..(820): n is a, c, g, or t
  misc_feature (823)..(826): n is a, c, g, or t
  misc_feature (828)..(828): n is a, c, g, or t
  misc_feature (830)..(831): n is a, c, g, or t
  misc_feature (833)..(842): n is a, c, g, or t
  misc_feature (845)..(850): n is a, c, g, or t
agagctcgcccggccttcattttctcctgcagtatattgactaggttagggctgccctcaggctggttgttctccaggttcttcctcccgctcacgatctccagcacgaccacgccgaagctgtaaatatcggccttctcggtgatcgtcgacgacagccactccggtgcgaggtaccccctcgtccctctgatcttggtcatcacgtggctctgatccctgtcgatgagcttcgccaagccgaagtccgagatcttcgcgtcgaacctgtcgtcgaggaggatgttccccggcttgatgtcgagatgggcaatcttctgccggcattcctcgtggaggtaggccagacccttggcgatgtctaggatgatcttgtaatagcttggttttctcaacagatataactatgcatatgaacttcattctcaaatctcttgcagaagctcgtagagctcttcctaaagggaattcaaantggtatgaagagggaagtttactattggcatgcctactatgtgagcttgtctctctcacaccatccagttcaacatgcacttccctggtgagctattttaatataagagaataatgaatttcaggacaagaggttgcctgttggtgcaagcgctttgcttaaattggaaggtaatttatttcccctgcattccaataactnntgcttgtggtactagaaagttttcttttgtattttgggcacggggttcatttgaattgntatcggacannncatattgtcagtgcatttacgtnnngtcttccnnnnnntctgtcannnnnnnnnnnncccnnnnnnnnnnnnttnnnntngnncnnnnnnnnnngcnnnnnncatg

SEQ ID NO: 4598 - DNA, 1259 bp, Zea mays
  misc_feature (899)..(902): n is a, c, g, or t
  misc_feature (906)..(1036): n is a, c, g, or t
  misc_feature (1038)..(1039): n is a, c, g, or t
  misc_feature (1041)..(1055): n is a, c, g, or t
  misc_feature (1058)..(1061): n is a, c, g, or t
  misc_feature (1072)..(1074): n is a, c, g, or t
  misc_feature (1085)..(1086): n is a, c, g, or t
  misc_feature (1089)..(1092): n is a, c, g, or t
  misc_feature (1095)..(1097): n is a, c, g, or t
  misc_feature (1102)..(1108): n is a, c, g, or t
  misc_feature (1111)..(1126): n is a, c, g, or t
  misc_feature (1128)..(1134): n is a, c, g, or t
  misc_feature (1136)..(1139): n is a, c, g, or t
  misc_feature (1141)..(1141): n is a, c, g, or t
  misc_feature (1143)..(1150): n is a, c, g, or t
  misc_feature (1152)..(1163): n is a, c, g, or t
  misc_feature (1168)..(1169): n is a, c, g, or t
  misc_feature (1171)..(1175): n is a, c, g, or t
  misc_feature (1178)..(1197): n is a, c, g, or t
  misc_feature (1204)..(1204): n is a, c, g, or t
  misc_feature (1207)..(1209): n is a, c, g, or t
  misc_feature (1213)..(1230): n is a, c, g, or t
  misc_feature (1232)..(1233): n is a, c, g, or t
  misc_feature (1235)..(1237): n is a, c, g, or t
  misc_feature (1240)..(1240): n is a, c, g, or t
  misc_feature (1242)..(1242): n is a, c, g, or t
  misc_feature (1245)..(1247): n is a, c, g, or t
  misc_feature (1249)..(1252): n is a, c, g, or t
aggagacacagcacgcagcaggggtatggggaggccaccgtgctgcgacaacggcgtcggcgtcaagaaagggccgtggacgcccgaggaggacatcgtcctcgtctcctacatccagcagcacggccccgggaactggcggtccgtgccagagaacacaggttcggcgcccaactctcgccatgttgcatcttgctcagctgatcgatcgatcagatattgtcactgaagggatgtactacatacatgctgagagttgttgttgtgcctgtgctcttggttttgttttttctttgagacaactagtagtgtgtgtgcttgatttgcttcgatgttacttacatgatgtgtatttttttgtctagggttgatgaggtgcagcaagagctgcaggctgcggtggaccaactacctgaggcctgggatcaagcgtggaaacttcactcctcatgaggaagggatcatcatccacctccaggcgttgcttggcaacaagtaatcaccattactcctaaaatagtttttttagaacctcttaaaatcattgatgtaccactctgctagcatagatttatttataacttcatcaacctcatatccatcgcattgacaaacaaacaaacttgaaataggtcaaacaaacaaaccagcttgaaaatggattcagtttcatttcgcattgacaaacaaacaagcttgaaataggtcaagcaaatccatgcgtgactaatggaacaacagcataatctatggcttcaaaaaaacatttttttccctatctgactaagataagtatgtcacatacatatatctcgtgtgctttcatgcaggtgggcagccatagcctcctacctccctcaaaggactgacaacgacatcaagaactactggaacacacnnnncaannnnnnnnnnnnnnnnnnnnnnnnnnnnnnnnnnnnnnnnnnnnnnnnnnnnnnnnnnnnnnnnnnnnnnnnnnnnnnnnnnnnnnnnnnnnnnnnnnnnnnnnnnnnnnnnnnnnnnnnnnnnnnnnnnncnncnnnnnnnnnnnnnnnccnnnnctcctccctcnnntttccaccttnnctnnnnacnnntcccnnnnnnntcnnnnnnnnnnnnnnnncnnnnnnncnnnntnannnnnnnncnnnnnnnnnnnntcacnntnnnnnctnnnnnnnnnnnnnnnnnnnnccctttnacnnntatnnnnnnnnnnnnnnnnnncnntnnncantnccnnncnnnnacacttc

SEQ ID NO: 4599 - DNA, 832 bp, Zea mays
  misc_feature (792)..(795): n is a, c, g, or t
  misc_feature (798)..(798): n is a, c, g, or t
gctgcatgtagctgggcatatcctttcccagaactgtacaggtgtttcctgccaatacaagagtatgcagctgtcagaaaattgagcataaatactgcaactactaattaaatacatgaaactgtgcagttgagaacaccacaccaacattgcaaaaactttgaaaaatgacctaaaaaccactagccacgttcccatgcgattttccatcgtaccctgttaatgcagcagaatgatatcccactatgtacttatgtagatgttattctttttgagatacaaaggacagctgtgcattaagaagaaacataataatgaattttagtatattacaacacaaggcctcgaaagcagtccccaactcgtacacgtgaaacttgtaccttcactgcaagacagtgaacaatatgcacatgacatggctaatgatacttacttttatatcttctgactgtcttcgggaaatcagttatgatgcctgataaattaaatgattgaatatagtaattgatttccacagtttcatctccgaagaaatccaatggttgtgctacaaactcattctggaacacctctgcatacaaagctagccccgctgactgcagatcttgcacaagactgttctgtcttatgatgaagtcagagcttagagtaaaaacagatttgctgtccacagctacatattcagcaaacttcttaatgtctttcaacgaggaattagaagcatccccgatgccagagggtagagtgtaaacaagcttgcattttgttgtctgctgcttcattttgacnnnnaanaaaaaaaatgcaagcttgtttacactctaccctc

SEQ ID NO: 4600 - DNA, 392 bp, Zea mays
tctactggtacacattttatttttttcatggtgataattaattcgtagcttgcgcaaaaccaaaggttgtgtgatttttcaaggcagaaatcagtatcatgataggtgtgcttgagcttttgatagctagtttatttgaacttttatctttttatgatcatggtatattgagacagaaatattttacatgtacctttgcagtttttcagttggagaaaatatttaagacaacattttcatcgtttgttctccatatggggcttgtttcacgccacttgaaggaaggagggaatgatggtgttaagttcggacaatacatctacacatctatgaaatgtacaaccacgatgtagagcatatagtttctaaagttgggtaagctgtttggcagg

SEQ ID NO: 4601 - DNA, 408 bp, Zea mays
tctcttgatttcagaagatatgtgcaatttgcctcagcgccatgaggtccggccgcggccaagcactgttcactgctgaatgctcccacaagttccacttcaactgcatctcctcaaacgtgcagcacggcaacaaaatctgcccaatctgccgtgcagtatggaagcagctgccttttcaggggcctctggctgcatctgctgcccatgggtcagcgagagtaaacccagcgatttggccccagatgagcatgctgtcggtgaatccgctggacgagctcccagtctttggcaatccggagccagttgttttcaatgacgatgagcagatacttcttcagcctgaaacagcagttggcggcgaggagggtgacgaggttccccctttgcttgagatcacgacataca

SEQ ID NO: 4602 - DNA, 548 bp, Zea mays
  misc_feature (387)..(387): n is a, c, g, or t
  misc_feature (397)..(400): n is a, c, g, or t
  misc_feature (406)..(407): n is a, c, g, or t
  misc_feature (409)..(409): n is a, c, g, or t
  misc_feature (413)..(413): n is a, c, g, or t
  misc_feature (417)..(417): n is a, c, g, or t
  misc_feature (483)..(483): n is a, c, g, or t
  misc_feature (510)..(510): n is a, c, g, or t
  misc_feature (517)..(517): n is a, c, g, or t
  misc_feature (538)..(538): n is a, c, g, or t
  misc_feature (540)..(540): n is a, c, g, or t
tgtcgtccttatcccggaacttggcgacgttcagggttggcagcttgtcgccgccgccgatgagcgagctgtagttgacgtcgaagcccgccatcacggggttttcgtcgacgagcttgtccttggtgcccgtcttgctgagctggtaccacgtcctcttgctgttggtgaagccgacgatgtaggcattgtcgctgtggatggccaccgtgggcgcagcgccgcccttgctgttgagaacgacgtggatccacttcggcggcggcaggccagacgacgtctctttggccagcaccggccgacttaccttggatttgggccctagcaccgtgtcaggcttcgggccggccacagctgcacgtacattctggatgaatgtgatgtatngagtccgaannnntttttnntntgtnggantggagatttcctcgaacagtcgcaattgctgtatcatatattttaattgtcatatcatatataaantcacagttctctttattatcacaatgnaattaanaccattcccttacttacctgnantgcgaggg

SEQ ID NO: 4603 - DNA, 555 bp, Zea mays
atagttatctctggttcctgcgcgtgccataccctgcggacaagaggtgtgcgtagaggatctgattccaaacgtccggcacgccggggaggcaccagtggctgcagtcctccggcgcgtccggcggcgttccgggctccctgtgccctgccgggtggccatcaggcctgagctccgtcatgtgagtgatgttcagaaacctcgccttcctcccgtggctcttgatatcctccgtcatcttcgcaatcatcgcgttcatccatgagtactcttcctcggagcggccattgtttgtggtcggtggctctcgctggccggcgcacgaaccgccagtgttccaggtgccgttgctgccattttcaggtgcagaaaaatcatggttaaattttctcgaactgtcgcaatggagatttcctcgaacagtcgcaattgctggatcatatattttaattgtcatatatcatatataaaccacagttctcttctctttattatcacaatgtaattaacaccactcccttactcacctgtaatgcgagggagaataactcctga

SEQ ID NO: 4604 - DNA, 377 bp, Zea mays
tcatgcataagaatcatcagtgtgttgattaggatgcgcgtgaggcaccatctgagagagcagttgctgctgcaacaatagcttttgttgctgctccagttgctgttgcagttgttgttgctgctgctgcagttgctgctgctgctgctgctgcttgagcaataacatcttgtccaacatagagagtggaggctgaggtgtaaaaggtgtctgagactgcaactgtagttgtgacaaaagatattgctgctgaagcatatttaacatttgcggatcttgagatatctcggcaagcttctcaggtggcaactgagccaaagctggtcggttttgtggcattaagttgtgttgttgaaatccaataccaatgttctggg

SEQ ID NO: 4605 - DNA, 601 bp, Zea mays
  misc_feature (558)..(559): n is a, c, g, or t
  misc_feature (563)..(563): n is a, c, g, or t
agtgctcacagacaggacgggcctgtttggcaaggacttcatgatccccgttttcaaagtcctgttgggcaacgggctcatcttagcaaacggcgacgactggaaacggcacaggaaagttgtccttccagccttcaaccacgagaggatcaaggtcgtcgtcctcgtcatcaatcatcatcatcacaagttttgcacatatatatatataggcagattttagcaactgatgatgacattgttcctgctgtcggtctcgagttcagagcatgtcggcagtgacggcggaagctacggaacagatggcacagcgatggtgcgagcagctaatactgcacagtggtgcccgtcaagcagcggaaatacaagtggaccgcgccatctgcgacctgactgccgaaatcatcggccgcgccgctttcggcaccagcctccaggaagccggtgaggtcctcgtcctgatgcacgagatgcagaagatgggcgccgcggccatggtggatgctcccatactctggtatcagtgctgtgatacaacaagctaggaacgcagaaganngcgncagccaagtatgatgtacctttcttttagtaactctcg

SEQ ID NO: 4606 - DNA, 406 bp, Zea mays
tccatctccacctgcagctagcctcctcaagatattagcctctgatttaaggagctgacagaagattcttcgtctaccagtgtatgaaccgcacttgactcattgtcattggcttctccaccgaggtggtcatccgatgccatcagaaggtcctttcgagcacgctccctgtctcgggggtacgtgtagtacaggaaggtgtaggtcaggcaacagatggccatgggcacggcgatctccgtgtagacagcctttgccaatgcggcagcattctccctgtccgtgtccacgctcgtgtcggacgagaccggcttatagccgaacacgcgctctgcaagaacaccgacgatgggagacgcaaacgacgcgaacactgcttcgaaacacttgtccagtgcgtagacca

SEQ ID NO: 4607 - DNA, 1396 bp, Zea mays
  misc_feature (59)..(59): n is a, c, g, or t
  misc_feature (893)..(893): n is a, c, g, or t
  misc_feature (895)..(899): n is a, c, g, or t
  misc_feature (901)..(901): n is a, c, g, or t
  misc_feature (903)..(905): n is a, c, g, or t
  misc_feature (910)..(954): n is a, c, g, or t
  misc_feature (956)..(983): n is a, c, g, or t
  misc_feature (988)..(993): n is a, c, g, or t
  misc_feature (996)..(998): n is a, c, g, or t
  misc_feature (1004)..(1010): n is a, c, g, or t
  misc_feature (1013)..(1014): n is a, c, g, or t
  misc_feature (1016)..(1016): n is a, c, g, or t
  misc_feature (1019)..(1021): n is a, c, g, or t
  misc_feature (1028)..(1030): n is a, c, g, or t
  misc_feature (1033)..(1034): n is a, c, g, or t
  misc_feature (1037)..(1041): n is a, c, g, or t
  misc_feature (1044)..(1050): n is a, c, g, or t
  misc_feature (1053)..(1059): n is a, c, g, or t
  misc_feature (1067)..(1069): n is a, c, g, or t
  misc_feature (1071)..(1071): n is a, c, g, or t
  misc_feature (1074)..(1077): n is a, c, g, or t
  misc_feature (1081)..(1082): n is a, c, g, or t
  misc_feature (1087)..(1088): n is a, c, g, or t
  misc_feature (1090)..(1095): n is a, c, g, or t
  misc_feature (1103)..(1108): n is a, c, g, or t
  misc_feature (1110)..(1115): n is a, c, g, or t
  misc_feature (1124)..(1128): n is a, c, g, or t
  misc_feature (1133)..(1136): n is a, c, g, or t
  misc_feature (1144)..(1148): n is a, c, g, or t
  misc_feature (1151)..(1155): n is a, c, g, or t
  misc_feature (1158)..(1158): n is a, c, g, or t
  misc_feature (1164)..(1167): n is a, c, g, or t
  misc_feature (1172)..(1182): n is a, c, g, or t
  misc_feature (1189)..(1191): n is a, c, g, or t
  misc_feature (1194)..(1199): n is a, c, g, or t
  misc_feature (1202)..(1204): n is a, c, g, or t
  misc_feature (1210)..(1215): n is a, c, g, or t
  misc_feature (1218)..(1220): n is a, c, g, or t
  misc_feature (1229)..(1233): n is a, c, g, or t
  misc_feature (1235)..(1242): n is a, c, g, or t
  misc_feature (1244)..(1249): n is a, c, g, or t
  misc_feature (1252)..(1253): n is a, c, g, or t
  misc_feature (1255)..(1257): n is a, c, g, or t
  misc_feature (1260)..(1266): n is a, c, g, or t
  misc_feature (1268)..(1269): n is a, c, g, or t
  misc_feature (1277)..(1281): n is a, c, g, or t
  misc_feature (1283)..(1291): n is a, c, g, or t
  misc_feature (1294)..(1313): n is a, c, g, or t
  misc_feature (1317)..(1329): n is a, c, g, or t
  misc_feature (1334)..(1346): n is a, c, g, or t
  misc_feature (1348)..(1348): n is a, c, g, or t
  misc_feature (1350)..(1354): n is a, c, g, or t
  misc_feature (1358)..(1378): n is a, c, g, or t
  misc_feature (1382)..(1384): n is a, c, g, or t
catagatggactcttcgcaaggatgtcccccatggacagcagcttactgggaatatgcngttactggcttgatgatcatagttgccattcttttgctttggacgacctgacaattctgtcacccaattagtgtccttaaccatacatagaaaacagtgttacaatggtgaacctgagtaaattctaattatccacaatcaatctaaataacacaatagttactgcaaagtagttatgctttatcagacatctcgtatcagttgcaaattggcagtatgcagttgacaaatatgtattgctagaagatatctgttcaatagcaacttacggacaataagctgatgtttcccctgttaaaccatgtgcacgcatttgataaaacaggacaagcactacagcaagatgccatggattctggaggatgagacgggggaacatcagtatcagggccaaactgaggatccacctgccacatactattcgcttacgcaaaaaggcaatgacatgattgctgttcaagttggttcctggtactatactctctgcttccctctgttgttattagtcttcaaatgaatatatccatcatctgaacatacatgcttgcaagattcaagtacgttaaattgtatatatttcatcaagtcttggcattactaattgtgtgtcagtaagctcctagtataatttcttttgagatgagtgctctcttaattttgttatagcgttcttacagtctctcatgccctatcaggtacaacttcagtaaaattgcacagtacaaacagctgaccttggaagaagctgaagagaaaatgaatagaaggagaagcagtgcatctgggtatgaacgatggatgatgaaggcagctacaaatggacctgatgccttnannnnnantnnngaagnnnnnnnnnnnnnnnnnnnnnnnnnnnnnnnnnnnnnnnnnnnnncnnnnnnnnnnnnnnnnnnnnnnnnnnnntcctnnnnnntcnnncttctnnnnnnnccnntntcnnntcccctnnnttnnctnnnnnctnnnnnnntcnnnnnnntctctccnnncnttnnnncccnnccctnncnnnnnntcttcccnnnnnncnnnnnncccttcctnnnnnccctnnnntccctttnnnnnttnnnnnctntttttnnnntcttnnnnnnnnnnntttttcnnntcnnnnnnttnnnttcttnnnnnntcnnntttttctcnnnnncnnnnnnnncnnnnnntcnntnnnctnnnnnnntnnctcccccnnnnncnnnnnnnnnccnnnnnnnnnnnnnnnnnnnncctnnnnnnnnnnnnnccctnnnnnnnnnnnnncncnnnnntccnnnnnnnnnnnnnnnnnnnnnttcnnncccccctccctc

SEQ ID NO: 4608 - DNA, 378 bp, Zea mays
agatcgatccgtgaactcgattgaggttctaggatagcctgtgtttcgttttctttttcttttctctgtttgcgacacagagtacaaatcattgtatgggtgttgcctgatatcattaacccttattcatcacatcacatacatgtacaacctttaaattagacgtctacctcccttccatcttggcataggtaaaccactacttgaggagaatgatattagatgcaaatttgtgctgtgtgtgttcctgcggttttagcaccgtttctgcagagaaatttatggaaacctgaggacagatcgggtaggtggggtcaattcacgagatcagtatactgtggaacgagttgcacgaagcagatgcacatggaacttgat

SEQ ID NO: 4609 - DNA, 626 bp, Zea mays
cgctggccgtgacgcacctgctccagcacacgctgcgcagcctctgcggccacgacgacgcgcagtgggtgtacgccgtcttctggcggatcctccccagaaactacccgcccccaaagtgagtcgcccgttcgttcgacatgcatgcgcgcgaccttcgttcggtgtccttgtcgtcgtcgcccatcgatccttgacgcgctccggcgctgcgtctagtagtctggtctggttcggcggccacggccttctgggtcgttgcttgtgctgattaaattgtttatccggccgctgttcagatgggatctccagggcggcatatacgaccggacaagagggaacaggaggaactggtaccacctgctagctcatgcttattcctctcttcaatttcttatggatttgtgtttgtctgtacgtgattcctcgggttgcaaaaccaaatcaaattatctctgcccaggatcctggcatgggaggatggattctgcaacttcgcagcctctgcctgtgaccacgagggcgcagctgctcctgccgccgccgccgcctcctcctcctcctacacggcggagtgtgctgctgccgggcaggaggccgccaagggcctgcagcctgagctcttc

SEQ ID NO: 4610 - DNA, 493 bp, Zea mays
ggcgttctcactagcgcaaacatcaagtacatgtctaacggcagtcgaggcaccgatcggatcgacctgaccaaggacgcgatctggagcaccggccgggtggcgtacgggcagcctttgcagctctgggacgataccgccaaggtcgccagcttcacctccaacttcaccttcgctatcaagccacacaacagcaccaatcaggcaacttacccaaaaaaacttctctttaagctttctccgtgttcccagcttggtaagctccgagcactcgttggaatgaaggtgacacttgctgcgcactgcaggccgacggtatggcgttctacgtcgggccgtggcccccaaaactgccggaggactccaacggcggcttcctcggtctcttcaacaaccccatcggcatgaacattgacttcccgccgaccatcgcagtggagttcgacgcgttcaggaacgactgggaccccaacaacaccatgaaccatattgg

SEQ ID NO: 4611 - DNA, 612 bp, Zea mays
agggaaaaaaaagaaactaaacttgtcgagccgctagcaatatgctttccatattactacccaagctacctcaggctgcgccagtcctgggtatctcatctcttattagaagcgcccagattggtaccgtcgcttgtcaagggtttctcctctatgaaagcatacactcgcgacctgaatttctgggccagctccgcgagatcatttgccatcctcgtatggggcagccggttcgcaacatcgatcgtccaggtcgcgcataacttgcttctcgtcagcacttccaaggttggtttcgaatagtttgcgtgtgacgccagccggtttagcaggataagagcttctctcatcaccaaacatctgcagaaacagtttttgcgttaataccacaacaaattgcacacgagttgttcataggcagctaagagcaacttggagtccagcttaagatagttgcccgcaaaaaggggaagaataggcacgtctagaatttactcagtgatgtctccacactcatgctgtgatacaacaagctaggaacgcacaagactgtggtagccaagtatgatgtacctttcttttagtaactctcgtgtttcatattgcatctgc

SEQ ID NO: 4612 - DNA, 711 bp, Zea mays
  misc_feature (376)..(376): n is a, c, g, or t
  misc_feature (378)..(379): n is a, c, g, or t
  misc_feature (393)..(397): n is a, c, g, or t
  misc_feature (430)..(430): n is a, c, g, or t
  misc_feature (486)..(489): n is a, c, g, or t
  misc_feature (505)..(505): n is a, c, g, or t
  misc_feature (510)..(510): n is a, c, g, or t
  misc_feature (512)..(512): n is a, c, g, or t
  misc_feature (523)..(527): n is a, c, g, or t
  misc_feature (565)..(568): n is a, c, g, or t
  misc_feature (605)..(605): n is a, c, g, or t
  misc_feature (607)..(611): n is a, c, g, or t
  misc_feature (648)..(652): n is a, c, g, or t
  misc_feature (662)..(663): n is a, c, g, or t
  misc_feature (679)..(681): n is a, c, g, or t
ctcagcttcgttgggatttctaagaccgttgagcattctgccgagcctatggtcccaatccataaccgaaatcgcttcatggatcctaatgggcgcgtcgaacatctcggggtttctattttcactggcacaattttattgcacgttgaaacatatagttagggttttatgacaaatgtatttaatggccatggtatccgtacgaaaatggcactacattttgtacagttttgcatgcttaccatatgctgtgccctcttgaaattttggtgtagctagaccaggagagagagtcgcactgtgatttcatgcatgtaattaaaatggactttaattgcatggtacaagccaactagatacatacttgcatatcgcntnncccacacttaattnnnnncctagctacttgcttatgcaaagatctcccaanagaaaactttcccattggtatcgaacctccaacaaccaacatcctagacatgaatnnnnataatccagatgcctngctcncntcttgtatacnnnnnatatgctgctgctgtaatgtgtatctctggcatctctnnnntatcttcaagtatatcatatactctttcacactaagncnnnnncaaataccagggatctacttgcgaaggttgcatcagnnnnnaatggtggtnncatccgttctctcttnnnagcaccaaaatacagatggactcactgcct

SEQ ID NO: 4613 - DNA, 830 bp, Zea mays
tctggtcgccgtaccagagacgcttacgctcgatggttggcgcttgatgactacggaggacggtgggctgggatttgcagagttgaacttgcattcgactctcacgctctggtccatggtggacgaagggagatgggccgtaagcagggccatcgacctgaccgaccggctcccagttattgccctcgcggtatccacttgtatggttgcctttgcggacattgccggtgtcatcttccttaggacgacagatgggctctacacttatgatctcaagactgagcagagcattcttgttatggataatgacttctatggcatcataccctacgcgagcttctacactccaggtatatatatgccatgctgctgctttttctacgagaagtggatttactagcatgtgcaatcctatcagtattcggtctgggtaatattttggtttgaaaatggtatatgagcgatgatttttatgaatttgtactctcccacattacatgtaaaattgcgacaagtcatttccttgttctttggaattggaattggatagatatgtagtcctatcagtttactctgtatgatgaagcctaccatatcccagttaatcctttgcattccttagacatgttgtgtcacttatcagcgtaagtgtggatgatgatttacctcaagaggctgaatctgtgtttttctgtatttatgagccaatgaggggaggttaatttgtcatcatgctgatatttggtttgaaatctatgtatttctacagtgttacgggtggccaccacaggcgaggggtctgcttcaacttcttgacagagacctatggt

SEQ ID NO: 4614 - DNA, 502 bp, Zea mays
  misc_feature (412)..(415): n is a, c, g, or t
  misc_feature (422)..(422): n is a, c, g, or t
  misc_feature (424)..(425): n is a, c, g, or t
  misc_feature (452)..(457): n is a, c, g, or t
  misc_feature (463)..(473): n is a, c, g, or t
  misc_feature (477)..(478): n is a, c, g, or t
  misc_feature (482)..(486): n is a, c, g, or t
  misc_feature (489)..(491): n is a, c, g, or t
  misc_feature (493)..(499): n is a, c, g, or t
catcgacagctctcctccgcccgcgatggtgatgcatctgtattctcgctcctcttccgccggcatgcgaagcatccgccgggagctccagcgcaggaggtccaagcccttggcgccgacagggtccgtcgctaagatgccgtccgcgtcgcgtcacgcttcgagcgacggcggcgtcccggatatatgtcctcgtccaccgcatcgagcggccccgtcttctacaatccgccatttccgaggcaccaccgtcaccgacgcgtcacaacaccgccggcctcgcgcttcgtcgcgctgcacccccgcctctcctccgccacctcggtctgccccatctcctggcgtccccgcgcatctgaagcctgggacggtggttggtgtccgcacaaggactacaacgctgaagacgaannnnttgactngnnggataaggacgtggatcccggacgccnnnnnnccgctnnnnnnnnnnncaannccannnnngcnnntnnnnnnnacc

SEQ ID NO: 4615 - DNA, 437 bp, Zea mays
  misc_feature (322)..(322): n is a, c, g, or t
  misc_feature (325)..(325): n is a, c, g, or t
  misc_feature (399)..(399): n is a, c, g, or t
  misc_feature (411)..(414): n is a, c, g, or t
  misc_feature (416)..(416): n is a, c, g, or t
  misc_feature (425)..(425): n is a, c, g, or t
tctgcgcgttgtaaccgtaaaactagtttcaatcacgacgaacagaatgaaacagattcctctgcactgcagcgagctgctgagaagcacagaccggagttaaaaaaaaaactgcaaagcttgtttacatgcctcaactcgcgagacacagatacaaaagagataacaacacagacacggcaaaccgcgttcattattcagtgaagagcgacagtgacggcgggtagtagtaatcctcgaagctccacagcccggctggcgctggcgccggcacctgcgcttcttcggggacggcggcagcggcagcggcagcggcagcggnggnggcacttacagctgcattcccgccctccatgtacgggacgccgagaaagctcatgtagttctcgtaggccattncctcctcaaaannnngnagggggttngcggtgcctgtg

SEQ ID NO: 4616 - DNA, 1203 bp, Zea mays
  misc_feature (1121)..(1124): n is a, c, g, or t
  misc_feature (1159)..(1166): n is a, c, g, or t
  misc_feature (1192)..(1195): n is a, c, g, or t
ctagcaatacattgctccaatgcagatcgaagtacagaagacctttacactcttcacagacaatggcgtttaccacttactgtaatctttctattgatttaaaacgaaccagtttatttaccattcgtgacatgtcccttttttcgttaacaccatggcattttcttttgttacggctttttagaattctgaggcacaatgtgcaaaattagaaataacttctccatggcatataaacacacctatagatccaatttatttaatttattcactgcatgtaatttgccgatacgagaaagaacaattggatctagaatttgatgagtagccactccattatcacatatccatggatgctttgagcatttagaacaaaaagatcattgtattgtcgactactcgactccttgatgtccatgtcatctcttactgccctataactgatttaaatagttcattttggcaggaaactgagataactgtttgtttctagaatgaagtaatcacttaaagaactacatgttaaacttgcagctgccgcatgaactagagactgcacggattaatgagtttcttaggaatattgatgcagacattggtgatcctcaagttggtaactgtcactattgtacataattcctttagtgtcactgttgtacataacacatagtaacttaccttcccatatgagcaggttgggacacagatcagttcatgacagacattgcagaggctactttggttatgtctagtgtgttaagaatgtgagaggcatgaataaactctctccctttttacccaaatcagcaaatgccttgtctactacctggtttggtctttctgcatttgaggaaaatgtagtaatattaatacgacacatgaaacgagtttgatatttatgtacgacatcagatataactttgcctccgagtgcgctggcttccgaagatataacttttggatctgattgggattatgagaatccagtcttaatatttttaaaatatgtgtcttgatatttttaaaatctgttccgcaatctggtccatttgtatggctatagatagattttttttatcagattcttataatatccttggatccagattacctttatttannnngatttgcagacttgtcaatttataatagatatttnnnnnnnntatgtgtagttgtctcttatatttcnnnnttggtgtt

SEQ ID NO: 4617 - DNA, 973 bp, Zea mays
aattttggatgatcctgcccctaaaaggtctgactgtagaattagaagaattttaactgttgaatgttcatattattctttgttcattgggaggttaagctattacaatgaatatactgtttggtgacttaaatacttaatatttgtcattatgtgcaacagtttgtgtgtgattgcatcctactagtccatttgcataacagatgggaaaaaaatttctgtaggttatttctggcacgaggcaagctccaaaagctcctggtggaatttgtacctcctaaactaatactccaggtaaattatgcaaactagaaattatattgttacaggtaaattattgttattatttatttatttatttatttattttgtgcttcaggaatactattttctcaacagagataactatgcatatgaacttcattctcaaatctcttgcagaagctcgtagaactcttcttgaagggaattcagactggcgtgaagagggaagtctactattggcatgcctactatgtgagcttgtctctctcacaccatccagttcagcatgcacttccctggtgagcaattttaatatatgagaataatgaatttcaggacaagaggttgcctgttggtgcaagtgctctgcttaaattggaaggtaatttatttcccctgcattccaataactagtgcttgtggtactagaaagttttcttttgtattttgggcacctgtcacggggttcatttgagttgctatcggacaaggcatattgtcagtgcatttacgtgtcgtcttccattggctctgtcaaccaccggaattccctgaagtatcgttttctctttgttcagaattcgttgccaagttcatgagcatccaccggaagagcatgtcgcatgagcccaagattcctgaggtgccgcagtgaaacctggcagagcatgtcctcgtgcggttcggccgtgtcgaaatcccgtttgtg

SEQ ID NO: 4618 - DNA, 586 bp, Zea mays
  misc_feature (512)..(512): n is a, c, g, or t
  misc_feature (514)..(514): n is a, c, g, or t
  misc_feature (529)..(531): n is a, c, g, or t
  misc_feature (533)..(534): n is a, c, g, or t
  misc_feature (558)..(558): n is a, c, g, or t
  misc_feature (574)..(574): n is a, c, g, or t
  misc_feature (576)..(576): n is a, c, g, or t
  misc_feature (578)..(583): n is a, c, g, or t
gtcgaccttggaggttctttgcagggacgttcccaagatcctccaggtaatgattttaggcatacctttcacgtgattaaggcgttctttgtgacgccccgcttccttccctcaggatctgacggatctgagcgccgccaagttgtcgttcatctgtcgcgaggtcgatgtctggggttcgctgtggtccctgaggaccacgcttgccagggctaccgcgcgcctctcccaacagagcgccgaggtggcggaccttcggttgctctgtgtcgatctgggagcagaggcagcagcggcacgcgcagaggcgcagcggcagcagttggagcttggccaggtcatcggcgagcgggaccaatctcggggccgggccgccgaggctgaaagccgggctgaggctcttggagtccagttagccgaggcgtctgctcgggccggagcccttgcagcagacctagccgtggcccaagccgcatcctcggagcagcgtgcccgagccgaaggtatgtctngnctgttttaagatttnnntnngcttcgtcctcaactcgtgttgangtctccgctttggctntncnnnnnncgc

SEQ ID NO: 4619 - DNA, 514 bp, Zea mays
  misc_feature (416)..(416): n is a, c, g, or t
  misc_feature (444)..(444): n is a, c, g, or t
  misc_feature (451)..(451): n is a, c, g, or t
  misc_feature (470)..(474): n is a, c, g, or t
  misc_feature (481)..(481): n is a, c, g, or t
  misc_feature (484)..(485): n is a, c, g, or t
  misc_feature (498)..(498): n is a, c, g, or t
  misc_feature (500)..(504): n is a, c, g, or t
aaccccacctcatctcagggcgtcaagcagagacgcgcacgttttcccacacgcgatatcccagtggcaggcgctgccccgctcgtggcactgttccaacaagaggaacagcagcgaccgagccatggacgactctgcgaactacaagaactcgaaccatgactactggcaggtacccaagcacgaggacagctacagcatatcgaaatgcgtccagatcctgaacggcatggcggagctgtcgcaggtggagaaatcggttgcccccgacgtcttcctgcagccgggcaaccgggaaattttcgtctccctcagcggcgacgtgcgcgccatgtggctgaagcgcaagattcagcacctggcttaaattttccttgtgctgtgccgttcttccgagtggagtacaatctaaaaantaagattcaccttccctgtacgaacacncacctanagctcttcattttattggnnnnnactcaancanntgtgtaacacttntnnnnnaacatgaaag

SEQ ID NO: 4620 - DNA, 402 bp, Zea mays
tgtacatttatttcctgctggaagactgcttctctttccctcctgtagaaaccaacaacaatggcagatgccatcatctccgccatcatcggtgatgtggtcagtagagcggtttctcttctcattgggcgtttcatcagtaacaaccaggagagcgctgaggacaagctgcaaaggatgaggcgtctggtcatcagaatccacagcgtggtagaggaagcaaaagggcggcagatctcaaaccacggcaccctccagtggctctccgatctcatcgacggcgactaccagggctgctatttgctcgactccgtcgggtgcggaggtgaagctgacagagatgacgatggtaaggcaatcccccaagtttctaccttgtccttgtttaatccagcaaaaaaa

SEQ ID NO: 4621 - DNA, 415 bp, Zea mays
  misc_feature (407)..(409): n is a, c, g, or t
tcaatccagtttctttcggaggagctggagagcatccatggcgccctccgcaaggtggctgccgtgccaccggaccagctggatgagcaggtcaagatctgggctcgccaagtcagagaggcatcgtacgacatggaggacatcctagacaccttcctcgttcgcgtagaggggcgccctgagcccagtggtgaccaaggaaggctcaaaggcgctgtgaagaggatgggcaagctgttcgtagatgccaaggctcgccgcgacatcgcaagcgccattgaggccatcaaggggcagctacagcaggtgtccgagcggcgtgataggtgcaaagtcgatgatattgtggccaagcttgccgcaagctcaacaattgatcctcgtctcgaggccatgtacagagaggnnnacacaa

SEQ ID NO: 4622 - DNA, 737 bp, Zea mays
ttgacagagaagaagccaccacctcaatattcaagagtagtaggtgtaggacttcctggggagctgtggaagatgattggtgaatgtttgcagttccgagcttcaagaagaccatccttccaggacatgctgaaaattttccttcgacaccttctggacataccacggagcccacctgctagtcctgagaagtaattccatctgattttgtattacttttacgctaaaacatgatacatggaagcttaaagctttggagaacctttacctgaaaatgtagaagtattatcgatcaaattatcttcgagctaaccattcctgaagattcctttacttggtggtgtaccagcaaatgttgaaatgtcttcgagctaaccgttcttgaaacatacttgcatattgttttccccgacttaatttttgacctagctacttgcttatgcagtgatttcgcaaatgaaaacttgcccaatggcatggaacctccaacaacctccatcctagagatggttcgttataatccaaatgccttgcatcatcttgtatgcgaaggagatgctgctggtgttaggtttatctctggcaactcttgtatagttgcatgtatatcatatactttttcacactaagccttttgcaaataccagggatctacttgcgaaggttgcatcagagagaaatggtagtttcatccgttctctcttagaagcacaaaatacagatggactcactgccct

SEQ ID NO: 4623 - DNA, 684 bp, Zea mays
  misc_feature (416)..(416): n is a, c, g, or t
  misc_feature (445)..(453): n is a, c, g, or t
  misc_feature (456)..(461): n is a, c, g, or t
  misc_feature (475)..(475): n is a, c, g, or t
  misc_feature (486)..(488): n is a, c, g, or t
  misc_feature (490)..(495): n is a, c, g, or t
  misc_feature (499)..(509): n is a, c, g, or t
  misc_feature (512)..(512): n is a, c, g, or t
  misc_feature (517)..(523): n is a, c, g, or t
  misc_feature (532)..(540): n is a, c, g, or t
  misc_feature (542)..(542): n is a, c, g, or t
  misc_feature (546)..(557): n is a, c, g, or t
  misc_feature (577)..(588): n is a, c, g, or t
  misc_feature (593)..(604): n is a, c, g, or t
  misc_feature (610)..(610): n is a, c, g, or t
  misc_feature (613)..(616): n is a, c, g, or t
  misc_feature (625)..(626): n is a, c, g, or t
  misc_feature (629)..(637): n is a, c, g, or t
  misc_feature (639)..(641): n is a, c, g, or t
  misc_feature (645)..(645): n is a, c, g, or t
  misc_feature (647)..(664): n is a, c, g, or t
  misc_feature (670)..(675): n is a, c, g, or t
  misc_feature (677)..(678): n is a, c, g, or t
cttctctcccaattctcagcgggcgatgcaggcgaagaagctgaccctgctgcagacggtggcagctgcgggagtcttctctgccgtctccttttggtaccccctcaatctcccgcccccctgaggattctcgctggttctgagcatcctagatctcccgtgccatgcctcttgtgctgcaggtatggcttcatgtttggaagggagtccgcgcggcgcgagcttggtggcatcatagacgacctccgcagcaacaagcccaccaatacccctgccggtcccgatgctcattcgaagccatagtggggtatggtattctgttgttcctcctttgccgtactaaatctaaatggtggtcaagcttgtcttgtggatcctgctaggctataaaaaaaagaaggccaagcccaacctgnccctgcgagggttcgacgtcatcgagagnnnnnnnnnaannnnnntgaccaaatgaaancccagagaccnnncnnnnnncctnnnnnnnnnnnccntggannnnnnnttctgattnnnnnnnnncnaccnnnnnnnnnnnnttgcaatagacatctcccannnnnnnnnnnnagcannnnnnnnnnnnctctgnatnnnnacctgtacnnatnnnnnnnnngnnntgantnnnnnnnnnnnnnnnnnncccacnnnnnnanngaaaaa

SEQ ID NO: 4624 - DNA, 612 bp, Zea mays
tggctgtagtacccaacccggagagactgcgcgtcggcgacacgggtgccgtgcaggagcagacctacaacgacgaggaccagcagccctcctcccttccccaccgccatatcgtgaaacttcatctccatctctcatagcctcacagtcacaagggtgaggagtggagagacgtcggtgagtttcaccatatggcggtggggaagggaggagggctgctggtcctcgtcgttgtaggtctgctcctgcacggcacccgtgtcgccgacgcgcagtctctccgggttgggtactacagccagacgtgcggcagcgccgagtccatcgtcgccgacgaggtccagaaggcgtcgtacagggataggggcgtcctggccagcctcatccggctgcacttccacgactgcttcgtcaatgtacgtaagagaccgagcaaataaattcccacgcccgccgatcgatttgctcatcaccggaacggcggcatgcacttcatttcagggctgcgacgggtcggtgctgttggaggccagtgaccggcaggcggagaagaacgccaagcccaacctgagcctgcgagggttcgacgtcatcgagaggatcaagcagagg

SEQ ID NO: 4625 - DNA, 775 bp, Zea mays
  misc_feature (771)..(771): n is a, c, g, or t
tgcaccttcatgcactgacaaattatgttcttgaaaaataagattaatggagtagaagttatatttagaagttagaaccattggttggttcgctttgggcttgtgtgttttacattctatctttgaaatcttgtagaagaggaaaaaattgtgagtgagcacccatatctactatattaaaatatgacacagccattaccattccactatattcaaatttctaagcttctatttgatcagtgagcacccatatcttctatgtcgccatgattcttcgatttaagcacatttttttaccgaaacctgacctgctcccgtttgtttcatgtagtgctctgcatacctggtgagtgtttaatcaatctcggtgctgatttgttagttttctttaagaggtatatatggttggatctatttctctgtttagttgtttgtgttttttgtgttagaatagataaaagtgctggtatatcatggccataagaacgattgttttatttagtggaattagaacaaattggttggatcttttactgcttgatcagatgcagatgaatatgtggggtttttaattaatagcaaaaactttcttactgtttgatcagatgaatatgtgggtattaccactaaaaggagaaaaagctcactcgagttgttacttggctgcctttttaaattaatgtggagaactaaacaatgatattgatgacatgttggcactgaaatcttacctatgtttatctcttctagggagttgccgagctttctcancaat

SEQ ID NO: 4626 - DNA, 601 bp, Zea mays
tcaatgcttcatgcagcttctatttgcaccaacttggtattgcaaaaccatgcaacttattagcattctcgtttatgttgctgacactagatggacttgaactaattgacattttcttctggtatcaaagaatgcattacttgatggagctgctgatccagctccagaaatatgggggaaaactacggaggaggaacaaatacatagtggtattggcagctggcctggcattaatatgcctgtaaaacctgccaactccagccttaagctgtatggtggtgcagcttttgagagagtaatgcatgaatttcgctgtgcaacgtattcattggaatgcccacaagtgtcaagggagaaggtactctttagcctgcaacgatgtacacacacaatttattgggagaattgcttatatacttatgtcgctaggttgcgaacatactacttgctcatgctggaagacgcggaagcagtaggttgactgaggcagcagttgcgatagctcgtgcagccgcacgatcatggcttgctcctcttattgataccgcatgtgaccggcttgcatttgtcctacaaaatctggtttgatcttgctatggag

SEQ ID NO: 4627 - DNA, 383 bp, Zea mays
acgttctgcaacggcgcggtgtgaacgtgccgacaatcctcatcgcgagttgaggtggagcagggcgaggtcagcgaggaggtcgagcctagggcaaggagaccgcatcgtcgtcgtggttgaggtcgaccccggctacaacgagcacacggcggtcggggccggaggggagcggtgcggagtacacgcccgtgtagatgcagacccccgatgtggattcatggggttattgctctagaacctgcttgcatatgttccacctggtcttctcgtgcgcgttcgggagagaggtcgtggctgcagcggaactctgatcgagcgcatggccggctccagctccaaaacggtgaataattttcgtaaatgggagaacgaagtgcgta

SEQ ID NO: 4628 - DNA, 537 bp, Zea mays
  misc_feature (184)..(184): n is a, c, g, or t
gtcgtgatgtggaaggaaatgagttgcctcgcctcgtttatgtctcgagagaaaagaggccaggttataaccatcacaagaaggctggtgccatgaatgcactggtaaaatctgtgcactttatgtctttaacaattcttcttgtaacctaatagcagtgcatgattgatgctttgttgttttntgttcataattgataggtccgtgtctctgctgtcttatcaaatgctgcatacctattgaacttggactgtgatcactacatcaacaatagcaaggccataaaagaggctatgtgtttcatgatggatcctttggtggggaagaaagtgtgctatgtacagttccctcagaggtttgatggtattgacaaaaatgatcgatacgctaacaggaacgttgtcttttttgatgtaagattcaacttccctgttcgaacacacaccttaagctcttcattttattgtcgttgtctcatagtttttgtaacacttgcagatcaacatgaaaggtttggacggtattcaaggacccatt

SEQ ID NO: 4629 - DNA, 452 bp, Zea mays
gagctgttgctgagcaacaaaggatgtttgctgaggctcgagcaaggatgaataacggagcccccaagccaaaggagccagaacaagaaccgccacagctaccacaagcacaaccccaacttcagctgcatactgaaccacagcaacccatgcaatctcaagttcagttgcattcgcaaacacaacactacctccaacctcaactgcagctccaccatcagccacaacagctcccacaagtgcagctgcactctcagccgcagctgcaaccccaagtgcatctgcaccctcagccgcagttgcccccacaattgcaggtccatcagcagctgcagcaacccccacaagtgcaggtccaccagcagcccgaagtgcagccccaagaagcgcagttgcaatcatcagcccagcaaacctcccaaccgcaacctcaggcacaactacaatcacaa

SEQ ID NO: 4630 - DNA, 386 bp, Zea mays
atctcccttgactacgccctggggactccaaccctggcgtctccgacgacaaagccaacctcaggtacgacaacctcctggacgcccaggtcgacgccacgcactacgcgatggaggctctgggggttagcactgtggacgcgtatgttggggagagcgggtggccgaccaaaggagttgttgcagggaagataccgccggccgcaaggcgtttgttgggcgccgccgaaggctcggcgaggcggcttctggacacgggtgacgccggctcctcgccggcctccattcccaacgcccgagcttacaacaacaacctcatcaaccgcatgctgtccggccggacgggcaccccgcaccgccctaatgccaacatggacgtgtacata

SEQ ID NO: 4631 - DNA, 621 bp, Zea mays
  misc_feature (615)..(616): n is a, c, g, or t
gggggaacgcttttcaggtccgcattctgatcatatgcctgttctgttgcaactggttctccccatagcatgcatttcaggattagccatagtcgctaacaaaatgaaattttgattgttgtggcattcacaacttgtgagggcctcacaattatgttgctagctgtagtagttcagactgaaacagaatctgacaggtgtaataggattctttgtgccaaaccactgttatgtggcaggtgttaccctgagccttggaaggtcctgaggaaggcgtcgtctgggaactacgtctgcctgcatcaacaagaggagatgccttcgttgaaggaagtggccctcgacatccttccttctgtatagctaggatcttcacttctttggttcatagctgtgctgactggtgctaagttccattacaaggcaatctatcatttcgttgcaatttctcgccctgaaatattcttttgggtagactagaccgtctgagtctcagaagtcagaccaccccgtggggaaagcctcggcaaagtctgacacgtgctcatgctccggctgtccctgccacaaaggcgttcttgtaccagtggaagaccttgtctgaatgtgcaaggnnataaa

SEQ ID NO: 4632 - DNA, 682 bp, Zea mays
ctatggaagctcccagtacggtccaccactctgtcaggtgagaagaagcttaattatattgattaaatataacaactaactggagcaagactaaaggaaataaaacatgttttttttgtgggaaatcccctacattttctaatttctactcatgtaaaactagctactgcaggttgttgtcaatgccatcacttgaatttagctagagagatttatttatttatttatttcttaccagcactgtcgaacctctggctgccagggcgacagtgtcagcacaggacaccgtctgcggacatgcttcctcgagtgcagctttgatctcgtctatgacctcaaaccccctaatggaatccttgttggggatagcgtttttctcgctcacgacttcctcagcgtcatccaaaagaaccgacgcatcgcagccctgcgatagtgcgattagtttcatcgcatgaaccacggccgggacaaaagagacgattgaccaaatagagaacatgagaccgtagtgctgctaacctggacaaagcagtcatggaacaggagcctgagaagggaggcagctacccgtggttccttcgcgatagccttcttcagtatgggcgccaccgtctcgtcagcttgcgggcatgtcaacctgtagtagtctgtagaaagacctgggattggagtacttcca

SEQ ID NO: 4633 - DNA, 477 bp, Zea mays
aagaagcagtacgtgcagtgggcaagaacccaggggcacagcctgaattctgatgacgacttcttcaccgacagcgtgaccaaagggttctacaagaaccatgtcaaggcccgtcgaccacgcactccatagacgcttgatataataaccatctcaagacgcttgatatgatgcaccattctcacaggcagtcctcacgagagtgaacaagatgacgggagtggcgtacaaggacgagcctgccatcttcgcgtgggagctcatgaacgagcctcgctgccagagcgacctctccgggaagacgctgcaggcctggatcacggagatggccagctacgtcaagtccgtggatcccaaccacatggtagagatcgggctcgagggcttctacggcgatcgagtccacgcccgaccgcaagcgccagttcaacccgggagggtacaccgtcggcaccgacttcatctccaacaacctga

SEQ ID NO: 4634 - DNA, 373 bp, Zea mays
atcgccgacgccgtgaaggcggcgcccgagtgcagcgagcaccggacggtgatacacgtcaaggagggacggtatgacgagaacgtcaaggtggggatgaagaagaccaacctgctgttcgtcggggacggcaagggcgtcacagtggtcgccggcaaccgcagcgttgctgacaactataccaccttccggaccgccacctttggtacgtgacgcacgcaaccattcttctccacggagcactagtgattccaagatcgagcttttacaatcatttgcactgatttttttccccaacggaatcgaaaagcttagagcatccttcaaaccagaataatttgtagccaagtaggtttcgtgaagttcgtaaccg

SEQ ID NO: 4635 - DNA, 879 bp, Zea mays
tcctcagctcttcgactaagagcacacatcagtaggcggtgaataatatacctgcaaaacaaatgaacctcactactttcaacagaaacttaatatttgaagatgccagccacaagtccacgaggcttgacaaggagcacatacccaaaatagtatgccttcttagtttcacataattccccaacacgtaacatttccttttgaagtatttcttttgcatatctgaaatagaaaaaatgtaagcatgagtgaaacaacacaaacatagtgatgttatgtcaactctttgcttgacatacttaattctcttttctcgagtgacaccaactgttgcgccatgttttccaatgtagtctagagcaacctatgagcattcaaactaaagcttttaaaagaagaaacataagcctgagctcagctcaaaatgtgccacaacaactgaataaaacagcatgctcaaagcaaacattggttgaagtaaaaaaatgtgttcctccagtcgagcagctgaataagtacctgttgattttgaatgacaaaagcttcctccagggatgggcgtagcaattccatcatttgtgtatcagaaaagtcataacatatatgctccagtatatccttgtcagcaacaaatcctaatgctcgaaatacaatgataatgggaatgtccgcacgaatataaggtagagtagcacagacatattgaccagatgatccctgcagtataaggaacatatcacagatttaacattttataaagtcagtttgcctcactgtggtactacaccccctgacttgtacaagtaagaagcacgcatatgcattgaaaactatttttgaaaacttataagtcactaaccccagagccgcagagccgca

SEQ ID NO: 4636 - DNA, 491 bp, Zea mays
  misc_feature (479)..(481): n is a, c, g, or t
cagcgggagacctgcgaattatcaaccctgattccatggagagatttaattgcatcaagctgcaccagcatcctaacacaaaggtcagttagttattctgccgccatgaagctttactttgttttttttttctgcacatgttgcctttagtcagtactcagtactgatcgatgggtttggtacctgcaggagggcttactctgtggccgcggccatggcgaaggaagccgcacggagggccgacgggaacaaggctgcggctgcggtgaccatgaccaagcgcgtgatgggcaacaaggaagtcaacaccgctgccgctgcggcagagcagaagaaggcatggctgccggaccctgtgaccggctactatcgcccagcgggtagccccagggaggtggacgcggcggagctgcgcgccaagctgctgactgattaatcaaacagttgttttgtcaagctcgagcatgggtcgttgtctnnnctaactaaaa

SEQ ID NO: 4637 - DNA, 361 bp, Zea mays
gcgcagacaccgcggatggcgaggtgccggaggaggcgtcaaggagagatgtattgtccgccgctggtgagcgtggggttagttactacgaccccaagcccggggacttcgtcgccggcgtcgtggtccggagtgacgggaggacgctcgacgtcgacatcggttccagcggcgaaccagcgctgatgctggccaaggagtcggcgccggtgcccgcggaggagttcgggtacctagcgtgcgacgtcgcgtccaagtgtgcggcggagtttgcagcggaagggcgggtcggcgtcgtggtcaggcaattcaggggaggaggagagggggacggggaggcgatcatcgggaggaatgggaa

SEQ ID NO: 4638 - DNA, 1083 bp, Zea mays
  misc_feature (1019)..(1025): n is a, c, g, or t
  misc_feature (1070)..(1071): n is a, c, g, or t
  misc_feature (1073)..(1073): n is a, c, g, or t
  misc_feature (1076)..(1077): n is a, c, g, or t
  misc_feature (1079)..(1079): n is a, c, g, or t
cagtgattcaatgatagacatgatgattgggctttcgaggaggtacttgtggaactggcatggttccataattctatactcatcttcctatgtctaggagagcatgccatctgccttttatttattaatttggcacagtcattggatttcattctgaaagtgtcacaggattatcattaataaggtttctttcttctcatttattttttcgctaaaatcattcaatgcagaaacttgtaacagtagacttatggttcttgagtacacgtgcaagtgcaactctgatgttttaaaacctaaaagggtatgcctacaaaggaaatttgttcttttaacatttaaaattgatacctatgttgcctagggatgctacctcttgaaaaggatatctatgcataagaaggaagtttattcttgtaacacctaaaattgatggatgtgttgcctaacaatgctaactcttgaagaatgacctccaatttcctgaactggagcctcttcttgttatgctggaaggcaaatcttggcatttctctttgttgccagttcttttgttggaaatgaacattccatccacctaggtagtcttatagaaatttcttttatcagggaccacactctgactttactgggccaaattgtgggagtacagcatgtgtagcattagtgagaaataggcaactcgttgtggcaaatgctggtgactcccgctgcgtcatctcaaggaatggccaggtcagttgttactcctaaaagaaaacaggagggattaccctctagtggcatataaagtttgtgggattgtctcattttgtacttcttccacataaaacaggcatacaatttgtcaagagaccataaaccagagcttgaggcagagagagaaaggatacaaagtgctgggggttacattaaaatggggcatgtaaatggaagtttaaacttgtcaagagctattggtatcatttttttacttgcttctttttgttcatacctctcaccttaactgatgtcttgcnnnnnnnaaatacctttctaggagacatggagcttaaacaaaacaagttctnncnccnntnagca

SEQ ID NO: 4639 - DNA, 393 bp, Zea mays
cagcaagtgtctggtggtgcgcgggtgggcgccccaggtggccatcctggcccatccggccattggcggcttcgtgacgcactgtggatggggctccatcatggaggctgttgcagccggtgtgcccatggcaacctggccctttttcgcagagcaatttatcaacgagcagctcatcgtgcacgtgcttggcgttggggtgtccgtcggtgtgacgaagccaacagaaaatgttttgaatgctactactgacgccgccggtggcagccaaggggaggctgatgccgaggtggggatggaacaggtgaaaaaagccatggatacgctgatggatcaagggcctaaaggggaggagaggaggaggaaggcccatgagctgaaactgaaggcgag

SEQ ID NO: 4640 - DNA, 687 bp, Zea mays
  misc_feature (440)..(445): n is a, c, g, or t
  misc_feature (447)..(447): n is a, c, g, or t
  misc_feature (469)..(472): n is a, c, g, or t
  misc_feature (476)..(478): n is a, c, g, or t
  misc_feature (481)..(487): n is a, c, g, or t
  misc_feature (490)..(494): n is a, c, g, or t
  misc_feature (496)..(496): n is a, c, g, or t
  misc_feature (498)..(498): n is a, c, g, or t
  misc_feature (502)..(504): n is a, c, g, or t
aagtaccaccaccagctttccgtagctcaaacgacgcaggccagccggccgctgccgagcaggctccatgctctggggtctgggaagcacgcacctcggcgtgcatccgaggatggatgtggataggaggagggtctgcactcactgccctcccaccgcccggtggcaactgtcagctgaccaactgtcgtgcttacgtgcgtgatttccgtgggggccttttcgcgaggcccgggcgctcggtgcatgagcatcggcacatgccggcagtaatgcgcatatggtccggagcagcagggacgacagcgaggcggctttcagtggcctgcgtctgcgtgtgcgtgtgcccccacgcctctgcactgctgcttctcatagcagtgtcgggagactacagtgaccttgctgccgtttcttaggtcgtgtactctcccatccannnnnnanagacttcgatcatccattgacnnnntaannnggnnnnnnnctnnnnnanangaannnaacacattttctactgaaagcctgaatgtgcaagttcaaatcttcatagttccaagatagacatacgacaaaaaataataaaatatctccaaaaaaacataacaggacttagtaagactgtacttcctctcgaacggggccaaactaggatattccaacatcttcaggagccacaggggatcc

SEQ ID NO: 4641 - DNA, 425 bp, Zea mays
  misc_feature (418)..(418): n is a, c, g, or t
tgatcgaagtgctctgatttcacaaaacaatcgacttcacatgttagattatttgatctgtgctttgccgatactagcgaaccaggtctgagcaacaagcagatcggagcactcagatttgagattaccactcagccctaaccaataaatcatcactaacaaacttgaacattttccagggcagcggacaccagtttcacctagcggtggtggctggaggggagtggtggagaagaccagatctaggacgcggtggcggacgcttgccttatcctaactccgatgacgctgatgctccggctgaggttcctcgacggcgacgatggtgcttgaggtggcggtggtccagacatcgtcgatgacggcagtagatctaggacgacgcccgtcaacgaggaccatgactcggctgtccaangagagta

SEQ ID NO: 4642 - DNA, 542 bp, Zea mays
  misc_feature (409)..(410): n is a, c, g, or t
  misc_feature (414)..(415): n is a, c, g, or t
  misc_feature (419)..(419): n is a, c, g, or t
  misc_feature (421)..(421): n is a, c, g, or t
  misc_feature (430)..(430): n is a, c, g, or t
  misc_feature (432)..(433): n is a, c, g, or t
  misc_feature (437)..(438): n is a, c, g, or t
  misc_feature (455)..(455): n is a, c, g, or t
  misc_feature (469)..(469): n is a, c, g, or t
  misc_feature (497)..(497): n is a, c, g, or t
  misc_feature (515)..(515): n is a, c, g, or t
  misc_feature (517)..(517): n is a, c, g, or t
gctatattttctgctggcagcgccttacgtagacgccccgacacgatcgtttctttgcttttgagacgattcgtttggctggaactggaagggcctcaaggttctacgtacttccatcccaatcctactgctgatacatatggccaatctcttggttttttttcttcttctcaacagcagctacggcagctccagccatggcgccgcataaatccgagggttcgatgagctcagggtcagggccctccagcagcagcacgtccgctggctcgtccatgagcagcatcgccacgacgaccggtcgaagcggcggcagcagcagcaccagcaccagcagcggatcgaggcccctccgcgccgccgcagcctcgtaccgggaggaagaagaagaggaggaggaggagaaacnnttgnnactncnaactctacntnntgtnngaactactgacttatanacacatgaattccnatcaacattttctggctgacatgacaanagcattcatcatcctcgntntgtaaagctgaatctatggatctga

SEQ ID NO: 4643 - DNA, 526 bp, Zea mays
tcgccgctgcgtggccggcttgtcggtcatcgagcgcgtcatccactcccaggccttcaagaacttcacgtaccccgacttctccatggagacgctgctcaacatgtcgacggggttccccgtcaacctgctgccccggcacgacaacgactccacgtcgcttgagatgttctgcaaggacaccgtcatgaccatctggcactaccacggtggctgccaggtcggcagggtcgtcgacgctgaataccgagtgctcggcatcgacgcgctgcgcgtcattgacggctccactttcaacgcctcgccaggaaccaacccgcaggcaaccgtcatgatgctcggcaggtaatccctccctgcttacacctgtgatgttttatcagcgcactttgagcacttctccaggacaggccctagtggtactgattcctgtctccaaagttgcccttttaggtcgaatcctaccaatcttccaatggatgattgtgtctctaacttggcaggtatatgggagtcagaatcacaa

SEQ ID NO: 4644 - DNA, 459 bp, Zea mays
tcaccgccgccattgcaggagaggacaatccacaggacgacgccgccgccgaggagcaggaggagagcgacgaggaggtggaggaggaagcgaaggtcggagcgcagccagcggcggaagagctcctgcccaacatcgacgagcaaggagaagacgaggagccggcggcatccctcgacgacgtcttgccgtatcttctgtaccactacttcggctaccgcggcgcgtacggccccgctacacgatctgggtacggctactgctactacgagtacggccccgctacacgatctgggtacggctactgctactacgaattcatcgcattttgagcatttctcctggtcatgtcctagtggtactgattcctgtctccaaagttgcccttttaggtcgaatcctaccaatcttccaatggatgattgtgtctctaacttggcaggtatatgggagtcagaa

SEQ ID NO: 4645 - DNA, 995 bp, Zea mays
  misc_feature (393)..(399): n is a, c, g, or t
  misc_feature (407)..(407): n is a, c, g, or t
  misc_feature (410)..(410): n is a, c, g, or t
  misc_feature (430)..(437): n is a, c, g, or t
  misc_feature (440)..(442): n is a, c, g, or t
  misc_feature (448)..(451): n is a, c, g, or t
  misc_feature (476)..(478): n is a, c, g, or t
  misc_feature (490)..(494): n is a, c, g, or t
  misc_feature (518)..(532): n is a, c, g, or t
  misc_feature (536)..(536): n is a, c, g, or t
  misc_feature (549)..(554): n is a, c, g, or t
  misc_feature (589)..(594): n is a, c, g, or t
  misc_feature (642)..(647): n is a, c, g, or t
  misc_feature (649)..(651): n is a, c, g, or t
  misc_feature (658)..(666): n is a, c, g, or t
  misc_feature (671)..(672): n is a, c, g, or t
  misc_feature (676)..(677): n is a, c, g, or t
  misc_feature (680)..(690): n is a, c, g, or t
  misc_feature (697)..(709): n is a, c, g, or t
  misc_feature (712)..(720): n is a, c, g, or t
  misc_feature (734)..(734): n is a, c, g, or t
  misc_feature (751)..(755): n is a, c, g, or t
  misc_feature (758)..(770): n is a, c, g, or t
  misc_feature (778)..(784): n is a, c, g, or t
  misc_feature (786)..(786): n is a, c, g, or t
  misc_feature (790)..(803): n is a, c, g, or t
  misc_feature (808)..(810): n is a, c, g, or t
  misc_feature (812)..(814): n is a, c, g, or t
  misc_feature (816)..(819): n is a, c, g, or t
  misc_feature (821)..(823): n is a, c, g, or t
  misc_feature (826)..(828): n is a, c, g, or t
  misc_feature (838)..(842): n is a, c, g, or t
  misc_feature (844)..(850): n is a, c, g, or t
  misc_feature (853)..(856): n is a, c, g, or t
  misc_feature (860)..(905): n is a, c, g, or t
  misc_feature (907)..(907): n is a, c, g, or t
  misc_feature (910)..(912): n is a, c, g, or t
  misc_feature (920)..(922): n is a, c, g, or t
  misc_feature (924)..(947): n is a, c, g, or t
  misc_feature (949)..(949): n is a, c, g, or t
  misc_feature (951)..(956): n is a, c, g, or t
  misc_feature (965)..(986): n is a, c, g, or t
  misc_feature (988)..(990): n is a, c, g, or t
tctgctttggcagaaggctgcggctcagggtgccgccgccaaccacgccgggtccgatgctctgacggcaaccctgagccccggcaggaagggcagcggtggattcaaggctactgatccgagccatggcaggaaaggcggcggcggctggaaggctggactgaacaagttcctcctcagcttcagcatcaaggtgtgatctatgcgtggacgagagaaggggggcgtttcttggtgtcgaggcaccgcacaacaataaaaatgcattgcattggtttgtctgttttttcaattaattggtattgtttgttgccgccagtgagatggcgaagtgtaattcgtcatgcgaatccgagtcgagtcgaggcaatgtgtgattcatcgtatgtttgnnnnnnngtcgtatncanctgattaattgaaaaaaccnnnnnnnncannncagtgnnnntttattgttgtgcggtgtctcgacnnnaaaaaaaccccnnnnncggcacgcatagatcaaagccttnnnnnnnnnnnnnnngaangaacttgttcagnnnnnntcggcgcgccgcctttcctgccatggctcggatcnnnnnnctttgaatccccgctgcccttcctgcccggggctcagggttgccgtcnnnnnnannnaaccccnnnnnnnnnggcgnncgcnnccnnnnnnnnnnncctttcnnnnnnnnnnnnnaannnnnnnnncccctttgaaactngatcctctccctcttcnnnnnaannnnnnnnnnnnncgctgccnnnnnnncnccannnnnnnnnnnnnnctacnnncnnncnnnncnnnccnnnaaaactcctnnnnnannnnnnntcnnnncaannnnnnnnnnnnnnnnnnnnnnnnnnnnnnnnnnnnnnnnnnnnnnanacnnncttccggnnnannnnnnnnnnnnnnnnnnnnnnnncncnnnnnncttctacgnnnnnnnnnnnnnnnnnnnnnncnnncttct

SEQ ID NO: 4646 - DNA, 416 bp, Zea mays
  misc_feature (406)..(408): n is a, c, g, or t
acttcccgcatggtgcagcaccccttcggcgacatcccaagccagactcccaagcaattcctatactctggtagcccacagcgcctctgccatccataccagtcagcttcggacgcccacgtcgcgccgcagcgtcactacaccgtgaggtctcagtttcagtctcactcaccggatgctgggtctgaagaccgtgagacgcacagcaggcagtacacgctggactcctcttcggcttccggttgctcagggcacggttctccctcctgtcagagtgtccatgccgggagtggcagccctgtgtctcactctcatgacgacagccactccggctccaccaatggcaacggatcgcctgcgagcgcgtcgtgtgtcaccgaggatcctactgacctcaagcagaaannnaaggatca

SEQ ID NO: 4647 - DNA, 513 bp, Zea mays
ggtttctgctggagtgcttgcgttccttttgcttcaacaaataataatggggtgggccagtgcaggaaatggggagagtgttgtttaaatttaatcaaggtgtaacatggggcccgcctattgttattccaggaaattttggaggtggagatcgaggacgagaaacaattggatgatagtcccgctgctttctgacttctgaggtaccgcacgatcaccaatttagttcaatgctgtgtgtgattcatcagtatgtgccaattgtgaggttcaggagaagggacacgttttcagttttcagaattattagtactggttcagggagaattcttatcggaggctacctttcgtacacagttaagtatggtactccttaccctgctaatgtcaaaactacagacttatgaacacatgaattctgctttagttcaattaacattttctggctgacatgacaagagcattcatcatcctcgatgtgtaaagctgaatctatggatctgagtctgaagg

SEQ ID NO: 4648 - DNA, 917 bp, Zea mays
gtcctcatcatgacatgggtctatggttcacagctcccacttggtttccagtgctatttgatcaaaggtccttggtgaggtcctcgatctcaactaaggcccagttaaattcattgaactctggtgagttaaatggttggaaggcatcgtgcatgacatctacaatgtcggcacaacgctacagctctcaccaaattagccagggcttttcgaagcatttcgttctccgaatccatggtctacatgaaacagattttgaagtaagtgatcaagtcctaataagttcaatcatcaacatcgcacagggtttgaactagctacaaaattgttgtcaactaaatttaagtcagccattaaacacatccagtacgtcaacaacaaagtgaactttgtaaaatgttagaggtgaacatttaaataactcaaagtatatgaagtgtatgaggacagcagccacaaaacaaattcaagaactccaattaccaggtctgaatttctgcttgcatcctcggtaaactgaattttgtggactgtttacactaatgtgagattgaacacactaatttcatctcatcattgcaagagatcatagaaacacacactaatttcatctcaccactgcaacacatgaagcatgacaaatgattttcataggctaaataacataacagttcgttcttgtctgctttccaatctttgtattcatttcaaaggttagaactaaagtaatcagtagatccaaaaaatgaatcaacaaacaaagagtcgatctggggcaagcgcaaaatattgtgtgcagatcaaccctaaactttggatccacatacaaatacgaagtattttaccttgctcgggtcggatctagagcggacgaccgaatcaacgacgatgaagatacgtgcgacggttgcgcttcc

SEQ ID NO: 4649 - DNA, 385 bp, Zea mays
tagtagtagtcgaccatgagatgccgaaccagggatcccagcaaaggaggatagtcagcttcattggtggcattgacctttgtgatggaagatatgatacccagtaccactccttgttcaggacgcttgacactgtccatcacgatgacttccaccagccgaactttgagggtggatcaatcaagaaaggtggcccaagggagccatggcatgatatccactcacggttggaagggccaatcgcttgggatgttctttacaactttgagcagagatggagaaagcagggtggtaaggacctccttgtgcgtctcagggatcttcctgacattatcatccccccttctcctgtgatgttcccggaggacagagagacatggaatgt

SEQ ID NO: 4650 - DNA, 386 bp, Zea mays
  misc_feature (377)..(377): n is a, c, g, or t
ggtctacccttaccatagttgtccataacctgaaatcacatgaaaataataaaacacccggtgatggaattctcacaattaccatgcatgataatagttccttctatggccgtagttagctacttagttctactaactttaagttcgagtacatagcctatgtaacaaaggtgatatgataaacaaccaacttctgcaaagatcaagaaagcatagatgtaatgctccaagatggatcaccttttttcaaagaccgaaaaaggaaaaaaaacaaagtatattggtgcaaagaacataataaaggtgcgctaagatacgcataatcgcacagtatgttctaggatcaatgcacttcaatagtcatgttaacgcatcanatgcactaa

SEQ ID NO: 4651 - DNA, 476 bp, Zea mays
  misc_feature (466)..(469): n is a, c, g, or t
caggagatgactcccaagatttcagactttggcatggcaagaatatttggcaacgaagagacggaaattaacaccttaaaagtggttggcacatagtaagttgtgatagattaagggatgcagcgctcatcgtacacatacattttgcggtactaatcaaatccatgtgcctcttttacatacgacagtggttacatgtctccggagtacgcaatggatgggatcttctctgtcaagtcggacgtgttcagctatggagtactattgctggagatcgttagtggcaggaggaacaggggagtgtattccagttcaaacaaccaaagccttctaggccatgtaagcgaaatcttgcatcatgtagtgaatagaataccagctgtatctctcattaaaaacttctgaaacctggcaaccatttttttccccctgcactgcaggcatggagcttgtggaacgaggagannnncatagag

SEQ ID NO: 4652 - DNA, 387 bp, Zea mays
ggccctatgctccaagaaatgcaaccgcgttgatctcctccgcagaacgtttctgtagccaagggtagctctgcaaacgcgtccgcttgggttttctgcgtcgtaggctcgtagccctaatcatgctgtccgctgtgcaagtgtacatgtatgttcgcagctgggtcttctcggctgcggacaggcggtgcgtagtagattggctttgttgtaggcttaacgccatttttgtgtgtgtggctgtgtgcacatggcaaaaacaaacaaacaaaaatgtttatgcaccggagcagattctatttctactccactctcgtaaaatagttgactttataggattcaaattttgttctaaattaatggttattctcacctctcaatgcaaaa

SEQ ID NO: 4653 - DNA, 805 bp, Zea mays
  misc_feature (14)..(15): n is a, c, g, or t
  misc_feature (497)..(572): n is a, c, g, or t
  misc_feature (575)..(595): n is a, c, g, or t
  misc_feature (597)..(600): n is a, c, g, or t
  misc_feature (603)..(617): n is a, c, g, or t
  misc_feature (619)..(636): n is a, c, g, or t
  misc_feature (638)..(638): n is a, c, g, or t
  misc_feature (642)..(689): n is a, c, g, or t
  misc_feature (691)..(697): n is a, c, g, or t
  misc_feature (699)..(725): n is a, c, g, or t
  misc_feature (727)..(728): n is a, c, g, or t
  misc_feature (730)..(743): n is a, c, g, or t
  misc_feature (746)..(757): n is a, c, g, or t
  misc_feature (759)..(768): n is a, c, g, or t
  misc_feature (771)..(775): n is a, c, g, or t
  misc_feature (782)..(792): n is a, c, g, or t
  misc_feature (798)..(802): n is a, c, g, or t
cgcgattgctccannggctcggcggcaatggaggcaccacctgacccggtcgtcccatcctgctcgacgagatcgtcggcgacatccacggtgtggttccagattttcctttgctggctgccagggctatcaatgcagctcagcgagctagccccactgccagcttagttgtcgtgacagccattggggctgcacgccgtcagtggggtgaaggcgacagctgacgagatgttggccgaagcggagaaggcaaatgtcctagctgcaaaaaaaattgatcgcctgcttcgtcgttgacctcccatgatgtaaggttgaatcagttagtgttcatgtctaaaatttgatttttgtttccaattgttttgctgtgatgaattaaattgtacttgtttcatgtataagtataactaattgtagaaacctgcaacatatgttaacaggttggtttatgctatgactttctgaaggagaagatgaagaacatgtcgacgaannnnnnnnnnnnnnnnnnnnnnnnnnnnnnnnnnnnnnnnnnnnnnnnnnnnnnnnnnnnnnnnnnnnnnnnnnnnggnnnnnnnnnnnnnnnnnnnnngnnnnggnnnnnnnnnnnnnnngnnnnnnnnnnnnnnnnnngngggnnnnnnnnnnnnnnnnnnnnnnnnnnnnnnnnnnnnnnnnnnnnnnnngnnnnnnngnnnnnnnnnnnnnnnnnnnnnnnnnnngnngnnnnnnnnnnnnnnggnnnnnnnnnnnncnnnnnnnnnncgnnnnncccccgnnnnnnnnnnncgggcnnnnncgg

SEQ ID NO: 4654 - DNA, 520 bp, Zea mays
atggtcgaagcccctgccgccgcgctgccacgacatcgcacaccgggtgacgccgttcctgcaccggcttgtcctggagcacgggaagacgagcatgtcctggttcggctccacccccagggtgaccatcgtcgaccctgcgctgggcgctggccaaggacgtgctgtccagcaagttcgggcacttggagaagctcaacttcccggcgctggccaaggtgatgggcgacggcctggcgagccacgagggtgcgagatgggccaagcacaggaggatcctcggccctgcgttccagcttgagaagctcaaggtacacacagaatataatgattgttgtacttatacattattgcgtagagttgatcgtttggatggacctaattggcgcgagatgtgcagcgcatgctgccagcgttctctgcgtgctgccaagagctggtgagtaggtgggcggagtgcctcggcccggacggttcctgcgagctggatgtctggcccgagctgcagaacctcactgga

SEQ ID NO: 4655 - DNA, 404 bp, Zea mays
  misc_feature (396)..(397): n is a, c, g, or t
aaagattaggcagtatttttcagaaccaatcaatttcagatgggcagacactagtgtccatgagtagaattttcgtgctcggtttctttagccctggagcttcgagcaagcgatatgttggtatatggcacaacgatgtttcagaaagaagagctgttgtatgggttgccaacaggaacgatccattacaagatacttctggcatacttaagtttgataacagtagcaatctgatcattttagatgggaggggcaactcattcacagtggcttatggacggggagtgcaagatgtggaggctgcgatgctggagaacggcaattttgtcttaaggagcatcacgaaccaagctaagatcatatggcagagctttgactctcctactgatacatggnnccctgga

SEQ ID NO: 4656 - DNA, 375 bp, Zea mays
ctcccacgacgcgagggcggtccgggtggatcccggctgacctcaacgaggggcacctcgacaagttctacttcctgctcgccgtgctggccgtcgcggacttcgcggtgtacctcgtatgcgcgagccgctacgggagcggcaaagtggacgggaggagcagcgacgacgaggaggagggagcggccggtcaggtgacatccccggcttacgcatgaccatcaccggccgcccggccggcgggcatcgtacgtatgttgttcttgtcttcttgaggtggaggctggcaggctgcaaatctcgagggccattggttatttggttgacggagttcttccattgacgacgatagcacaagcatggggcgagcatgga

SEQ ID NO: 4657 - DNA, 494 bp, Zea mays
gcctaaattacacatgtgggaaacaggaataatgcgtattaccagacatccacaggtgattagtctataaaatatgtagaatgtgttctctatgattgcattgcagtttcatatgaccacttacacacttctgatccacaattatcatgtagatggttggtcaggtaatttggtgccttgctcatacactatggattggcaactcagttgccgtagcggcctctgtcggacttatcagccaccatctctttggtgcttggaatggtgacaggaggctgttgtcacgctatggtgaagccttcgaagtactgaagaagagaacaagtgttatgcccttcgctgcgatcatcgatggacggcagaaactgcccaaagattatcacaaggagttctttcggttaccatatgtagcaatcacaatgttaaccttgggtgcatactttgctcatccattgatgcaagcatccagctaccaacttccctgggtagtgcta

SEQ ID NO: 4658 - DNA, 471 bp, Zea mays
  misc_feature (388)..(389): n is a, c, g, or t
  misc_feature (393)..(398): n is a, c, g, or t
gagtgcagttggtggcgagttgagtgatgaggaggaggttgaggtctctccctctcctctgggcgaggaggtggcagaggtggcagaaccacaggataaggtagcccacgtttctgaagctaatggtgaattgggtgatgggaaagaagcgagtgatgatgtggttgctctgggaggtggagaagccactaacaaggatgctgttggtgatgatgtggtggctctgggaggtgaagaaaccttagaagaatcgacaaacaaggatgctgatggtgatgattctctgggaggtggagaagcttcagaagaatcggctaacaaggatgctgatggtgatgatgtggtggctcagggaggtgaagaagccctagaagaatcgaccagaaanngatnnnnnnggtgatgattctctgggaggtggataagcttcagaagaatcggctaacaaggatgctgatggtgatgatgtgg

SEQ ID NO: 4659 - DNA, 1504 bp, Zea mays
  misc_feature (394)..(394): n is a, c, g, or t
  misc_feature (401)..(401): n is a, c, g, or t
  misc_feature (413)..(413): n is a, c, g, or t
  misc_feature (415)..(420): n is a, c, g, or t
  misc_feature (441)..(444): n is a, c, g, or t
  misc_feature (467)..(473): n is a, c, g, or t
  misc_feature (477)..(480): n is a, c, g, or t
  misc_feature (484)..(484): n is a, c, g, or t
  misc_feature (488)..(489): n is a, c, g, or t
  misc_feature (493)..(527): n is a, c, g, or t
  misc_feature (533)..(535): n is a, c, g, or t
  misc_feature (538)..(541): n is a, c, g, or t
  misc_feature (551)..(555): n is a, c, g, or t
  misc_feature (562)..(573): n is a, c, g, or t
  misc_feature (576)..(583): n is a, c, g, or t
  misc_feature (586)..(589): n is a, c, g, or t
  misc_feature (591)..(621): n is a, c, g, or t
  misc_feature (623)..(630): n is a, c, g, or t
  misc_feature (633)..(634): n is a, c, g, or t
  misc_feature (645)..(646): n is a, c, g, or t
  misc_feature (650)..(660): n is a, c, g, or t
  misc_feature (662)..(673): n is a, c, g, or t
  misc_feature (681)..(687): n is a, c, g, or t
  misc_feature (694)..(698): n is a, c, g, or t
  misc_feature (702)..(723): n is a, c, g, or t
  misc_feature (727)..(733): n is a, c, g, or t
  misc_feature (735)..(741): n is a, c, g, or t
  misc_feature (745)..(747): n is a, c, g, or t
  misc_feature (750)..(755): n is a, c, g, or t
  misc_feature (760)..(765): n is a, c, g, or t
  misc_feature (767)..(773): n is a, c, g, or t
  misc_feature (775)..(779): n is a, c, g, or t
  misc_feature (785)..(787): n is a, c, g, or t
  misc_feature (789)..(789): n is a, c, g, or t
  misc_feature (797)..(800): n is a, c, g, or t
  misc_feature (802)..(815): n is a, c, g, or t
  misc_feature (818)..(820): n is a, c, g, or t
  misc_feature (822)..(828): n is a, c, g, or t
  misc_feature (832)..(833): n is a, c, g, or t
  misc_feature (835)..(836): n is a, c, g, or t
  misc_feature (838)..(847): n is a, c, g, or t
  misc_feature (849)..(849): n is a, c, g, or t
  misc_feature (854)..(871): n is a, c, g, or t
  misc_feature (874)..(878): n is a, c, g, or t
  misc_feature (882)..(886): n is a, c, g, or t
  misc_feature (888)..(900): n is a, c, g, or t
  misc_feature (904)..(904): n is a, c, g, or t
  misc_feature (906)..(908): n is a, c, g, or t
  misc_feature (910)..(910): n is a, c, g, or t
  misc_feature (912)..(918): n is a, c, g, or t
  misc_feature (920)..(920): n is a, c, g, or t
  misc_feature (922)..(924): n is a, c, g, or t
  misc_feature (928)..(929): n is a, c, g, or t
  misc_feature (931)..(935): n is a, c, g, or t
  misc_feature (940)..(944): n is a, c, g, or t
  misc_feature (946)..(950): n is a, c, g, or t
  misc_feature (952)..(976): n is a, c, g, or t
  misc_feature (979)..(992): n is a, c, g, or t
  misc_feature (994)..(1004): n is a, c, g, or t
  misc_feature (1007)..(1009): n is a, c, g, or t
  misc_feature (1011)..(1012): n is a, c, g, or t
  misc_feature (1014)..(1014): n is a, c, g, or t
  misc_feature (1016)..(1017): n is a, c, g, or t
  misc_feature (1024)..(1025): n is a, c, g, or t
  misc_feature (1028)..(1048): n is a, c, g, or t
  misc_feature (1050)..(1059): n is a, c, g, or t
  misc_feature (1064)..(1072): n is a, c, g, or t
  misc_feature (1074)..(1074): n is a, c, g, or t
  misc_feature (1078)..(1078): n is a, c, g, or t
  misc_feature (1083)..(1092): n is a, c, g, or t
  misc_feature (1095)..(1120): n is a, c, g, or t
  misc_feature (1122)..(1123): n is a, c, g, or t
  misc_feature (1126)..(1132): n is a, c, g, or t
  misc_feature (1135)..(1136): n is a, c, g, or t
  misc_feature (1140)..(1146): n is a, c, g, or t
  misc_feature (1148)..(1150): n is a, c, g, or t
  misc_feature (1153)..(1162): n is a, c, g, or t
  misc_feature (1165)..(1175): n is a, c, g, or t
  misc_feature (1177)..(1181): n is a, c, g, or t
  misc_feature (1184)..(1185): n is a, c, g, or t
  misc_feature (1190)..(1194): n is a, c, g, or t
  misc_feature (1196)..(1203): n is a, c, g, or t
  misc_feature (1211)..(1211): n is a, c, g, or t
  misc_feature (1214)..(1221): n is a, c, g, or t
  misc_feature (1223)..(1226): n is a, c, g, or t
  misc_feature (1228)..(1235): n is a, c, g, or t
  misc_feature (1237)..(1257): n is a, c, g, or t
  misc_feature (1264)..(1276): n is a, c, g, or t
  misc_feature (1281)..(1281): n is a, c, g, or t
  misc_feature (1288)..(1288): n is a, c, g, or t
  misc_feature (1290)..(1292): n is a, c, g, or t
  misc_feature (1294)..(1300): n is a, c, g, or t
  misc_feature (1302)..(1303): n is a, c, g, or t
  misc_feature (1305)..(1312): n is a, c, g, or t
  misc_feature (1314)..(1320): n is a, c, g, or t
  misc_feature (1323)..(1331): n is a, c, g, or t
  misc_feature (1333)..(1337): n is a, c, g, or t
  misc_feature (1341)..(1341): n is a, c, g, or t
  misc_feature (1345)..(1346): n is a, c, g, or t
  misc_feature (1350)..(1358): n is a, c, g, or t
  misc_feature (1361)..(1366): n is a, c, g, or t
  misc_feature (1371)..(1376): n is a, c, g, or t
  misc_feature (1380)..(1396): n is a, c, g, or t
  misc_feature (1399)..(1402): n is a, c, g, or t
  misc_feature (1406)..(1413): n is a, c, g, or t
  misc_feature (1417)..(1419): n is a, c, g, or t
  misc_feature (1422)..(1426): n is a, c, g, or t
  misc_feature (1429)..(1437): n is a, c, g, or t
  misc_feature (1439)..(1440): n is a, c, g, or t
  misc_feature (1442)..(1442): n is a, c, g, or t
  misc_feature (1444)..(1455): n is a, c, g, or t
  misc_feature (1461)..(1462): n is a, c, g, or t
  misc_feature (1465)..(1471): n is a, c, g, or t
  misc_feature (1473)..(1477): n is a, c, g, or t
  misc_feature (1480)..(1491): n is a, c, g, or t
  misc_feature (1493)..(1495): n is a, c, g, or t
  misc_feature (1497)..(1501): n is a, c, g, or t
atattcagtaagcgctgcaattggaggactagtacgccagctgtgatcagctctccgaatgagtcaggtagatctagaccactgaactcaaggcctgctggtcctgacagaaagatgtgcacaagaacatacagtgcaaacagcaccgtcgaaacggcagtgaaattgcaaaagtacttgcaagcgagcctgatatctgaccggcggtgttctacctgcaatggcgccagcaactgctctttgctcatcccgacagaaccggccacttcaacaacatgcctagacaatacttgggcgaaaccctggaaattttctctcagcccgtctcgaacactcccctcgatcacgcttctcatcatggtgctctgaaggaagtccacgttgtataggcccnccatccngcgggcgcattncnnnnnnccggacggtgcctgttaggtnnnngtctggccctatgtgcagaaccnnnnnnnagannnnattntcannggtnnnnnnnnnnnnnnnnnnnnnnnnnnnnnnnnnnntaactnnnaannnntcctaccccnnnnnactctcnnnnnnnnnnnncannnnnnnnctnnnncnnnnnnnnnnnnnnnnnnnnnnnnnnnnnnngnnnnnnnntanngaaaaaataanngatnnnnnnnnnnntnnnnnnnnnnnngttatccnnnnnnnccattcnnnnncccnnnnnnnnnnnnnnnnnnnnnncacnnnnnnncnnnnnnnttannngcnnnnnnccccnnnnnncnnnnnnncnnnnncacatnnngnctatcccnnnngnnnnnnnnnnnnnnatnnnannnnnnntttnnanntnnnnnnnnnntnataannnnnnnnnnnnnnnnnnagnnnnnaaannnnntnnnnnnnnnnnnnatanannntnannnnnnnanannntatnnannnnncctcnnnnncnnnnntnnnnnnnnnnnnnnnnnnnnnnnnngcnnnnnnnnnnnnnnannnnnnnnnnnctnnncnntncnntcctctnnctnnnnnnnnnnnnnnnnnnnnnannnnnnnnnncgttnnnnnnnnncncctncacannnnnnnnnnatnnnnnnnnnnnnnnnnnnnnnnnnnntnnctnnnnnnncanncttnnnnnnntnnnctnnnnnnnnnnccnnnnnnnnnnntnnnnntcnnctcannnnncnnnnnnnntcataaanacnnnnnnnncnnnnannnnnnnntnnnnnnnnnnnnnnnnnnnnncctcatnnnnnnnnnnnnncactntcttccnannnannnnnnntnnannnnnnnncnnnnnnntcnnnnnnnnnannnnnccanaacnnatcnnnnnnnnnccnnnnnnttcannnnnncctnnnnnnnnnnnnnnnnnctnnnncctnnnnnnnngcannnccnnnnntcnnnnnnnnncnncncnnnnnnnnnnnntctatnnacnnnnnnncnnnnnctnnnnnnnnnnnncnnncnnnnnatc

SEQ ID NO: 4660 - DNA, 689 bp, Zea mays
tgaatgaacattttccgagtgttgtcgtcgacgaatgaagaaccgcaaaaaagagagtacttcaagaaatatagcaacgactcttcttgatatatatttcaagaacccatcatcattgcctacaacatcatttggggcacgctgacctgctggtttgaacccataattaagcatgagacaagctggacatgaaggtgcgagaataaaaattctttatatagcttaatcaaataatgtaaaattttaaatggatacctggcgaaagtaaacccccatttatcagggaaccttgttctgtattgacctgcctagtttcatttccagtagagttgtatctcccgttggatcctacaactttatctgccatatgagacatgccaattgaaccactatatgttgtagatcctgattccctcgcctacagggtaaagaatcagaacgaattaactacaaattataaaacatgctaacatggtgtcatgcagctaaaaggaacagaacacattttctaatgaaagcctgaatgtgcaagttcaaatcttcacagttccaagatagacatacgacaaaaataataaaatatctccaaaaaaacataacagaacttagtaagactgtacttcctctcgaactggggccaaactaggatattcaacatcttcaggagccacaggggatccaagatcatc

SEQ ID NO: 4661 - DNA, 452 bp, Zea mays
tcagcgacgatgctgcggtgcagattgtcttcaagaatccgagaactgtaagtgatcctcattattataaggtatttatctctacgctcacgttgtttgcagtctagctaatcaggtgtcttgacaaactttgttcaggggatagccagcagactggtgaaggctgccttgaaggaagcgaccaggaagagggaggtcaggtaccgtgatctgaggacgatcgagagaggggtgaggcggcatttccacgacgacatcagcgtcgtcgtggtctacctcgatggccaccgcgagcgccgccacaccagggtcgttgactcgagcagcaactgcaccagtgcgcccgtcgacatccactcctccaactcccgctagtttccggagccccttgcaacgcgagctgaactctgggtgggaggtgaggtgggtgcagccgtagccatcggaatcgg

SEQ ID NO: 4662 - DNA, 551 bp, Zea mays
gctgctcggcttcaacgaggtgctgcacctcgccgcggcgcgcggcgttgcgctcccgggcgacatgctggaggcggccaaggacgccggcatccgggaagtcctcttgctccgctacttcgatctgcaggtcctcgaatttcagggaatttgtatggaagattcaaacgtggccgttttttctcattcctttgatattgatctgcaggccgcgccgtggccactaggcgtgttgatccgcgccttctcgatgctccgcaaccggatgctcgccgacccgtcgttcctcttcaaagttagcaccgaggtggatgcgattggtcagttattattttcaagtggtcagaaggtagcagttcggctgttgctaacaattgcgttctgggctcaatgcagattgtgatcgactcttgctgcgcgacatttgcagaggtgcagaagaggggaaaggatttttgggcagagtttgaactgtacgctgctgatcttcttgtcggtgtagcagttgatattgcacttgtggggctgctggctccatatgtgagaattat

SEQ ID NO: 4663 - DNA, 755 bp, Zea mays
  misc_feature (410)..(412): n is a, c, g, or t
  misc_feature (422)..(424): n is a, c, g, or t
  misc_feature (426)..(426): n is a, c, g, or t
  misc_feature (458)..(458): n is a, c, g, or t
  misc_feature (489)..(491): n is a, c, g, or t
  misc_feature (496)..(501): n is a, c, g, or t
  misc_feature (513)..(518): n is a, c, g, or t
  misc_feature (521)..(521): n is a, c, g, or t
  misc_feature (541)..(546): n is a, c, g, or t
  misc_feature (561)..(566): n is a, c, g, or t
  misc_feature (590)..(590): n is a, c, g, or t
  misc_feature (595)..(597): n is a, c, g, or t
  misc_feature (602)..(604): n is a, c, g, or t
  misc_feature (606)..(609): n is a, c, g, or t
  misc_feature (611)..(611): n is a, c, g, or t
  misc_feature (615)..(619): n is a, c, g, or t
  misc_feature (625)..(632): n is a, c, g, or t
  misc_feature (634)..(647): n is a, c, g, or t
  misc_feature (654)..(658): n is a, c, g, or t
  misc_feature (668)..(671): n is a, c, g, or t
  misc_feature (673)..(690): n is a, c, g, or t
  misc_feature (693)..(693): n is a, c, g, or t
  misc_feature (695)..(697): n is a, c, g, or t
  misc_feature (699)..(703): n is a, c, g, or t
  misc_feature (706)..(706): n is a, c, g, or t
  misc_feature (716)..(719): n is a, c, g, or t
  misc_feature (721)..(723): n is a, c, g, or t
  misc_feature (726)..(728): n is a, c, g, or t
  misc_feature (730)..(732): n is a, c, g, or t
  misc_feature (734)..(736): n is a, c, g, or t
  misc_feature (740)..(748): n is a, c, g, or t
gcaggtggccgcgttcgccaagcgcacagcgcaggcgcggaagcacgtcgcggtggcggcccgcactattccaccgccgcaggcacaggccctcagaacctgcgacacgatgtacatgaacacgcaggacgccatcggcgcggcgcagcgagccatcgcgttcaaggacacgggcaccgcgaagatcatgctgcagctcgccgtccaggacttcgactcgtgtgaccgtccgttcacccatgccggtgtccccaaccccatgggtaagttcgataaggagctcagccagatggccaacaactgcatgacgcttgcaaacatgatatgaatcatatatatgcggccggggacgactgtttggcatgttcttacactccagcatgagagaggacgccatcggggcggcgcannnagccatcgcnnncncggacacgggctccgcgaagatcatgctgcanctcgccgtccttgacttcaacttgtgtgacnnnacgtnnnnnnatgccggtgttnnnnnnccngtgggtaaaatcaatatggnnnnnngccttatggccaacnnnnnnatggggcttgccaacctgatatanatcgnnnatttnnngnnnnangacnnnnnggcatnnnnnnnncnnnnnnnnnnnnnnagacccnnnnnccccccccannnnannnnnnnnnnnnnnnnnnggncnnntnnnnnctnaccccccccnnnntnnnccnnncnnntnnnacannnnnnnnntcaatcc

SEQ ID NO: 4664 - DNA, 364 bp, Zea mays
tcgacggccgtgtccgtgatgcgcttcatctcggcgtcgccgaggacattcacgaggtcctccagtgtgctctccagcctttccatctccccgggcacgccgaggagcgtgtcgagcctctccttcacggcaccagcgaccattcgccccagcatgggcacgaaggcgtctaggatcatagccatgagttaatcacttgatcaagagagctcagcagggccaacaagattgaaattatgtgtgttttgagaggtcaacggcggcactggcacaagatgggtcacacttgctctattctggttgctcttgctcctgcaattataattgggaagggagttgataaacaggagattcgaccgaacag

SEQ ID NO: 4665 - DNA, 1168 bp, Zea mays
gctactccatggacgacaacgagctactgctcgtgtacgagttcatggcgaaggggagcttggagaaccacctgttccgaagtgagtgtatatatatttaatccagaagcaagatatttttttccctaacgacgacagtattcgatccagaaacgtttctctctttatgtcagcacagcactctttacgccaacttcacctgcagcagcgcactctgcaaacgctggtgcttcacctgcgtctacagatcgttttcataaaatattgtatgtggagcaccatagcgcgcgttcgtagtgccatacaactaacgagcatttcttggaggatgtcagcatcagccaaattgcatgccggacctgtacgatagatatatcttgttgctccagccttcaattattcattctcgccgagtcaaaatgggaatttcaagatgactaaaagtacttgttttccgcctgtttgtttttatcccaatctatgtagattgaaaacgattgtatgagtttaaatccattgtaaaccaaaatctctactatttttttggtgttgtgctcacagctcacctatacctttagtcgtgttttctgctcagctatgtccttctgttctatagcactggaagggcacagctgaggaaaaaacacgattaagggtatagatgaacacaacatcaaaactaaggacaccaatttaaaaaactctttttttaatcccatctcatctaatccaatccatgatggctggcgatgaataaccgaacaaggctttactgtgggccatatagctagggtgttgtgttctgtggttgtatgtatgtaatactgactagtcttaattgttcaccatttgacaggaggggcggtctacgagccgctgccctggagcctgaggctgaagatcctcatcggtgcagctcgtggcctcgcgttccttcattcgtcagagaggcagatcatctacagggacttcaaggcttccaacatcttactggattcggtaattactcttttccagagctacttaatgatgtataatactactataatgaccgcacactcaccaatgccatgttcagcacttcaacgcgaagctctcggatttcggattggccaagcatggtccagacggcggggagtctcatggacaacaagagtcatgggaccta

SEQ ID NO: 4666 - DNA, 1280 bp, Zea mays
  misc_feature (1216)..(1216): n is a, c, g, or t
  misc_feature (1218)..(1223): n is a, c, g, or t
aaggctgttgcggtatgctttgaattttaactcatttcatttaagcttaagttaaacttgttttgtgggcactatctacctggatggcttatttcaatgcattatatatgggtcacaaagtgcatgtggtgattcagcatcttgaaattgctagtaatgtatccatgccttgcattgtttttgtagcatcagtgaagcactctagctcgaaacatttgttcttaaatggttaaatctcacatggtgcaggaaaagcaaccgtttgaacgcattgaggtcagcagggcagaagctcttgaaatgtttgctgagaatgaattcaaggcaaccttccttgctactgtcttgtttgtttcattcctctatcattttgctgcttatgttaaatatatatacgacttccatccattcttacaaaaaagtgaattatatgttcaggttgaaatcattaatgagttgcctgaggacaagaccattactgtatacaggtgtggtcctttagttgacctatgccgtgggccacacatcccaaatacttcctttgtcaaagctttcgcttgtctgaaggtaatgattctttgattgtccactattcttctggttctctttttagtggaactggctatttcatatgtatacatacatgtaaatattcaggcttcatcatcatattggagaggaaaagttgaccgcgaaagcctgcagagagtatatggaatttctttccctgattctcgacgtctcacggtatagaatgtaatttctgcttatgatgctatcactgatgacacggacaattgtaaaactgtttactaatatataaccctgctgaacatgtctgttatatttgcacttcagatactagcataattatgtgttcatgattatgtgctgcacctgagttggcataaaatttcatacatgatatgacatacacttctatctgaatcaatactttgaaatcttgtctgagatcttgtgttttccggaacctgttggttaacatgggttatggggttagggatagttttgcacaacacgctgcatggtatatgtgtgaaactttaattgagcgtgtctctgaggcattgataagttcaggtaactgtaggggtcaggccatacctttcgctttcggatctgtgttatcgtattccgtctgactgtccctgaatgatacacttgcattttcttttgttattattctcatcttctntnnnnnntttattacatgtcactttgcaggaatataaacattttctagaggaagctaagaaacg

SEQ ID NO: 4667 - DNA, 1263 bp, Zea mays
  misc_feature (602)..(605): n is a, c, g, or t
  misc_feature (782)..(783): n is a, c, g, or t
  misc_feature (808)..(809): n is a, c, g, or t
  misc_feature (814)..(817): n is a, c, g, or t
  misc_feature (842)..(847): n is a, c, g, or t
  misc_feature (850)..(853): n is a, c, g, or t
  misc_feature (870)..(870): n is a, c, g, or t
  misc_feature (873)..(875): n is a, c, g, or t
  misc_feature (901)..(903): n is a, c, g, or t
  misc_feature (911)..(913): n is a, c, g, or t
  misc_feature (919)..(920): n is a, c, g, or t
  misc_feature (922)..(927): n is a, c, g, or t
  misc_feature (929)..(932): n is a, c, g, or t
  misc_feature (934)..(935): n is a, c, g, or t
  misc_feature (941)..(941): n is a, c, g, or t
  misc_feature (948)..(951): n is a, c, g, or t
  misc_feature (955)..(956): n is a, c, g, or t
  misc_feature (959)..(961): n is a, c, g, or t
  misc_feature (963)..(963): n is a, c, g, or t
  misc_feature (971)..(973): n is a, c, g, or t
  misc_feature (975)..(979): n is a, c, g, or t
  misc_feature (981)..(981): n is a, c, g, or t
  misc_feature (983)..(988): n is a, c, g, or t
  misc_feature (993)..(994): n is a, c, g, or t
  misc_feature (998)..(1007): n is a, c, g, or t
  misc_feature (1009)..(1009): n is a, c, g, or t
  misc_feature (1011)..(1037): n is a, c, g, or t
  misc_feature (1039)..(1051): n is a, c, g, or t
  misc_feature (1053)..(1057): n is a, c, g, or t
  misc_feature (1062)..(1065): n is a, c, g, or t
  misc_feature (1067)..(1076): n is a, c, g, or t
  misc_feature (1078)..(1081): n is a, c, g, or t
  misc_feature (1083)..(1118): n is a, c, g, or t
  misc_feature (1121)..(1125): n is a, c, g, or t
  misc_feature (1127)..(1127): n is a, c, g, or t
  misc_feature (1129)..(1131): n is a, c, g, or t
  misc_feature (1133)..(1146): n is a, c, g, or t
  misc_feature (1151)..(1170): n is a, c, g, or t
  misc_feature (1172)..(1174): n is a, c, g, or t
  misc_feature (1178)..(1186): n is a, c, g, or t
  misc_feature (1188)..(1202): n is a, c, g, or t
  misc_feature (1204)..(1217): n is a, c, g, or t
  misc_feature (1223)..(1230): n is a, c, g, or t
  misc_feature (1235)..(1240): n is a, c, g, or t
  misc_feature (1247)..(1255): n is a, c, g, or t
  misc_feature (1259)..(1259): n is a, c, g, or t
catatctcttatagtagtggcctactacaaaataggggtccgtgatgtacatgccgaagtgaataagtactgctcattcattgttggcatgggtataattactgtactagccaacttcttgcagcacttctactttggtataatgggagagaaaatgaccgagcgtgtcagaaggatgatgttttctggtatgaccgtcttttcctttatgttacttttgtagtcccatatttaatggtgcaacctcagctcttataaactatctagtttaacatccataaataaagcacgtattcatgagtattgaacacaagaaacaatgctgctgtgctaagttctattgtgtatagattatagtaaaccattgttgaaatatcagagttctcacattctgtttactgtattccagcaattctgcgcaatgaagttggttggtttgacgacgaagaaaatagcgcagacatattatcaatgagacttgcaaatgatgcaacatttgtccgcgctgctttcagtaacagactttctatattcattcaggatacatcggccattcttgttgcacttcttcttggtatgttactacaatggcgtgttgctcnnnnttgtttccgaatccataccgaagtttatatctattatttgagaaaatgtaggatgaatttaagatttatcttttatgaatcttaacaagctggatgttaaaaacaagaatacaaatttatattgtatattctatatcatatttattcgcaatcaaagaaaaaactgattaccgaatnnataccgtttccgaccgttttcatcnntaatnnnngcaattctgcgcaatgaagttggtnnnnnngannnngaagaaaatagcgcagncannntatcaatgagacttgcaaatgatgcnnnatttgtcnnngctgcnntnnnnnncnnnntnnctatantcattcnnnntacnncgnnncntcttgttnnncnnnnncntnnnnnntactnnaatnnnnnnnnnncncnnnnnnnnnnnnnnnnnnnnnnnnnnncnnnnnnnnnnnnntnnnnnccccnnnntnnnnnnnnnncnnnncnnnnnnnnnnnnnnnnnnnnnnnnnnnnnnnnnnnnccnnnnngncnnntnnnnnnnnnnnnnnccctnnnnnnnnnnnnnnnnnnnncnnnctcnnnnnnnnncnnnnnnnnnnnnnnncnnnnnnnnnnnnnncttccnnnnnnnncttcnnnnnntcttctnnnnnnnnntccncccc

SEQ ID NO: 4668 - DNA, 527 bp, Zea mays
ctcgtcgggatgatgatgatgagcggtcgagcggccaccgcggggcggtacccgttcacggcgtcgcagtggcaggagctggagcaccaggcgctcatctacaagtgcctggcgtccggcaagcccatcccgtcctacctcatgccaccgctccgccgcatcctcgactccgccctcgccacgtcgccgtcgctcgccgccttccagccgcaaccctcgcgtacgcgactactgtctctctctctctctctctctctctctctatgcgcccgccatgtgtctttatttccagtatattccggttcacgtccgcgttgttggttgcctttgcatgcagtggggtgggggggctgcttcgggatgggcttcagcaggaagcccgccgacgaggacccggagcccgggcggtgccggcgcacggacggcaagaagtggcgctgctccaaggaggcgtacccggactccaagtactgcgagaagcacatgcaccggggcaagaaccgttcaagaaagcctgtggaaatgtc

SEQ ID NO: 4669 - DNA, 1571 bp, Zea mays
  misc_feature (689)..(690): n is a, c, g, or t
  misc_feature (724)..(726): n is a, c, g, or t
  misc_feature (764)..(767): n is a, c, g, or t
  misc_feature (784)..(784): n is a, c, g, or t
  misc_feature (796)..(798): n is a, c, g, or t
  misc_feature (802)..(807): n is a, c, g, or t
  misc_feature (810)..(813): n is a, c, g, or t
  misc_feature (815)..(820): n is a, c, g, or t
  misc_feature (825)..(826): n is a, c, g, or t
  misc_feature (828)..(836): n is a, c, g, or t
  misc_feature (840)..(841): n is a, c, g, or t
  misc_feature (845)..(845): n is a, c, g, or t
  misc_feature (858)..(859): n is a, c, g, or t
  misc_feature (867)..(869): n is a, c, g, or t
  misc_feature (875)..(876): n is a, c, g, or t
  misc_feature (879)..(883): n is a, c, g, or t
  misc_feature (887)..(896): n is a, c, g, or t
  misc_feature (899)..(905): n is a, c, g, or t
  misc_feature (908)..(910): n is a, c, g, or t
  misc_feature (914)..(914): n is a, c, g, or t
  misc_feature (917)..(918): n is a, c, g, or t
  misc_feature (920)..(920): n is a, c, g, or t
  misc_feature (929)..(940): n is a, c, g, or t
  misc_feature (942)..(943): n is a, c, g, or t
  misc_feature (945)..(951): n is a, c, g, or t
  misc_feature (953)..(958): n is a, c, g, or t
  misc_feature (962)..(966): n is a, c, g, or t
  misc_feature (970)..(976): n is a, c, g, or t
  misc_feature (979)..(989): n is a, c, g, or t
  misc_feature (991)..(995): n is a, c, g, or t
  misc_feature (997)..(1007): n is a, c, g, or t
  misc_feature (1009)..(1017): n is a, c, g, or t
  misc_feature (1019)..(1038): n is a, c, g, or t
  misc_feature (1044)..(1045): n is a, c, g, or t
  misc_feature (1048)..(1052): n is a, c, g, or t
  misc_feature (1056)..(1065): n is a, c, g, or t
  misc_feature (1068)..(1095): n is a, c, g, or t
  misc_feature (1098)..(1134): n is a, c, g, or t
  misc_feature (1136)..(1144): n is a, c, g, or t
  misc_feature (1151)..(1157): n is a, c, g, or t
  misc_feature (1160)..(1164): n is a, c, g, or t
  misc_feature (1166)..(1213): n is a, c, g, or t
  misc_feature (1215)..(1238): n is a, c, g, or t
  misc_feature (1241)..(1247): n is a, c, g, or t
  misc_feature (1249)..(1303): n is a, c, g, or t
  misc_feature (1305)..(1316): n is a, c, g, or t
  misc_feature (1318)..(1322): n is a, c, g, or t
  misc_feature (1325)..(1326): n is a, c, g, or t
  misc_feature (1330)..(1334): n is a, c, g, or t
  misc_feature (1336)..(1336): n is a, c, g, or t
  misc_feature (1338)..(1341): n is a, c, g, or t
  misc_feature (1343)..(1369): n is a, c, g, or t
  misc_feature (1372)..(1382): n is a, c, g, or t
  misc_feature (1384)..(1399): n is a, c, g, or t
  misc_feature (1401)..(1471): n is a, c, g, or t
  misc_feature (1473)..(1491): n is a, c, g, or t
  misc_feature (1495)..(1513): n is a, c, g, or t
  misc_feature (1515)..(1568): n is a, c, g, or t
cattgatttctcttcaattcgatagatgaacaaatgaatatcaagaactgtcattgatttcttgtaggcctggagactctgggtgggccgctgcgtcacggcactccttgatccagcggttgcaccggcgcctgccaagcccgagcttgcgcaactgcgcaggtgcatccaggtcggcctcctctgcgtccaggagaagccggacgaaaggcccgccatgtccgcggttgtcgagatgctaggcagcccctgctcggagcttgccgagcccatggtgccgacggtcgtcggcaatgcagccttggctacgctcctggaggccgatctctccagaccgacggtgtacgagacaatcgattttagataagagatgacgcgctcgcactgcgttgctgctaagcttataacacttgttttatacttcgtactgttgttttacactgattataattgttattaataacatttttggtttgtttggtcgaaaagacatgacggtactaagggctaacacttacgctatctccaacagatgctctatcttgtttccttattccaaacttctatttacaaacagtgtcatcaacagttttactagagataatcttaggtattataaccatcaaagaaataagcttatcttatgattcttaccctgtctttttttttttccgggggaggggaggcanncccaaggggttcgatttgaacttgaacccccccnnnaaaagaaaaaacctgcctgcggcccattttgcaagggnnnngccaaaaaaataacccnccccccccttgnnnaacnnnnnnaannnnannnnnnaaagnncnnnnnnnnnaggnnttcnggcccgccccttnntttaaaannnaaccgnnttnnnnnaggnnnnnnnnnngtnnnnnnnctnnntttnatnnanggggggaannnnnnnnnnnncnngnnnnnnngnnnnnntgannnnntggnnnnnnnacnnnnnnnnnnngnnnnngnnnnnnnnnnnannnnnnnnncnnnnnnnnnnnnnnnnnnnncccccnncannnnngttnnnnnnnnnnggnnnnnnnnnnnnnnnnnnnnnnnnnnnnttnnnnnnnnnnnnnnnnnnnnnnnnnnnnnnnnnnnnntnnnnnnnnntcctccnnnnnnnaannnnnannnnnnnnnnnnnnnnnnnnnnnnnnnnnnnnnnnnnnnnnnnnnnnntnnnnnnnnnnnnnnnnnnnnnnnnaannnnnnnannnnnnnnnnnnnnnnnnnnnnnnnnnnnnnnnnnnnnnnnnnnnnnnnnnnnnncnnnnnnnnnnnntnnnnnctnntcannnnntnannnnannnnnnnnnnnnnnnnnnnnnnnnnnnaannnnnnnnnnntnnnnnnnnnnnnnnnntnnnnnnnnnnnnnnnnnnnnnnnnnnnnnnnnnnnnnnnnnnnnnnnnnnnnnnnnnnnnnnnnnnnnnnnannnnnnnnnnnnnnnnnnnaccnnnnnnnnnnnnnnnnnnncnnnnnnnnnnnnnnnnnnnnnnnnnnnnnnnnnnnnnnnnnnnnnnnnnnnnnntta

SEQ ID NO: 4670 - DNA, 402 bp, Zea mays
  misc_feature (385)..(387): n is a, c, g, or t
tcagtaatttcctaaggtttctcaccaagattggctccattagttctcgtgcgtcagcatcttcacaggatatctttctggccttctctgtaagtgtaacagaaattggctttcgggaagcacttccaccagagacatggaagatattggggtggcgtccgatgagtgaaagaaaatcccatttttggacaaagccaacctccttttcaaggtcacgtacaagtagtgaccctgtcttttgtgccaaaatgaggtcacgcagacgaaggagaagggcaggcttcttttgaaggtccatggccttgtcaagaccaggttcacggtggtatggcttcttcttgggtcggcgtccatgaccagctgagaatgaggacatagaaacgtnnncctggtcttgacaag

SEQ ID NO: 4671 - DNA, 365 bp, Zea mays
cagtccgagaagtgggcgtcggggctgttcgccgaccagagcaccggggccgacagcctgacggcgtggagcaggaggaaccgggggatcagggaccaggacatcgtgctgtggtacacgctgggcctgcaccacataccctaccaggaggacttcccggtgatgccaacgctcagcggcggcttcgagctccggccatccaatttcttcgagagaaatccgatcctcaagattggtaggccacccatccggtccagcgcatccgggaactgttcgtgcgatgccagatgacgtgtgcacgtacagtacagctagctctgctcaggtcacgaatctgtatcaggacattgatgaattggttgaga

SEQ ID NO: 4672 - DNA, 877 bp, Zea mays
  misc_feature (808)..(811): n is a, c, g, or t
  misc_feature (822)..(826): n is a, c, g, or t
  misc_feature (828)..(848): n is a, c, g, or t
  misc_feature (850)..(870): n is a, c, g, or t
  misc_feature (872)..(874): n is a, c, g, or t
tctcggtggagttcgaagctattcaaggtgatggtttacttctgcttagccattattcacatgttcttgttggtaccaatcaaacggcacccattttcccttctgttattgttgttgttattcttattattagatttccagaatagatcgtctgatgcgagtgcgtgcatctgatgactcgtaggagacggtcgcatgtacaagcttccttcaggaaagagggagtacctcctcccagaaggcgagaagcatgattacgactggtaattaaaaagcgtgtagatccctagttttaactgtaacccagatgcaccccgactgtttttaagttgccttgtaaagcatagcagctcgttttcaggctcaagacgcccccagcgaccccactgttcccttccctggagatggaagccaactcatcccagatgatctttcagaaggagctgctgcctatgcttcagccactcaggacttcaagggtatgctcaatgtttgcacttgtacgaccttgccctttatatattcctgtactgcaccaagctagaattctctgttaggagtgcaattgtgcaaatgattccattttctcaaactggtattgtgaaactgggtttaatcttttccttgatctttctgtgctattgtgaaactggtacagttctcaagcaagcccgactctgcaaccgcatcgacaacgtccgaatcgcctacctccagctcctccatttctgtgactccgacagcgaggcccagctcttcgtcatcgaagaaaaaactcagcagagaagctcccactccatctaaacannnnggactcaaaannnnnannnnnnnnnnnnnnnnnnnnntnnnnnnnnnnnnnnnnnnnnntnnnctt

SEQ ID NO: 4673 - DNA, 487 bp, Zea mays
attcttttacttaaaccgtgatatactgtcatatctatttattttgttagcttaaatgatttcttcaaaattcaatatttgctaaaaaagatgcatatgaaacagcatcaccatctgaaactgcactggtcactcttatctctggttgggcatgcaaaggccgggataaatccaaagatggagaatatttatgcttaacatcaggtgcggcgagatgtctatcagatgatgtagatgatctgggaaaatgccgatcattctgtccatgtgcttcacccaacagctcagatctttctctgcagctacatactgagaatgattctaggccaggcaagcgaggaaaagatgcagtatctttttctcatactaatggaatctactgctctcaaactgctgacattgaagcaattccatgtagcaaaaaaccatgttgtattcctggtttgagagtagagagtagcaatcttggtattggttccttggctta

SEQ ID NO: 4674 - DNA, 751 bp, Zea mays
  misc_feature (582)..(583): n is a, c, g, or t
  misc_feature (687)..(689): n is a, c, g, or t
  misc_feature (691)..(691): n is a, c, g, or t
  misc_feature (706)..(706): n is a, c, g, or t
  misc_feature (708)..(712): n is a, c, g, or t
  misc_feature (737)..(738): n is a, c, g, or t
aagttcggcgtctcagtttgagcgagcaacaacttgtcaaagcggcaaaggatcatgccacagaaattgtgaggtatacatatgttactgatcgatgctctattgctcttattaataggaagagtttgcttcccttgttgaagagatcagcttcctctgttccaaatccaaataggttcacacagagaaacatactgaggatataccccaagggcactcgagtcacttcatcgaactacaatccgttcgttggttgggtgcatggtgctcaaatggtggcattcaatatgcaggtatatatgtttctgactgactgagctgttgatccaagtattttcctaatgacaatcatcaatcctatcttctttttcagggatacgggagagcgctgtggctaatgcacggattttacaaagcgaatggcgggtgcggttatgtgaagaaaccagatttcttgatgcagacagaaccacaagtcttcgacccaagagaaccccagcctgtgaagaaaacgttgaaggtgaaggtgtacatgggcgatgggtggcgaatggacttcaagcagacacacttcgatcagtnnatgtacaccttcaccttcaacgttttcttcacaggctggggttctcttgggtcgaagacttgtggttctgtctgcatcaagaaatctggtttcttccctaaccnnncnccattccctttgtanannnnngcattaaccacagcgctctccccgnncccttaaaaaaaa

SEQ ID NO: 4675 - DNA, 407 bp, Zea mays
tgagaaatcggacagaggaagtaggatggcgtggcagcagctctactgcttccatcggagatggaccgaaaagattgcgacaacggcgaaggagcttcctttttcataggctgaaccaccctccacacgtcgagctcaagatcagggcgtttctccctgctgagctccgagcagcgcagtgcgcagcccaatccgcgcaagctgctctgcctgtgccagcggccactcacctgccgagtgatccaacaccgagcgaaggtcgttgtcactcaccgcctgttgcaccaccctcgcgaggcgtagaggcgcccttccggtcaggaggcgcaggatcgtaatgccaaaggagtacgtgtcagactgcggtgtcagctcccccgtgccgaagaactccgggtccatgtatg

SEQ ID NO: 4676 - DNA, 1463 bp, Zea mays
  misc_feature (381)..(392): n is a, c, g, or t
  misc_feature (410)..(410): n is a, c, g, or t
  misc_feature (499)..(501): n is a, c, g, or t
  misc_feature (503)..(509): n is a, c, g, or t
  misc_feature (513)..(515): n is a, c, g, or t
  misc_feature (517)..(517): n is a, c, g, or t
  misc_feature (519)..(520): n is a, c, g, or t
  misc_feature (522)..(527): n is a, c, g, or t
  misc_feature (535)..(546): n is a, c, g, or t
  misc_feature (548)..(553): n is a, c, g, or t
  misc_feature (555)..(580): n is a, c, g, or t
  misc_feature (586)..(591): n is a, c, g, or t
  misc_feature (595)..(609): n is a, c, g, or t
  misc_feature (613)..(621): n is a, c, g, or t
  misc_feature (627)..(648): n is a, c, g, or t
  misc_feature (655)..(655): n is a, c, g, or t
  misc_feature (660)..(661): n is a, c, g, or t
  misc_feature (663)..(666): n is a, c, g, or t
  misc_feature (673)..(677): n is a, c, g, or t
  misc_feature (679)..(684): n is a, c, g, or t
  misc_feature (688)..(693): n is a, c, g, or t
  misc_feature (696)..(702): n is a, c, g, or t
  misc_feature (704)..(706): n is a, c, g, or t
  misc_feature (709)..(711): n is a, c, g, or t
  misc_feature (714)..(724): n is a, c, g, or t
  misc_feature (726)..(731): n is a, c, g, or t
  misc_feature (738)..(741): n is a, c, g, or t
  misc_feature (744)..(765): n is a, c, g, or t
  misc_feature (767)..(767): n is a, c, g, or t
  misc_feature (769)..(785): n is a, c, g, or t
  misc_feature (789)..(799): n is a, c, g, or t
  misc_feature (802)..(818): n is a, c, g, or t
  misc_feature (820)..(829): n is a, c, g, or t
  misc_feature (838)..(838): n is a, c, g, or t
  misc_feature (841)..(848): n is a, c, g, or t
  misc_feature (851)..(858): n is a, c, g, or t
  misc_feature (860)..(860): n is a, c, g, or t
  misc_feature (862)..(864): n is a, c, g, or t
  misc_feature (867)..(867): n is a, c, g, or t
  misc_feature (873)..(887): n is a, c, g, or t
  misc_feature (889)..(889): n is a, c, g, or t
  misc_feature (891)..(892): n is a, c, g, or t
  misc_feature (895)..(900): n is a, c, g, or t
  misc_feature (903)..(903): n is a, c, g, or t
  misc_feature (913)..(923): n is a, c, g, or t
  misc_feature (927)..(930): n is a, c, g, or t
  misc_feature (933)..(949): n is a, c, g, or t
  misc_feature (951)..(953): n is a, c, g, or t
  misc_feature (958)..(959): n is a, c, g, or t
  misc_feature (965)..(992): n is a, c, g, or t
  misc_feature (994)..(1004): n is a, c, g, or t
  misc_feature (1010)..(1012): n is a, c, g, or t
  misc_feature (1014)..(1029): n is a, c, g, or t
  misc_feature (1033)..(1038): n is a, c, g, or t
  misc_feature (1042)..(1043): n is a, c, g, or t
  misc_feature (1049)..(1049): n is a, c, g, or t
  misc_feature (1051)..(1051): n is a, c, g, or t
  misc_feature (1053)..(1063): n is a, c, g, or t
  misc_feature (1065)..(1100): n is a, c, g, or t
  misc_feature (1102)..(1103): n is a, c, g, or t
  misc_feature (1105)..(1105): n is a, c, g, or t
  misc_feature (1110)..(1110): n is a, c, g, or t
  misc_feature (1113)..(1118): n is a, c, g, or t
  misc_feature (1120)..(1149): n is a, c, g, or t
  misc_feature (1151)..(1156): n is a, c, g, or t
  misc_feature (1162)..(1170): n is a, c, g, or t
  misc_feature (1173)..(1191): n is a, c, g, or t
  misc_feature (1194)..(1197): n is a, c, g, or t
  misc_feature (1200)..(1200): n is a, c, g, or t
  misc_feature (1204)..(1207): n is a, c, g, or t
  misc_feature (1209)..(1214): n is a, c, g, or t
  misc_feature (1216)..(1217): n is a, c, g, or t
  misc_feature (1219)..(1219): n is a, c, g, or t
  misc_feature (1221)..(1246): n is a, c, g, or t
  misc_feature (1249)..(1249): n is a, c, g, or t
  misc_feature (1251)..(1257): n is a, c, g, or t
  misc_feature (1259)..(1263): n is a, c, g, or t
  misc_feature (1267)..(1270): n is a, c, g, or t
  misc_feature (1275)..(1287): n is a, c, g, or t
  misc_feature (1289)..(1289): n is a, c, g, or t
  misc_feature (1291)..(1302): n is a, c, g, or t
  misc_feature (1305)..(1305): n is a, c, g, or t
  misc_feature (1307)..(1315): n is a, c, g, or t
  misc_feature (1317)..(1318): n is a, c, g, or t
  misc_feature (1320)..(1323): n is a, c, g, or t
  misc_feature (1325)..(1340): n is a, c, g, or t
  misc_feature (1342)..(1344): n is a, c, g, or t
  misc_feature (1349)..(1351): n is a, c, g, or t
  misc_feature (1353)..(1369): n is a, c, g, or t
  misc_feature (1371)..(1384): n is a, c, g, or t
  misc_feature (1387)..(1397): n is a, c, g, or t
  misc_feature (1400)..(1400): n is a, c, g, or t
  misc_feature (1402)..(1407): n is a, c, g, or t
  misc_feature (1410)..(1414): n is a, c, g, or t
  misc_feature (1417)..(1426): n is a, c, g, or t
  misc_feature (1428)..(1437): n is a, c, g, or t
  misc_feature (1439)..(1456): n is a, c, g, or t
  misc_feature (1458)..(1458): n is a, c, g, or t
  misc_feature (1460)..(1460): n is a, c, g, or t
tgccatcgtggccgtcgtggtgtccggagaactgcatcaccgagatgcagctcccgagcatcctgttgctccacgtccgcgacctgccgtcattcctcgccgtcacctccgaggacgacccatttgcgttcatgctaccggagtttcacgagctcgtcgacgcgctcgaacgagatgatggctcctcaaagcccccgacatacgtcctcgccaacatctgtgatgccatggaggccaacgctctcgcgtcgctgatgccacacatggacatctttgtctttgggcacatgctgccgttcctgcacgaggcggatgatggcaggtgcgccccacctccttgcaatgcctttgaccacgacaagagcaggtactcctacctcnnnnnnnnnnnngcaaggacggcaagaacnggcgctgctccaaggaggcgtacccggactccgagtactgcgagaagcacatgcaccggggcaagaaccgttcaagaaagcctgtggcnnnannnnnnntttnnncncnnannnnnnacccccannnnnnnnnnnntnnnnnnannnnnnnnnnnnnnnnnnnnnnnnnncccccnnnnnnaacnnnnnnnnnnnnnnntttnnnnnnnnnattaannnnnnnnnnnnnnnnnnnnnnccaaccnctccnntnnnntcccccnnnnntnnnnnncatnnnnnncannnnnnncnnnccnnnacnnnnnnnnnnncnnnnnncacctcnnnntcnnnnnnnnnnnnnnnnnnnnnntnannnnnnnnnnnnnnnnntatnnnnnnnnnnnaannnnnnnnnnnnnnnnnannnnnnnnnnccactctcnccnnnnnnnnctnnnnnnnncncnnnatncttttnnnnnnnnnnnnnnntntnnccnnnnnnatnatctctcctnnnnnnnnnnncacnnnncannnnnnnnnnnnnnnnnannntgttnnttttcnnnnnnnnnnnnnnnnnnnnnnnnnnnngnnnnnnnnnnnatgccnnnannnnnnnnnnnnnnnntccnnnnnntttnnctcttncnannnnnnnnnnnannnnnnnnnnnnnnnnnnnnnnnnnnnnnnnnnnnntnntntctanttnnnnnntnnnnnnnnnnnnnnnnnnnnnnnnnnnnnngnnnnnntgttannnnnnnnncannnnnnnnnnnnnnnnnnnccnnnnaancttnnnntnnnnnncnnantnnnnnnnnnnnnnnnnnnnnnnnnnntcngnnnnnnncnnnnnttcnnnnttctnnnnnnnnnnnnnanannnnnnnnnnnncancnnnnnnnnnanncnnnntnnnnnnnnnnnnnnnnannntattnnnannnnnnnnnnnnnnnnnannnnnnnnnnnnnntannnnnnnnnnnccncnnnnnnacnnnnncannnnnnnnnnannnnnnnnnncnnnnnnnnnnnnnnnnnncntntat

SEQ ID NO: 4677 - DNA, 360 bp, Zea mays
attaacctgtttggtcacagatgggttcaacaagtactttagatcagtcacccaggtcctcgagagggtatcattgtcaggagtgaccttcggaccacccatgttaacccgatatactgtctccagtggctgtgtagacaaaccactgtactgctggacagggttgaccatttgtgcatcatcggtgatgagatcatctgggacagagaccacctcaattgcgttgacaaatgcaattccatttgacggcttgaaggaaatcacgagcgtgtcgcgggtgatattcagtgagtattccttgaacaagggtgcggtcttgtctggttgctggaagtcactaagcaggagaacatcttgggt

SEQ ID NO: 4678 - DNA, 453 bp, Zea mays
  misc_feature (382)..(383): n is a, c, g, or t
  misc_feature (394)..(396): n is a, c, g, or t
  misc_feature (398)..(398): n is a, c, g, or t
  misc_feature (401)..(401): n is a, c, g, or t
  misc_feature (404)..(404): n is a, c, g, or t
  misc_feature (419)..(422): n is a, c, g, or t
  misc_feature (427)..(428): n is a, c, g, or t
  misc_feature (433)..(433): n is a, c, g, or t
  misc_feature (435)..(443): n is a, c, g, or t
  misc_feature (445)..(450): n is a, c, g, or t
cgtcggcgaaggccgggccggaggcgacgagcgcgtcgtagaagtggacggatgcgtgcatggcgtcgtagtagatgccaatgtgccggttggggttgcggtcggtgacgttgaaggagaggctggcgccggccgggctatagtccgggtcgaggccgccggccacagagaaggaggccatgttgaagcgcgggcggtgtgggcgcaggccgagccagataacgaagacgacgacggcggcgatgaggaggaggcccaggaggagggagcatagagtgttggcgagggctgcggcgcagctgtcccgggtgcggcgggcgatgcggcgggcgtggctggcggtggtaggaggagcaggagtgccttaatattatctgtatcnntgttactgcannncngtnaancaggatatatgcatnnnntagtnntcagncnnnnnnnnngnnnnnngac

SEQ ID NO: 4679 - DNA, 544 bp, Zea mays
ggagcagggaggcggtgctccggtgcagagcagggtggccggtgccgggcacggcttggcgcgaggggaagcttcatccgagcaggagggcgactcgggggcgggcgatgccggttcctatgccgctgctggattggggaacgacgaggaggaggatgctaaggtgatctttgcttcggtgatgtctgcattccgggatgccccgttcttgatttcgttcttggttcgttgtaacaggaagctttgacggaggagttggaaaatgtcgctcctccggcgggtgattctggccgtggcgatgcgccggagagtggccggaacgaacacatttacttcggtaatgcttgcagcttgcatcccatcccgaagtgctagctccactgttcttgtttgccttcttgattctgagtttctaagaaaacatggatttctcagagcgtcaagggtttcgaccggccaggccagcaatcgcgcacgcgacgccgccatcgtcctaccgccgcctgccattccgaagccgaaagcagtactacccgacacgctt

SEQ ID NO: 4680 - DNA, 314 bp, Zea mays
gttgttttctgcaacagttcgaatttagaggaagcatgccatggttgacaacctctagtgtttctatacacttgatttctgtttccattacaggatttgccacgaacatttccaggacaccctgcattagatgaggatgggaggaatgctttgaggcggttgttaaccgcatatgcaaggcataatccatcagttgggtactgccaggtaaattgatgccaattgaaggaattttgttttttttatctagcctcttgttggcttaattgtattgaatgagatagattgtaatcctaattggtgcatgcaaacaa

SEQ ID NO: 4681 - DNA, 367 bp, Zea mays
agctgggcaggcgtcggtcgggtcgccgccgcctcatgccctggccccgtccccgccgatcgaggggatgattcaccgcgcgacgccggggatgttgacccaggtcaggcgcaggacgaggtcgccggtctcggtgtccctgagcctgagcaggatgtcctgggagaccttgccgtccttgcacgtgatgtggctgtcggtggcgaggcagctgcccttctccgtgtggatcgtcttcatcaccgtgccgtcggggacgtcgctcaggtcctgcttggcgatctccacgaagttgaggatggagaactcggcgttgcccatgctgtcgtccttggtgaacgtgtcatggtcgaagagttcaatcttg

SEQ ID NO: 4682 - DNA, 393 bp, Zea mays
accataataatgttcagttggacatagacacacaacgagtgtgtcatgtttcatgcccattaatggtgttccattaggaatgaaaataattagtcatcatcttaaaataacttgaaagatcctagacaatattttcaacctctgtcctgtttgaaatcaagttgtagtaatcagcaggctggagctcataaaagttgtcatctttcactgcaagaacgatgctttaatgtcactgtagaactagaataaatacaaggcagatttggtaaagacaaaaaaatgacatttaggtaccatgatctgcactaggcaactttctggattgtagagcaaagttcttacttgaaaaaaacttgaatctcatgtccaagttcatctgactcctgggattta

SEQ ID NO: 4683 - DNA, 316 bp, Zea mays
tacgacctcaccttctggaaccacatcgtcttcggcgtgccctccaccctcatcgtcaccgccatcggcatccccctcatcggaaagatcaacatctgaactcgatcgtagctcatatatactacactacatgcataattgtatgcctcgatcgtatatgtacgtacttcttagcttaatttgttatataattgctcctgctcctgatcgatcggacacgtattaattgtggttttggagcgaggtgtgcatgcaatgcaatgcattcagtgtacctaattcataagcagtgcgctgtctgctgctccaacaataa

SEQ ID NO: 4684 - DNA, 966 bp, Zea mays
  misc_feature (571)..(580): n is a, c, g, or t
  misc_feature (582)..(582): n is a, c, g, or t
  misc_feature (584)..(586): n is a, c, g, or t
  misc_feature (589)..(599): n is a, c, g, or t
  misc_feature (601)..(625): n is a, c, g, or t
  misc_feature (627)..(628): n is a, c, g, or t
  misc_feature (631)..(631): n is a, c, g, or t
  misc_feature (633)..(637): n is a, c, g, or t
  misc_feature (643)..(643): n is a, c, g, or t
  misc_feature (645)..(645): n is a, c, g, or t
  misc_feature (649)..(657): n is a, c, g, or t
  misc_feature (659)..(663): n is a, c, g, or t
  misc_feature (665)..(667): n is a, c, g, or t
  misc_feature (680)..(684): n is a, c, g, or t
  misc_feature (687)..(689): n is a, c, g, or t
  misc_feature (700)..(703): n is a, c, g, or t
  misc_feature (705)..(707): n is a, c, g, or t
  misc_feature (709)..(711): n is a, c, g, or t
  misc_feature (714)..(716): n is a, c, g, or t
  misc_feature (720)..(731): n is a, c, g, or t
  misc_feature (733)..(740): n is a, c, g, or t
  misc_feature (745)..(746): n is a, c, g, or t
  misc_feature (749)..(750): n is a, c, g, or t
  misc_feature (756)..(757): n is a, c, g, or t
  misc_feature (759)..(765): n is a, c, g, or t
  misc_feature (767)..(769): n is a, c, g, or t
  misc_feature (771)..(775): n is a, c, g, or t
  misc_feature (779)..(780): n is a, c, g, or t
  misc_feature (785)..(789): n is a, c, g, or t
  misc_feature (794)..(809): n is a, c, g, or t
  misc_feature (811)..(823): n is a, c, g, or t
  misc_feature (826)..(826): n is a, c, g, or t
  misc_feature (828)..(832): n is a, c, g, or t
  misc_feature (834)..(835): n is a, c, g, or t
  misc_feature (837)..(852): n is a, c, g, or t
  misc_feature (854)..(873): n is a, c, g, or t
  misc_feature (880)..(880): n is a, c, g, or t
  misc_feature (885)..(894): n is a, c, g, or t
  misc_feature (896)..(899): n is a, c, g, or t
  misc_feature (903)..(903): n is a, c, g, or t
  misc_feature (905)..(905): n is a, c, g, or t
  misc_feature (908)..(913): n is a, c, g, or t
  misc_feature (915)..(925): n is a, c, g, or t
  misc_feature (927)..(943): n is a, c, g, or t
  misc_feature (946)..(952): n is a, c, g, or t
  misc_feature (959)..(962): n is a, c, g, or t
cgcagcgacgtccgcagcgtgcacctctccggcatggggtgcagcgccgggctcatctccgtggggctcgccaggaacctcctccaggtcgctccggaaggaacgcacgcgctggtcgtctccacggagaccatcacgcccaactactacgtcggcagcgagcgtgccatgctccttcccaactgcctcttccgcataggcggcgccgcggcgttgctgtccaactccccggccaaggccaggttccgcctcaagcacgtcgtgcgcacgctcaccggcgcgcaggacaacgcgtacacgtgcgtgttccagcaggaggacgacagcggcaacgtcgggatcaacctgaacaaggacctgatgaccatcacatgcattggacaaatactatgggcatgtcagcttttcgtaagacggcatattagatgagctatatattgtgcaactaatgttcgcaactcacaagccacaattaatctcaaagcatgtggccaacgcattgcactacaactaagaagtaacatgtttaccttccatagcttgaacaggcagctcacgttgtttcgattgnnnnnnnnnnanannnaannnnnnnnnnncnnnnnnnnnnnnnnnnnnnnnnnnnannacncnnnnncccacncncccnnnnnnnnntnnnnncnnnctcccccccccannnnnccnnnccctcaactannnncnnnannnccnnnaccnnnnnnnnnnnncnnnnnnnntaccnnctnnacaccnncnnnnnnncnnnannnnncacnnctccnnnnnacccnnnnnnnnnnnnnnnntnnnnnnnnnnnnnccncnnnnntnncnnnnnnnnnnnnnnnngnnnnnnnnnnnnnnnnnnnnctccccnctcgnnnnnnnnnncnnnncctncnacnnnnnncnnnnnnnnnnncnnnnnnnnnnnnnnnnnccnnnnnnnacgaacnnnncccc

SEQ ID NO: 4685 - DNA, 1434 bp, Zea mays
  misc_feature (406)..(407): n is a, c, g, or t
  misc_feature (418)..(419): n is a, c, g, or t
  misc_feature (423)..(425): n is a, c, g, or t
  misc_feature (485)..(485): n is a, c, g, or t
  misc_feature (492)..(497): n is a, c, g, or t
  misc_feature (499)..(499): n is a, c, g, or t
  misc_feature (525)..(527): n is a, c, g, or t
  misc_feature (537)..(543): n is a, c, g, or t
  misc_feature (577)..(577): n is a, c, g, or t
  misc_feature (620)..(621): n is a, c, g, or t
  misc_feature (653)..(655): n is a, c, g, or t
  misc_feature (691)..(693): n is a, c, g, or t
  misc_feature (705)..(709): n is a, c, g, or t
  misc_feature (723)..(725): n is a, c, g, or t
  misc_feature (731)..(732): n is a, c, g, or t
  misc_feature (734)..(736): n is a, c, g, or t
  misc_feature (738)..(738): n is a, c, g, or t
  misc_feature (740)..(740): n is a, c, g, or t
  misc_feature (742)..(745): n is a, c, g, or t
  misc_feature (749)..(751): n is a, c, g, or t
  misc_feature (765)..(765): n is a, c, g, or t
  misc_feature (769)..(773): n is a, c, g, or t
  misc_feature (778)..(779): n is a, c, g, or t
  misc_feature (781)..(781): n is a, c, g, or t
  misc_feature (783)..(785): n is a, c, g, or t
  misc_feature (789)..(793): n is a, c, g, or t
  misc_feature (804)..(807): n is a, c, g, or t
  misc_feature (810)..(811): n is a, c, g, or t
  misc_feature (813)..(814): n is a, c, g, or t
  misc_feature (816)..(817): n is a, c, g, or t
  misc_feature (819)..(822): n is a, c, g, or t
  misc_feature (824)..(827): n is a, c, g, or t
  misc_feature (830)..(832): n is a, c, g, or t
  misc_feature (834)..(835): n is a, c, g, or t
  misc_feature (849)..(850): n is a, c, g, or t
  misc_feature (853)..(853): n is a, c, g, or t
  misc_feature (855)..(857): n is a, c, g, or t
  misc_feature (860)..(861): n is a, c, g, or t
  misc_feature (864)..(865): n is a, c, g, or t
  misc_feature (867)..(870): n is a, c, g, or t
  misc_feature (874)..(879): n is a, c, g, or t
  misc_feature (881)..(882): n is a, c, g, or t
  misc_feature (892)..(898): n is a, c, g, or t
  misc_feature (909)..(915): n is a, c, g, or t
  misc_feature (917)..(930): n is a, c, g, or t
  misc_feature (941)..(945): n is a, c, g, or t
  misc_feature (947)..(959): n is a, c, g, or t
  misc_feature (961)..(971): n is a, c, g, or t
  misc_feature (975)..(977): n is a, c, g, or t
  misc_feature (979)..(985): n is a, c, g, or t
  misc_feature (989)..(995): n is a, c, g, or t
  misc_feature (997)..(1003): n is a, c, g, or t
  misc_feature (1005)..(1008): n is a, c, g, or t
  misc_feature (1010)..(1014): n is a, c, g, or t
  misc_feature (1016)..(1028): n is a, c, g, or t
  misc_feature (1032)..(1033): n is a, c, g, or t
  misc_feature (1040)..(1042): n is a, c, g, or t
  misc_feature (1048)..(1057): n is a, c, g, or t
  misc_feature (1059)..(1061): n is a, c, g, or t
  misc_feature (1063)..(1065): n is a, c, g, or t
  misc_feature (1070)..(1076): n is a, c, g, or t
  misc_feature (1079)..(1084): n is a, c, g, or t
  misc_feature (1086)..(1089): n is a, c, g, or t
  misc_feature (1091)..(1093): n is a, c, g, or t
  misc_feature (1104)..(1104): n is a, c, g, or t
  misc_feature (1110)..(1116): n is a, c, g, or t
  misc_feature (1121)..(1127): n is a, c, g, or t
  misc_feature (1129)..(1131): n is a, c, g, or t
  misc_feature (1133)..(1134): n is a, c, g, or t
  misc_feature (1140)..(1143): n is a, c, g, or t
  misc_feature (1154)..(1161): n is a, c, g, or t
  misc_feature (1163)..(1164): n is a, c, g, or t
  misc_feature (1168)..(1168): n is a, c, g, or t
  misc_feature (1172)..(1172): n is a, c, g, or t
  misc_feature (1174)..(1176): n is a, c, g, or t
  misc_feature (1182)..(1185): n is a, c, g, or t
  misc_feature (1188)..(1188): n is a, c, g, or t
  misc_feature (1190)..(1190): n is a, c, g, or t
  misc_feature (1192)..(1193): n is a, c, g, or t
  misc_feature (1196)..(1198): n is a, c, g, or t
  misc_feature (1203)..(1203): n is a, c, g, or t
  misc_feature (1205)..(1207): n is a, c, g, or t
  misc_feature (1214)..(1219): n is a, c, g, or t
  misc_feature (1222)..(1223): n is a, c, g, or t
  misc_feature (1227)..(1230): n is a, c, g, or t
  misc_feature (1232)..(1232): n is a, c, g, or t
  misc_feature (1234)..(1234): n is a, c, g, or t
  misc_feature (1238)..(1239): n is a, c, g, or t
  misc_feature (1241)..(1246): n is a, c, g, or t
  misc_feature (1249)..(1250): n is a, c, g, or t
  misc_feature (1252)..(1265): n is a, c, g, or t
  misc_feature (1267)..(1267): n is a, c, g, or t
  misc_feature (1269)..(1272): n is a, c, g, or t
  misc_feature (1274)..(1276): n is a, c, g, or t
  misc_feature (1287)..(1287): n is a, c, g, or t
  misc_feature (1290)..(1290): n is a, c, g, or t
  misc_feature (1293)..(1295): n is a, c, g, or t
  misc_feature (1297)..(1297): n is a, c, g, or t
  misc_feature (1300)..(1313): n is a, c, g, or t
  misc_feature (1315)..(1317): n is a, c, g, or t
  misc_feature (1321)..(1323): n is a, c, g, or t
  misc_feature (1325)..(1325): n is a, c, g, or t
  misc_feature (1330)..(1332): n is a, c, g, or t
  misc_feature (1339)..(1345): n is a, c, g, or t
  misc_feature (1349)..(1359): n is a, c, g, or t
  misc_feature (1363)..(1371): n is a, c, g, or t
  misc_feature (1378)..(1382): n is a, c, g, or t
  misc_feature (1384)..(1390): n is a, c, g, or t
  misc_feature (1392)..(1395): n is a, c, g, or t
  misc_feature (1397)..(1397): n is a, c, g, or t
  misc_feature (1400)..(1407): n is a, c, g, or t
  misc_feature (1410)..(1410): n is a, c, g, or t
  misc_feature (1414)..(1426): n is a, c, g, or t
  misc_feature (1428)..(1431): n is a, c, g, or t
cggcgaccagctcgtcgcgacggggtccgtcatgcaccccttctaccaggtgcccaagggagacacgcccgtgcaggggaccctcaccgccaaggcccccgtcccgtcggacccgtcgtgggggcggttcgccggcgaggtgtcggcggggagcgtcggtatgcggctggtgctcagctccaagctgcagttccaggcgaagatgtgggacagcaagaatcaccacatcaaggtggagtgcgacttcactatgcaaggggatgggacgctccgtaagcaggacaaggactcccagtgcacgctctacttctagcgtgatcgccctgcttcttgaattgatgcaggccggcctcgctgacccctttcaactaaccttggtttcaaatttgattgcaagtaccccatnngagatacggannttgnnntttgtacggttacctccagtgactcgtctgtactggaatttgaatcttggctcacgaatncggtcannnnnncntttctacacacacctgtttcaacaannntatgggttgnnnnnnncactctttcctactagtcccatattttagctggnaattttcccatcaccgtcatcataggttcaccggacatatggnnaaagatatggcgttcgttccagccacggaggnnnacagaaatcagagaaaactagctaatctcctatatnnncaaagagactgnnnnnatgttcgaggatgnnnctattnngnnntntntnnnnactnnntgctcaccaactcncccnnnnngcagnntnannntctnnnnnaaacgtttatnnnnggnnanngnncnnnnannnnggnnnanncgccaaaggcggcnntgngnnngcnnccnncnnnncccnnnnnncnnccaaatttcnnnnnnntttccaaaaannnnnnnannnnnnnnnnnnnnactcccaaacnnnnncnnnnnnnnnnnnnannnnnnnnnnnactnnntnnnnnnncggnnnnnnnannnnnnntnnnnannnnnannnnnnnnnnnnncttnnatttttnnnacaaannnnnnnnnngnnncnnnacccnnnnnnntcnnnnnncnnnncnnnatccctcctcncccccnnnnnnnactannnnnnncnnncnnttctannnngttcccctcgnnnnnnnntnnacangcgncnnnctcccnnnnctntncnngcnnnactcncnnntctcccnnnnnnaanncccnnnncntntagnncnnnnnncanncnnnnnnnnnnnnnncncnnnncnnnccctcccccanacnacnnntnccnnnnnnnnnnnnnncnnncacnnnanaaccnnntcatctnnnnnnnactnnnnnnnnnnnatcnnnnnnnnncactccnnnnncnnnnnnncnnnnanaannnnnnnnctnccannnnnnnnnnnnncnnnncct

SEQ ID NO: 4686 - DNA, 382 bp, Zea mays
ccggccacccccgacatcttccaggagtcgccgccaccgcatctccgccattttgtgggccacggccacaacggcaccgatgtccccatgccacattgccaccccagccgcatgtggtggcatcgctggaggagcggcttggcgcggagatggacgaggcgcatgtgctgcttgcgcaggaccagcggttgacgcacatggcgctcgtgcaggaggtcgctgccgcgcggcgcgatctcggctgcaccgcgcacgagctcacctccgctcatgaggagagcgaccaatgccttcacgaatcacgaggcgtggtcactccccctcacgagcttacgggctgaatgcatcttcttttctatgcgttgcaattctgggtacttat

SEQ ID NO: 4687 - DNA, 408 bp, Zea mays
ggtgcgccacgcccacggcccacttgtcctgcgccacctgcacgttccaggcctccagggacacgttcgcggggaggccggaccaccagaagttgcccacggggcccaggatggctacgccggaaagcctgtgcgggatgtacttgaggcagctccacatgatctccccgcccatggagaagccggcgaggtagaacctgtcgccgagctccatggcgtcggcgagctgctcgatgtccagggcgacgctcttgtcggtcctagccgggtgcgggtcgctctccccgtacccggggcggtcgaaggagagcaggtagacgcccagctcctgggccagctcgggcgacacccggagcacgtcgtacctgcacgagtcgaacccgtgcatgaagacgatcctgtacctaa

SEQ ID NO: 4688 - DNA, 420 bp, Zea mays
tctgctcggtcctcttcctcctctccaagatgctcatctccttcctcctctacaagaaatgggcgcgcaagaagaggatcatcgacaacagcctcgctggcggcaagatggtcatcttccgctccgccaccatggccatgccgcagtctctcacccccaagtccttcctcgccatgctcatgggcctctccaccaaggacgtcatcggcgccggcggctacggcaccgtctaccgcctgcgcctggacgacaagaccgccttcgccgtcaagaggctcaaccggggcacccaccaccacgaggcggacgaccgcggattcgagcgggagctggacgccatgggagacatcaagcaccgcaacatcgtcccgctctgcggctactactacgccgccacgcacttcaacctcctcatctaca

SEQ ID NO: 4689 - DNA, 842 bp, Zea mays
  misc_feature (830)..(834): n is a, c, g, or t
ttggcactggacgtgacaatggaacagatgacttcgatgcagtaagagtggcagtccgcttgcttggggttgtaggtcttgaactaacagaggaaatgtttgcattgaggactgatgacctgctgttgctagacactggtgtagattgaactgcccggcgggagacagatatactccgtgcaggcctagtgggaaacgtcgaatacccattctctgtctcagaagtggaaaactgcaacaaacatatcatacagcttatgttaatataatcatgatccaccacgagatgagtagcgaagagcaagttagatgggtatgatcccacagttagactgaaagaggtatcattatcaagtttgctatctcaaaactacacaataatagattttcaaatcgattccactagtccaaaagattaaaatgattctagcaacttcttgaagcgaggcacaaattactcttgaatttaccataacctatgaaatcggtgcttgaaattcatatctttgcagttgtagataccataaagcatggataaataatcattgcaacttgcaagtatgtgacaaatatatatatagaccaatagatgagccacaggttaatttgatgcatgcaacttgaatgcagcattttgttattccttatgtacgtaaatcaccaatatgacctgaatgaattcatatgccactgataataagccataaaacatatatagtcttcacaaaaaatcgtgacactgcatacacaaagaatcaagaaacatgttggatgtaaaaatatagagcattcaataataacaatttttaccgaccactagatgctctagnnnnnaggaggtg

SEQ ID NO: 4690 - DNA, 374 bp, Zea mays
ctttcctccctggcgcagttacaggccaaaaactaagcttctctgccgaaaatgcggagcatctatcggctatggatacggtgagccagctggtttgtgcagttttgatccagcaagttcatcttcctccagtacatcccagaagtatttaataaagatccaagcactccaaccttcagacgggacccagtaagtcagatatggaaagagagacaatagatgccagcttagagaactccatcagttacctatctgacgactgcttgctttctatatttaacaagctagaaagcgagtcagagaggagtgcttttggtttgacctgcaagaattggttcaaggttcggaaccttggtcggaaatcactaacattc

SEQ ID NO: 4691 - DNA, 483 bp, Zea mays
atcccttgattttttgggaccacaccgccaccaaaaattgctccggtgttcactttcccccgcgtgactctcatccaaacaatatagaaaatatggctatctcctttcatccctccttatacatccaactaaacacaccacaagttgatctttccaccgccaccctaacataaatgttttgtgtagtgtatgttacaattatcttgatttccttgttttgtcgactccttggtgatcgatgtgcctaactggctaaagaatgatatagtttgtaaagatttacaagagcaacacgttaggttgtttccagaaagaatatcatttactatatacactatgcataggctatcaacctcgaagggacgcgcagctcgcatgtaattccggcgattgcacgtctttacaaaataagataattatatcatggtctcaaatttgtcgagtttcttcactctttgcatagatctgaccagcaatgccaaa

SEQ ID NO: 4692 - DNA, 445 bp, Zea mays
ccttcgccgccgccgccatgggtaacgatatccttgtcctcgtctctatctctactttgcgtgcatccttccaatagccgtttactcagattgatctatctgcttctggcgcaggtaaggttcacggatcgctggcccgcgctgggaaggtgcgcgggcagacgcccaaggttgcaaagcaggacaagaagaagaagccccgcggccgcgctcacaagcgcatgcaatacaaccgccgcttcgtcaccgccgttgttggattcggcaagaagcgcggccccaactcatcggagaagtagatctagctatggctttgtgttttattccccactagtttcctcactgatggcaacttgctgaagacttatgctattatctgtatcgatgttactgcaatactgttaagtacgatatatgcatcgtttagttgatcaagttgcctgtg

SEQ ID NO: 4693 - DNA, 683 bp, Zea mays
  misc_feature (582)..(584): n is a, c, g, or t
  misc_feature (589)..(589): n is a, c, g, or t
  misc_feature (603)..(603): n is a, c, g, or t
  misc_feature (612)..(619): n is a, c, g, or t
  misc_feature (626)..(628): n is a, c, g, or t
  misc_feature (630)..(631): n is a, c, g, or t
  misc_feature (633)..(635): n is a, c, g, or t
  misc_feature (637)..(637): n is a, c, g, or t
  misc_feature (640)..(643): n is a, c, g, or t
  misc_feature (645)..(646): n is a, c, g, or t
  misc_feature (650)..(653): n is a, c, g, or t
  misc_feature (655)..(655): n is a, c, g, or t
  misc_feature (657)..(659): n is a, c, g, or t
  misc_feature (666)..(668): n is a, c, g, or t
cttgcttcgtcgcacttccattgatctatgtctgtaatacccactttgtaagaaaatctaaaaggagagattatattcctttacatgtatgtgtgttatccctatttatcatttcatgtggacacctcacctatacaaataaataattaacaaaagacactcaaataaattatgcatcatgctgagtttttacttgattgtgtatttgtggatagtaaaataaatgtgttactaaccatatattaaaatattaagggacacatagaatttaaactctaatttggagaaacatagcactagctttaataaaataaatattgaaaataaataagttcacccgtgtcatgtttaagggggacatgtgatagggaaacaaattagaggagtttaaattctatgtgtcccttaatattttaatatatggttagtaacacatttattttactatccacaaatacacaatcaagtaaaaactcagcatgatgcataatttatttgagtgtcttttgttaattatttatttgtataagagaggtgtccacatgaaatgataaatagggataacacacatacatgtaaagnnntatantctctccttttagnttttattannnnnnnngtattannnanntnnntnaannnnanngcgnnnnancnnncttcatnnncttgacgtaagaaaa

SEQ ID NO: 4694 - DNA, 478 bp, Zea mays
gctactgatgaagaggaactcatttgtttatatcttcaaagtagtccaggtatccatcttgcttcctaaaatcttctcgacttccaaattcaggtagtaaattctgatgaatgctccatatttgtaccagctcataattcttggaacaattgcaatgacggtcttcctgcgcacaacaatgcatcgacgtggtgtcgaagatggggtgatatttctgggcgccatgttccttggactagtcacacatttgttcaatggttttgctgagctcgccatgagtatcgcaaagctgccgatattttataagcagagggacctcctcttctatccatcatgggcatatgcatcgcctacatggttgctaaagataccaatatcattcttggaatgcgctgtgtggatcggcatgacttactatgtcattggctttgatccaagcattgaaaggttctttcgccattaccttctgcttgtacta

SEQ ID NO: 4695 - DNA, 360 bp, Zea mays
aacgccgcggagacagtatttgctcttccccatgccctcacccacccaagaagcccccgacaggttgcccgacggtggatggacgggggcgttgctggttgcggtgggtggagacgacggttgaacgaagcagtggcagaaaaaaaaaggttatcgacgggggttaagcagaggccacgaattggcggcggacggtgcagcgaagtggcacgtcaccggcggccgagagcggtggtgctgaaaatgccgttggagaaatcccgtgctctcgcgaccacgccgagggcgtggcgtgaggcggcggcaagttgtcagctgtcacgacactactacgatgactctgctaccatctggtttctg

SEQ ID NO: 4696 - DNA, 1436 bp, Zea mays
  misc_feature (563)..(574): n is a, c, g, or t
  misc_feature (576)..(583): n is a, c, g, or t
  misc_feature (585)..(588): n is a, c, g, or t
  misc_feature (590)..(602): n is a, c, g, or t
  misc_feature (605)..(613): n is a, c, g, or t
  misc_feature (615)..(618): n is a, c, g, or t
  misc_feature (620)..(624): n is a, c, g, or t
  misc_feature (634)..(636): n is a, c, g, or t
  misc_feature (639)..(639): n is a, c, g, or t
  misc_feature (647)..(649): n is a, c, g, or t
  misc_feature (651)..(660): n is a, c, g, or t
  misc_feature (662)..(668): n is a, c, g, or t
  misc_feature (673)..(676): n is a, c, g, or t
  misc_feature (684)..(686): n is a, c, g, or t
  misc_feature (689)..(696): n is a, c, g, or t
  misc_feature (704)..(706): n is a, c, g, or t
  misc_feature (709)..(713): n is a, c, g, or t
  misc_feature (715)..(717): n is a, c, g, or t
  misc_feature (719)..(721): n is a, c, g, or t
  misc_feature (725)..(735): n is a, c, g, or t
  misc_feature (738)..(742): n is a, c, g, or t
  misc_feature (744)..(753): n is a, c, g, or t
  misc_feature (755)..(758): n is a, c, g, or t
  misc_feature (762)..(775): n is a, c, g, or t
  misc_feature (777)..(784): n is a, c, g, or t
  misc_feature (786)..(786): n is a, c, g, or t
  misc_feature (788)..(793): n is a, c, g, or t
  misc_feature (796)..(800): n is a, c, g, or t
  misc_feature (802)..(805): n is a, c, g, or t
  misc_feature (811)..(818): n is a, c, g, or t
  misc_feature (820)..(825): n is a, c, g, or t
  misc_feature (828)..(834): n is a, c, g, or t
  misc_feature (839)..(841): n is a, c, g, or t
  misc_feature (843)..(844): n is a, c, g, or t
  misc_feature (848)..(850): n is a, c, g, or t
  misc_feature (852)..(852): n is a, c, g, or t
  misc_feature (854)..(858): n is a, c, g, or t
  misc_feature (860)..(861): n is a, c, g, or t
  misc_feature (863)..(872): n is a, c, g, or t
  misc_feature (875)..(875): n is a, c, g, or t
  misc_feature (878)..(886): n is a, c, g, or t
  misc_feature (891)..(903): n is a, c, g, or t
  misc_feature (905)..(907): n is a, c, g, or t
  misc_feature (909)..(909): n is a, c, g, or t
  misc_feature (915)..(916): n is a, c, g, or t
  misc_feature (922)..(927): n is a, c, g, or t
  misc_feature (936)..(941): n is a, c, g, or t
  misc_feature (944)..(951): n is a, c, g, or t
  misc_feature (953)..(954): n is a, c, g, or t
  misc_feature (956)..(966): n is a, c, g, or t
  misc_feature (971)..(971): n is a, c, g, or t
  misc_feature (973)..(975): n is a, c, g, or t
  misc_feature (977)..(990): n is a, c, g, or t
  misc_feature (995)..(997): n is a, c, g, or t
  misc_feature (1000)..(1004): n is a, c, g, or t
  misc_feature (1006)..(1007): n is a, c, g, or t
  misc_feature (1014)..(1016): n is a, c, g, or t
  misc_feature (1019)..(1033): n is a, c, g, or t
  misc_feature (1041)..(1053): n is a, c, g, or t
  misc_feature (1055)..(1057): n is a, c, g, or t
  misc_feature (1059)..(1059): n is a, c, g, or t
  misc_feature (1061)..(1063): n is a, c, g, or t
  misc_feature (1065)..(1068): n is a, c, g, or t
  misc_feature (1070)..(1070): n is a, c, g, or t
  misc_feature (1072)..(1072): n is a, c, g, or t
  misc_feature (1074)..(1076): n is a, c, g, or t
  misc_feature (1078)..(1088): n is a, c, g, or t
  misc_feature (1091)..(1092): n is a, c, g, or t
  misc_feature (1106)..(1111): n is a, c, g, or t
  misc_feature (1113)..(1124): n is a, c, g, or t
  misc_feature (1128)..(1138): n is a, c, g, or t
  misc_feature (1141)..(1149): n is a, c, g, or t
  misc_feature (1153)..(1160): n is a, c, g, or t
  misc_feature (1162)..(1172): n is a, c, g, or t
  misc_feature (1174)..(1176): n is a, c, g, or t
  misc_feature (1180)..(1193): n is a, c, g, or t
  misc_feature (1196)..(1210): n is a, c, g, or t
  misc_feature (1212)..(1219): n is a, c, g, or t
  misc_feature (1224)..(1240): n is a, c, g, or t
  misc_feature (1247)..(1249): n is a, c, g, or t
  misc_feature (1261)..(1261): n is a, c, g, or t
  misc_feature (1265)..(1266): n is a, c, g, or t
  misc_feature (1270)..(1271): n is a, c, g, or t
  misc_feature (1279)..(1293): n is a, c, g, or t
  misc_feature (1295)..(1299): n is a, c, g, or t
  misc_feature (1301)..(1301): n is a, c, g, or t
  misc_feature (1306)..(1311): n is a, c, g, or t
  misc_feature (1314)..(1319): n is a, c, g, or t
  misc_feature (1324)..(1330): n is a, c, g, or t
  misc_feature (1335)..(1337): n is a, c, g, or t
  misc_feature (1339)..(1347): n is a, c, g, or t
  misc_feature (1349)..(1361): n is a, c, g, or t
  misc_feature (1364)..(1373): n is a, c, g, or t
  misc_feature (1378)..(1380): n is a, c, g, or t
  misc_feature (1383)..(1392): n is a, c, g, or t
  misc_feature (1395)..(1400): n is a, c, g, or t
  misc_feature (1404)..(1406): n is a, c, g, or t
  misc_feature (1409)..(1411): n is a, c, g, or t
  misc_feature (1415)..(1418): n is a, c, g, or t
  misc_feature (1420)..(1426): n is a, c, g, or t
  misc_feature (1428)..(1431): n is a, c, g, or t
  misc_feature (1433)..(1433): n is a, c, g, or t
aagtttcctcgaggatgtgctccaggcgcacttcctctcgtggccaattccgatgctgcggcttcttttcctccggcgccgacgctcgcttggcctcgctgtcttcctccccacccggaccagaagccgttcctggcttcctatcctgggattgggagcggtgcttgttgtacaaggacatgaggagctgaaccagcttgatcgccttctggagcttcttccgcatagggcgctccccttccagctgtggtatagccttccccacttggatttcatcacggcggcccttgcccatttcgccgtcgtccttcaacttccgtgcagcgccatcgctgtacttccggctcggtttcttcttcacatgcattggacaaatactatgggcatgacagcttttcgtaagacggcatattagatgagctatatattgtgcaactaatgttcgcaactcacaagccacaattaatctcaaagcatgtggccaacgcattgcactacaactaagaagtaacatgtttaccttccatagcttgaacaggcagctcacgttgtttcgattgctnnnnnnnnnnnnannnnnnnncnnnncnnnnnnnnnnnnntcnnnnnnnnncnnnncnnnnntacaccaacnnntcnccataccnnncnnnnnnnnnncnnnnnnnctccnnnncccccccnnnccnnnnnnnnccatcttnnntcnnnnncnnncnnncacnnnnnnnnnnnctnnnnncnnnnnnnnnncnnnnatcnnnnnnnnnnnnnntnnnnnnnntncnnnnnnttnnnnncnnnntactannnnnnnncnnnnnnttnnnnnnnacttnnncnncatnnncncnnnnncnnannnnnnnnnnccntcnnnnnnnnnactcnnnnnnnnnnnnncnnncnctcttnncccccnnnnnntcactttcnnnnnnccnnnnnnnntnnannnnnnnnnnntttcntnnncnnnnnnnnnnnnnnaccannnttnnnnnannccaaccnnnacnnnnnnnnnnnnnnncccaaccnnnnnnnnnnnnnannntntnnncnnnncnanannncnnnnnnnnnnnccnnaaaccaccctcccnnnnnncnnnnnnnnnnnncttnnnnnnnnnnntcnnnnnnnnnctcnnnnnnnncnnnnnnnnnnncnnnctcnnnnnnnnnnnnnnccnnnnnnnnnnnnnnntnnnnnnnncctcnnnnnnnnnnnnnnnnnccccccnnnctccccttctcncatnntctnnctcccacnnnnnnnnnnnnnnnannnnnancctannnnnnttnnnnnncccannnnnnnactcnnntnnnnnnnnncnnnnnnnnnnnnntcnnnnnnnnnnactannntcnnnnnnnnnnatnnnnnncccnnnctnnncccnnnncnnnnnnncnnnncntct

(The sequence listing continues in the following parts.)

What is claimed is:

1. A library of nucleic acid molecules, said library comprising at least two distinct sets of nucleic acid molecules wherein each of said distinct sets of nucleic acid molecules permits typing of a corresponding-corn genomic DNA polymorphism identified in Table 1 or Table 3.

2. The library of claim 1, wherein said distinct sets of nucleic acid molecules are arrayed on at least one solid support or on at least one microtiter plate.

3-17. (canceled)

18. The library of claim 1, wherein said corresponding distinct corn genomic DNA polymorphisms identified in Table 3 are selected from the group consisting of SEQ ID NO: 2468, 5407, 287, 574, 3407, 5367, 4566, 2457, 5295, 4548, 5182, 5489, 2714, 2726, 375, 275, 1415, 885, 2067, 4773, 1708, 1479, 3507, 2765, and 1279.

19-28. (canceled)

29. An isolated nucleic acid molecule for detecting a molecular marker representing a polymorphism in corn DNA, wherein said nucleic acid molecule comprises at least 15 nucleotides that include or are immediately adjacent to said polymorphism, wherein said nucleic acid molecule is at least 90 percent identical to a sequence of the same number of consecutive nucleotides in either strand of DNA that include or are immediately adjacent to said polymorphism, and wherein said polymorphism is identified in Table 1 or Table 3.

30-32. (canceled)

33. The isolated nucleic acid of claim 29, wherein said polymorphism in Table 3 is selected from the group consisting of SEQ ID NO: 2468, 5407, 287, 574, 3407, 5367, 4566, 2457, 5295, 4548, 5182, 5489, 2714, 2726, 375, 275, 1415, 885, 2067, 4773, 1708, 1479, 3507, 2765, and 1279.

34-60. (canceled)

61. A method of genotyping a corn plant to select a parent plant, a progeny plant or a tester plant for breeding, said method comprising the steps of:
a. obtaining a DNA or RNA sample from a tissue of at least one corn plant;
b. determining an allelic state of a set of corn genomic DNA polymorphisms comprising at least two polymorphisms identified in Table 1 or Table 3 for said sample from step (a), wherein said allelic state is determined with a set of nucleic acid molecules that provide for typing of said corn genomic DNA polymorphisms; and
c. using said allelic state determination of step (b) to select a parent plant, a progeny plant or a tester plant for breeding.

62. The method of genotyping a corn plant of claim 61, wherein said set of corn genomic DNA polymorphisms comprise at least 5 polymorphisms identified in Table 1 or Table 3.

63. (canceled)

64. The method of genotyping a corn plant of claim 61, wherein said set of corn genomic DNA polymorphisms comprise at least 20 polymorphisms identified in Table 1 or Table 3.

65. The method of genotyping a corn plant of claim 61, wherein said set of corn genomic DNA polymorphisms comprise at least 2 polymorphisms selected from the group consisting of SEQ ID NO: 5407, 287, 574, 3407, 5367, 4566, 2457, 5295, 4548, 5182, 5489, 2714, 2726, 375, 275, 1415, 885, 2067, 4773, 1708, 1479, 3507, 2765, and 1279, and SEQ ID NO: 2468, and wherein said set of corn genomic DNA polymorphisms are associated with a trait value for yield.

66. The method of genotyping a corn plant of claim 65, wherein said set of corn genomic DNA polymorphisms comprise at least 2 polymorphisms selected from the group consisting of SEQ ID NO: 2468, 5407, 287, 574, 3407, 5367, 4566, 2457, 5295, and 4548.

67-71. (canceled)

72. The method of claim 64, wherein said set of at least 20 corn genomic DNA polymorphisms identify polymorphisms that are distributed across the genome of corn.

73. The method of claim 72, wherein said set of at least 20 corn genomic DNA polymorphisms identify polymorphisms that are distributed across a single chromosome of corn.

74. The method of claim 72, wherein said set of at least 20 corn genomic DNA polymorphisms identify polymorphisms that are distributed across at least two chromosomes of corn.

75-100. (canceled)
